United States Patent Application Publication US 2024/0327476 A1 - sequence listing, part 91

SEQ ID NO: 175609 - DNA, 2700 bp, synthetic construct
  misc_feature 1..2700: note = Description of Artificial Sequence: Synthetic coding sequence
  source 1..2700: mol_type = other DNA
atggacaggaaggtggcccgggagttccgccacaaggtggacttcctgattgaaaatgatgctgagaaggactacctgtatgatgtgctgaggatgtaccaccagaccatggatgtggccgtgctggtgggggacctgaagctggtgatcaatgagcccagccggctgcccctgtttgatgccatccggcccctcatccccctgaagcaccaggtggagtatgaccagctgaccccccggcgcagcaggaagctgaaggaggtgcggctggaccggctgcaccctgagggcctgggcctgtctgtgcggggcggcctggagtttggctgcggcctcttcatcagccacctgatcaagggcggccaggccgacagcgtgggcctgcaggtgggagatgagatcgtgcgcatcaatggctacagcatcagcagctgcacccatgaggaggtgatcaacctgatccgcaccaagaagacagtgtccatcaaggtgcgccacatcggcctcatccctgtgaagagcagcccagatgagcccctgacctggcagtatgtggaccagtttgtgtctgagagcggcggcgtgcggggcagcctgggcagccctggcaaccgggagaacaaggagaagaaggtgttcatcagcctggtgggcagccggggcctgggctgcagcatcagcagcggccccatccagaagccaggcatcttcatcagccacgtgaagccaggcagcctgtctgctgaggtgggcctggagatcggggaccagatcgtggaggtgaatggagtggacttcagcaacctggaccacaaggaggccgtgaatgtgctgaagagcagccgcagcctgaccatcagcatcgtggccgccgccggccgggagctgttcatgacagaccgggagcggctggccgaggcccggcagcgggagctgcagaggcaggagctgctgatgcagaagaggctggccatggagagcaacaagatcctgcaggagcagcaggagatggagcggcagaggaggaaggagatcgcccagaaggctgctgaggagaatgaaagatacaggaaggagatggagcagatcgtggaggaggaggagaagttcaagaagcagtgggaggaggactggggcagcaaggagcagctgctgctgcccaagaccatcacagctgaggtgcaccctgtgcccctgaggaagcccaagagctttggctggttctaccgctatgatggcaagttccccaccatcaggaagaagggcaaggacaagaagaaggccaagtatggcagcctgcaggacctgaggaagaacaagaaggagctggagtttgagcagaagctgtacaaggagaaggaggagatgctggagaaggagaagcagctgaagatcaaccggctggcccaggaggtgtctgaaacagagcgggaggacctggaggagagcgagaagatccagtactgggtggagcggctgtgccagacccggctggagcagatcagcagcgctgacaatgagatcagcgagatgaccactggacctcctcctcctcctccttctgtgagccccctggccccacccctgcggagatttgctgggggcctgcacctgcacaccacagacctggatgacatccccctggacatgttctactacccacccaagaccccatctgccctgcctgtgatgccccaccccccacccagcaaccccccccacaaggtgcctgcccctcctgtgctgcccctgagcggccacgtgtctgccagcagcagcccctgggtgcagaggaccccaccacccatccccatccccccaccacccagcgtgcccacccaggacctgacccccacccggcccctgcccagcgccctggaggaggccctgagcaaccaccccttcagaactggagacaccggcaaccctgtggaggactgggaggccaagaaccacagcggcaagcccaccaacagccctgtgcctgagcagagcttcccccccacccccaagaccttctgccccagcccccagcccccccggggccctggggtgtccaccatcagcaagcctgtgatggtgcaccaggagcccaacttcatctacagacctgctgtgaagtctgaggtgctgccccaggagatgctgaagaggatggtggtgtaccagacagccttccggcaggacttcagaaaatatgaggagggctttgacccctacagcatgttcaccccagagcagatcatgggcaaggatgtgcggctgctgcgcatcaagaaggagggcagcctggacctggccctggagggcggcgtggacagccccatcggcaaggtggtggtgtctgctgtgtatgaaagaggagctgctgagagacatggaggcatcgtgaagggagatgagatcatggccatcaacgggaagatcgtgacagactacaccctggccgaggccgaggccgccctgcagaaggcctggaaccagggcggggactggattgacctggtggtggccgtgtgcccccccaaggagtatgatgatgagctggccagcctgcccagctctgtggccgagagcccccagcctgtgaggaagctgctggaggacagagctgctgtgcaccgccacggcttcctgctgcagctggagcccacagacctgctgctgaagagcaagaggggcaaccagatccacaggtag

SEQ ID NO: 175610 - DNA, 1659 bp, synthetic construct
  misc_feature 1..1659: note = Description of Artificial Sequence: Synthetic coding sequence
  source 1..1659: mol_type = other DNA
atggacaggaaggtggcccgggagttccgccacaaggtggacttcctgattgaaaatgatgctgagaaggactacctgtatgatgtgctgaggatgtaccaccagaccatggatgtggccgtgctggtgggggacctgaagctggtgatcaatgagcccagccggctgcccctgtttgatgccatccggcccctcatccccctgaagcaccaggtggagtatgaccagctgaccccccggcgcagcaggaagctgaaggaggtgcggctggaccggctgcaccctgagggcctgggcctgtctgtgcggggcggcctggagtttggctgcggcctcttcatcagccacctgatcaagggcggccaggccgacagcgtgggcctgcaggtgggagatgagatcgtgcgcatcaatggctacagcatcagcagctgcacccatgaggaggtgatcaacctgatccgcaccaagaagacagtgtccatcaaggtgcgccacatcggcctcatccctgtgaagagcagcccagatgagcccctgacctggcagtatgtggaccagtttgtgtctgagagcggcggcgtgcggggcagcctgggcagccctggcaaccgggagaacaaggagaagaaggtgttcatcagcctggtgggcagccggggcctgggctgcagcatcagcagcggccccatccagaagccaggcatcttcatcagccacgtgaagccaggcagcctgtctgctgaggtgggcctggagatcggggaccagatcgtggaggtgaatggagtggacttcagcaacctggaccacaaggaggccgtgaatgtgctgaagagcagccgcagcctgaccatcagcatcgtggccgccgccggccgggagctgttcatgacagaccgggagcggctggccgaggcccggcagcgggagctgcagaggcaggagctgctgatgcagaagaggctggccatggagagcaacaagatcctgcaggagcagcaggagatggagcggcagaggaggaaggagatcgcccagaaggctgctgaggagaatgaaagatacaggaaggagatggagcagatcgtggaggaggaggagaagttcaagaagcagtgggaggaggactggggcagcaaggagcagctgctgctgcccaagaccatcacagctgaggtgcaccctgtgcccctgaggaagcccaagtatgaccagggcgtggagcctgagctggagccagcagatgacctggatggcggcacagaggagcagggcgagcaggacttcagaaaatatgaggagggctttgacccctacagcatgttcaccccagagcagatcatgggcaaggatgtgcggctgctgcgcatcaagaaggagggcagcctggacctggccctggagggcggcgtggacagccccatcggcaaggtggtggtgtctgctgtgtatgaaagaggagctgctgagagacatggaggcatcgtgaagggagatgagatcatggccatcaacgggaagatcgtgacagactacaccctggccgaggccgaggccgccctgcagaaggcctggaaccagggcggggactggattgacctggtggtggccgtgtgcccccccaaggagtatgatgatgagctgaccttcttctag

SEQ ID NO: 175611 - DNA, 1602 bp, synthetic construct
  misc_feature 1..1602: note = Description of Artificial Sequence: Synthetic coding sequence
  source 1..1602: mol_type = other DNA
atggacaggaaggtggcccgggagttccgccacaaggtggacttcctgattgaaaatgatgctgagaaggactacctgtatgatgtgctgaggatgtaccaccagaccatggatgtggccgtgctggtgggggacctgaagctggtgatcaatgagcccagccggctgcccctgtttgatgccatccggcccctcatccccctgaagcaccaggtggagtatgaccagctgaccccccggcgcagcaggaagctgaaggaggtgcggctggaccggctgcaccctgagggcctgggcctgtctgtgcggggcggcctggagtttggctgcggcctcttcatcagccacctgatcaagggcggccaggccgacagcgtgggcctgcaggtgggagatgagatcgtgcgcatcaatggctacagcatcagcagctgcacccatgaggaggtgatcaacctgatccgcaccaagaagacagtgtccatcaaggtgcgccacatcggcctcatccctgtgaagagcagcccagatgagcccctgacctggcagtatgtggaccagtttgtgtctgagagcggcggcgtgcggggcagcctgggcagccctggcaaccgggagaacaaggagaagaaggtgttcatcagcctggtgggcagccggggcctgggctgcagcatcagcagcggccccatccagaagccaggcatcttcatcagccacgtgaagccaggcagcctgtctgctgaggtgggcctggagatcggggaccagatcgtggaggtgaatggagtggacttcagcaacctggaccacaaggagggccgggagctgttcatgacagaccgggagcggctggccgaggcccggcagcgggagctgcagaggcaggagctgctgatgcagaagaggctggccatggagagcaacaagatcctgcaggagcagcaggagatggagcggcagaggaggaaggagatcgcccagaaggctgctgaagaaaatgaaagatacaggaaggagatggagcagatcgtggaggaggaggagaagttcaagaagcagtgggaggaggactggggcagcaaggagcagctgctgctgcccaagaccatcacagctgaggtgcaccctgtgcccctgaggaagcccaagtatgaccagggcgtggagcctgagctggagccagcagatgacctggatggcggcacagaggagcagggcgagcaggacttcagaaaatatgaggagggctttgacccctacagcatgttcaccccagagcagatcatgggcaaggatgtgcggctgctgcgcatcaagaaggagggcagcctggacctggccctggagggcggcgtggacagccccatcggcaaggtggtggtgtctgctgtgtatgaaagaggagctgctgagcggcacggcggcatcgtgaagggagatgagatcatggccatcaatggcaagatcgtgacagactacaccctggccgaggccgaggccgccctgcagaaggcctggaaccagggcggggactggattgacctggtggtggccgtgtgcccccccaaggagtatgatgatgagctgaccttcttctag

SEQ ID NO: 175612 - DNA, 1566 bp, synthetic construct
  misc_feature 1..1566: note = Description of Artificial Sequence: Synthetic coding sequence
  source 1..1566: mol_type = other DNA
atgtaccaccagaccatggatgtggccgtgctggtgggggacctgaagctggtgatcaatgagcccagccggctgcccctgtttgatgccatccggcccctcatccccctgaagcaccaggtggagtatgaccagctgaccccaagaagaagcaggaagctgaaggaggtgcggctggaccggctgcaccctgagggcctgggcctgtctgtgcggggcggcctggagtttggctgcggcctcttcatcagccacctgatcaagggcggccaggccgacagcgtgggcctgcaggtgggagatgaaattgtgcgcatcaatggctacagcatcagcagctgcacccatgaggaggtgatcaacctgatccgcaccaagaagacagtgtccatcaaggtgcgccacatcggcctcatccctgtgaagagcagcccagatgagcccctgacctggcagtatgtggaccagtttgtgtctgagagcggaggagtgcggggcagcctgggcagccctggcaaccgggagaacaaggagaagaaggtgttcatcagcctggtgggcagccggggcctgggctgcagcatcagcagcggccccatccagaagccaggcatcttcatcagccacgtgaagccaggcagcctgtctgctgaggtgggcctggagattggagaccagatcgtggaggtgaatggagtggacttcagcaacctggaccacaaggaggccgtgaatgtgctgaagagcagccgcagcctgaccatcagcatcgtggccgctgctggccgggagctgttcatgacagaccgggagcggctggccgaggcccggcagcgggagctgcagaggcaggagctgctgatgcagaagaggctggccatggagagcaacaagatcctgcaggagcagcaggagatggagcggcagaggaggaaggagatcgcccagaaggctgctgaagaaaatgaaagatacaggaaggagatggagcagatcgtggaggaggaggagaagttcaagaagcagtgggaggaggactggggcagcaaggagcagctgctgctgcccaagaccatcacagctgaggtgcaccctgtgcccctgaggaagcccaagtatgaccagggcgtggagcctgagctggagccagcagatgacctggatggcggcacagaggagcagggcgagcaggacttcagaaaatatgaggagggctttgacccctacagcatgttcaccccagagcagatcatgggcaaggatgtgcggctgctgcgcatcaagaaggagggcagcctggacctggccctggagggcggcgtggacagccccatcggcaaggtggtggtgtctgctgtgtatgaaagaggagctgctgagcggcacggcggcatcgtgaagggagatgagatcatggccatcaatggcaagatcgtgacagactacaccctggccgaggccgaggccgccctgcagaaggcctggaaccagggcggggactggattgacctggtggtggccgtgtgcccccccaaggagtatgatgatgagctgaccttcttctag

SEQ ID NO: 175613 - DNA, 2112 bp, synthetic construct
  misc_feature 1..2112: note = Description of Artificial Sequence: Synthetic coding sequence
  source 1..2112: mol_type = other DNA
atgtctgcccgggccacccggcccaggagcagaagaggaagacatgcccctcctggagagctggaccctgtggccgagagcagcgaggaggtggaggccgccagcggcagcagcaagcccagctttgcccctcctcctgtgagcagcggcctggagcagctgggccccatggaggaggtgtctggccagggcctgggcagcaggacagacaagaagatggatggcggcagcggccgggagctggccagcgcccctgaggtgccccacaagccagctgtggaggcccaccaggcccctgaggccgccctgcagtacaaggagaccgtgcccccaggaaatggagccccagatgtgttccagaccctgcagcacaccctgagcagcctggaggccgctgctgctgcctggaggcaccagccccccagccacagcggccccatggagtttgagggcaccagcgagggcggggccggcagcctgggcaagcaggagggcgccggcagctgccagcgggaggccgcccggctggccgagagaaatgcctggctgcggctggccctgagcagcagagaagatgagctggtgaggacccaggccagcctggaggccatccgggcagagaaggagaccctgcagaaggaggtgcaggagctgcaggacagcctgctgcggctggagccctgcccccacctgagccacaaccaggccggcggcagcggcagcggcagcagcagcagcgaggccgaccgggagccctgggagacccaggacagcttcagcctggcccaccccctgctgcggcggctgcggagccacagcagcacccagatcctgggcagcctgcccaaccagcccctgagccctgagatgcacatcatggaggcccagatggagcagctgcggggcagcattgagaagctgaagtgcttcaaccggctgctgtctgctgtgctgcagggctacaagggccgctgtgagggcctgtccatgcagctgggccagcgggaggccgaggccacagccctgcacctggccctgcagtacagcgagcactgtgaggaggcctacagagtgctgctggccctgcgggaggccgacagcggggctggagatgaggcccccatgtctgacctgcaggccgctgagaaggaggcctggaggctgctggcccaggaggaggccgccatggatgctggggcccagcagaacccccagcccagccctgagggcagctctgtggacaagcccaccccccaggaggtggccttccagctgcggagctatgtgcagaggctgcaggagaggaggagcctgatgaagatcctgtctgagcccggccccaccctggcccccatgcccaccgtgcccagggctgaggccatggtgcaggccatcctgggcacccaggccggccctgccctgccccggctggagaagacccagatccagcaggacctggtggccgcccgggaggccctggccgacctgatgctgcggctgcagctggtgcggcgggagaagaggggcctggagctgcgggaggccgccctgcgggccctgggccctgcccacgtgctgctgctggagcagctgcgctgggagcgggcagagctgcaggccggcggggccaacagcagcggcggccacagcagcggcggcggcagcagtggagatgaggaggagtggtaccagggcctgcctgctgtgcctgggggcaccagcggcattgatggcggccaggtgggccgggcctgggaccctgagaagctggcccaggagctggccgccagcctgaccaggaccctggacctgcaggagcagctgcagagcctgcggcgggagctggagcaggtggcccagaagggccgggcccggcgcagccagagcgctgagctgaacagagacctgtgcaaggcccacagcgccctggtgctggccttccggggggcccacaggaagcaggaggagcagaggaggaagctggagcagcagatggccctgatggaggcccagcaggccgaggaggtggccgtgctggaggccacagcccgggccctgggcaagcccaggcctcccctgcccccaccccagctgggggacaccttcctgtag

SEQ ID NO: 175614 - DNA, 1152 bp, synthetic construct
  misc_feature 1..1152: note = Description of Artificial Sequence: Synthetic coding sequence
  source 1..1152: mol_type = other DNA
atgtctgcccgggccacccggcccaggagcagaagaggaagacatgcccctcctggagagctggaccctgtggccgagagcagcgaggaggtggaggccgccagcggcagcagcaagcccagctttgcccctcctcctgtgagcagcggcctggagcagctgggccccatggaggaggtgtctggccagggcctgggcagcaggacagacaagaagatggatggcggcagcggccgggagctggccagcgcccctgaggtgccccacaagccagctgtggaggcccaccaggcccctgaggccgccctgcagtacaaggagaccgtgcccccaggaaatggagccccagatgtgttccagaccctgcagcacaccctgagcagcctggaggccgctgctgctgcctggaggcaccagccccccagccacagcggccccatggagtttgagggcaccagcgagggcggggccggcagcctgggcaagcaggagggcgccggcagctgccagcgggaggccgcccggctggccgagagaaatgcctggctgcggctggccctgagcagcagagaagatgagctggtgaggacccaggccagcctggaggccatccgggcagagaaggagaccctgcagaaggaggtgcaggagctgcaggacagcctgctgcggctggagccctgcccccacctgagccacaaccaggccggcggcagcggcagcggcagcagcagcagcgaggccgaccgggagccctgggagacccaggacagcttcagcctggcccaccccctgctgcggcggctgcggagccacagcagcacccagatcctgggcagcctgcccaaccagcccctgagccctgagatgcacatcatggaggcccagatggagcagctgcggggcagcattgagaagctgaagtgcttcaaccggctgctgtctgctgtgctgcagggctacaagggccgctgtgagggcctgtccatgcagctgggccagcgggaggccgaggccacagccctgcacctggccctgcagtacagagtgctgctgtgccaccctggctggagcgctgtggtgcccagctggctgacagccaccagcgccagccctgtgcaggtgatcctgctgccccagcccccagagtag

SEQ ID NO: 175615 - DNA, 1920 bp, synthetic construct
  misc_feature 1..1920: note = Description of Artificial Sequence: Synthetic coding sequence
  source 1..1920: mol_type = other DNA
atgctgcaccccacagacaagaagatggatggcggcagcggccgggagctggccagcgcccctgaggtgccccacaagccagctgtggaggcccaccaggcccctgaggccgccctgcagtacaaggagaccgtgcccccaggaaatggagccccagatgtgttccagaccctgcagcacaccctgagcagcctggaggccgctgctgctgcctggaggcaccagccccccagccacagcggccccatggagtttgagggcaccagcgagggcggggccggcagcctgggcaagcaggagggcgccggcagctgccagcgggaggccgcccggctggccgagagaaatgcctggctgcggctggccctgagcagcagagaagatgagctggtgaggacccaggccagcctggaggccatccgggcagagaaggagaccctgcagaaggaggtgcaggagctgcaggacagcctgctgcggctggagccctgcccccacctgagccacaaccaggccggcggcagcggcagcggcagcagcagcagcgaggccgaccgggagccctgggagacccaggacagcttcagcctggcccaccccctgctgcggcggctgcggagccacagcagcacccagatcctgggcagcctgcccaaccagcccctgagccctgagatgcacatcatggaggcccagatggagcagctgcggggcagcattgagaagctgaagtgcttcaaccggctgctgtctgctgtgctgcagggctacaagggccgctgtgagggcctgtccatgcagctgggccagcgggaggccgaggccacagccctgcacctggccctgcagtacagcgagcactgtgaggaggcctacagagtgctgctggccctgcgggaggccgacagcggggctggagatgaggcccccatgtctgacctgcaggccgctgagaaggaggcctggaggctgctggcccaggaggaggccgccatggatgctggggcccagcagaacccccagcccagccctgagggcagctctgtggacaagcccaccccccaggaggtggccttccagctgcggagctatgtgcagaggctgcaggagaggaggagcctgatgaagatcctgtctgagcccggccccaccctggcccccatgcccaccgtgcccagggctgaggccatggtgcaggccatcctgggcacccaggccggccctgccctgccccggctggagaagacccagatccagcaggacctggtggccgcccgggaggccctggccgacctgatgctgcggctgcagctggtgcggcgggagaagaggggcctggagctgcgggaggccgccctgcgggccctgggccctgcccacgtgctgctgctggagcagctgcgctgggagcgggcagagctgcaggccggcggggccaacagcagcggcggccacagcagcggcggcggcagcagtggagatgaggaggagtggtaccagggcctgcctgctgtgcctgggggcaccagcggcattgatggcggccaggtgggccgggcctgggaccctgagaagctggcccaggagctggccgccagcctgaccaggaccctggacctgcaggagcagctgcagagcctgcggcgggagctggagcaggtggcccagaagggccgggcccggcgcagccagagcgctgagctgaacagagacctgtgcaaggcccacagcgccctggtgctggccttccggggggcccacaggaagcaggaggagcagaggaggaagctggagcagcagatggccctgatggaggcccagcaggccgaggaggtggccgtgctggaggccacagcccgggccctgggcaagcccaggcctcccctgcccccaccccagctgggggacaccttcctgtag

SEQ ID NO: 175616 - DNA, 1386 bp, synthetic construct
  misc_feature 1..1386: note = Description of Artificial Sequence: Synthetic coding sequence
  source 1..1386: mol_type = other DNA
atgaatgaccagtaccaccgggccgccagagatggctacctggagctgctgaaggaggccaccaggaaggagctgaatgccccagatgaagatggcatgacccccaccctgtgggccgcctaccacggcaacctggagagcctgcggctgattgtgtccagaggaggagaccctgacaagtgtgacatctggggcaacacccccctgcacctggccgccagcaatggccacctgcactgcctgtccttcctggtgtcctttggagccaacatctggtgcctggacaatgactaccacacccccctggacatggccgccatgaagggccacatggagtgtgtgcgctacctggacagcattgctgccaagcagagcagcctgaaccccaagctggtgggcaagctgaaggacaaggccttccgggaggccgagcggcgcatcagagaatgtgccaagctgcagaggaggcaccacgagaggatggagcggcgctaccgccgggagctggccgagaggagtgacaccctgtccttcagcagcctgaccagcagcaccctgagccggcggctgcagcacctggccctgggcagccacctgccctacagccaggccaccctgcatggaacagcccggggcaagaccaagatgcagaagaagctggagaggaggaagcagggcggggagggcaccttcaaggtgtctgaagatggcaggaagagcgcccggagcctgagcggcctgcagctgggcagtgatgtgatgtttgtgcggcagggcacctacgccaaccccaaggagtggggccgggcccccctgcgggacatgttcctgagtgatgaggacagcgtgtcccgggccaccctggccgctgagcccgcccacagcgaggtgtccacagattctggccatgacagcctcttcacccggcccggcctgggcaccatggtgttcagaagaaactacctgagcagcggcctgcacggcctgggccgggaggatggcggcctggatggagtgggcgccccccggggccgcctgcagagcagccccagcctggatgatgacagcctgggcagcgccaacagcctgcaggacaggagctgtggggaggagctgccctgggatgagctggacctgggcctggatgaggacctggagcctgagaccagccccctggagaccttcctggccagcctgcacatggaggactttgctgccctgctgcggcaggagaagattgacctggaggccctgatgctgtgcagcgacctggacctgcggagcatctctgtgcccctgggccccaggaagaagatcctgggcgctgtgagaagaagacggcaggccatggagcggcccccagccctggaggacacagagctgtag

SEQ ID NO: 175617 - DNA, 15609 bp, synthetic construct
  misc_feature 1..15609: note = Description of Artificial Sequence: Synthetic coding sequence
  source 1..15609: mol_type = other DNA
atgaactgccctgtgctgagcctgggcagcggcttcctgttccaggtgattgagatgctgatctttgcctactttgccagcatcagcctgacagagagccggggcctcttcccccggctggagaatgtgggcgccttcaagaaggtgtccatcgtgcccacccaggccgtgtgtggcctgcctgacaggagcaccttctgccacagcagcgctgctgctgagagcatccagttctgcacccagcgcttctgcatccaggactgcccctaccgcagcagccaccccacctacacagccctcttctctgctggcctgagcagctgcatcaccccagacaagaatgacctgcaccccaatgcccacagcaacagcgccagcttcatctttggaaaccacaagagctgcttcagcagcccccccagccccaagctgatggccagcttcaccctggccgtgtggctgaagccagagcagcagggcgtgatgtgtgtgattgagaagacagtggatggccagatcgtgttcaagctgaccatcagcgagaaggagaccatgttctactacagaacagtgaatggcctgcagccccccatcaaggtgatgaccctgggccgcatcctggtgaagaagtggatccacctgtctgtgcaggtgcaccagaccaagatctccttcttcatcaacggggtggagaaggaccacacccccttcaatgcccggaccctgagcggcagcatcacagactttgccagcggcaccgtgcagatcggccagagcctgaatggcctggagcagtttgtgggccgcatgcaggacttccggctgtaccaggtggccctgaccaaccgggagatcctggaggtgttcagcggggacctgctgcggctgcacgcccagagccactgccgctgccccggcagccacccccgggtgcaccccctggcccagcgctactgcatccccaatgatgctggggacacagctgacaacagagtgtcccggctgaaccctgaggcccaccccctgagctttgtgaatgacaatgatgtgggcacctcctgggtgtccaatgtgttcaccaacatcacccagctgaaccagggcgtgaccatctctgtggacctggagaatggccagtaccaggtgttctacatcatcatccagttcttcagcccccagcccacagagatccgcatccagaggaagaaggagaacagcctggactgggaggactggcagtactttgccaggaactgtggggccttcggcatgaagaacaatggagacctggagaagccagattctgtgaactgcctgcagctgagcaacttcaccccctacagcagaggaaatgtgaccttcagcatcctgaccccaggccccaactacagacctggctacaacaacttctacaacacccccagcctgcaggagtttgtgaaggccacccagatccgcttccacttccacggccagtactacaccacagaaacagctgtgaacctgcggcaccgctactatgctgtggatgagatcaccatcagcggccgctgccagtgccacggccacgccgacaactgtgacaccaccagccagccctaccgctgcctgtgcagccaggagagcttcacagagggcctgcactgtgaccgctgcctgcccctgtacaatgacaagcccttccggcagggcgaccaggtgtatgccttcaactgcaagccctgccagtgcaacagccacagcaagagctgccactacaacatctctgtggaccccttcccctttgagcacttccggggcggcggcggcgtgtgtgatgactgtgagcacaacaccactggaagaaactgtgagctgtgcaaggactacttcttccggcaggtgggcgctgaccccagcgccattgatgtgtgcaagccctgtgactgtgacacagtgggcaccagaaatggcagcatcctgtgtgaccagatcggcggccagtgcaactgcaagagacatgtgtctggccggcagtgcaaccagtgccagaatggcttctacaacctgcaggagctggaccctgatggctgcagcccctgcaactgcaacaccagcggcaccgtggatggagacatcacctgccaccagaacagcggccagtgcaagtgcaaggccaacgtcatcggcctgcgctgtgaccactgcaactttggcttcaagttcctgcggagcttcaatgatgtgggctgtgagccctgccagtgcaacctgcacggctctgtgaacaagttctgcaacccccacagcggccagtgtgagtgcaagaaggaggccaagggcctgcagtgtgacacctgccgggagaacttctacggcctggatgtgaccaactgcaaggcctgtgactgtgacacagctggcagcctgcccggcaccgtgtgcaatgccaagacaggccagtgcatctgcaagcccaacgtggagggccggcagtgcaacaagtgcctggagggcaacttctacctgcggcagaacaacagcttcctgtgcctgccctgcaactgtgacaagacaggcaccatcaatggcagcctgctgtgcaacaagagcacaggccagtgcccctgcaagctgggcgtgacaggcctgcgctgcaaccagtgtgagccccaccgctacaacctgaccatcgacaacttccagcactgccagatgtgtgaatgtgacagcctgggcaccctgcccggcaccatctgtgaccccatcagcggccagtgcctgtgtgtgcccaaccggcagggccgccgctgcaaccagtgccagcccggcttctacatcagccctggaaatgccaccggctgcctgccctgcagctgccacaccaccggggctgtgaaccacatctgcaacagcctgaccggccagtgtgtgtgccaggatgccagcattgctggccagagatgtgaccagtgcaaggaccactacttcggctttgacccccagacaggccgctgccagccctgcaactgccacctgagcggggccctgaatgagacctgccacctggtgacaggccagtgcttctgcaagcagtttgtgacaggcagcaaatgtgatgcctgtgtgcccagcgccagccacctggatgtgaacaacctgctgggctgcagcaagacccccttccagcagcccccaccccggggccaggtgcagagcagcagcgccatcaacctgtcctggagccccccagacagccccaatgcccactggctgacctacagcctgctgagagatggctttgagatctacaccacagaggaccagtacccctacagcatccagtacttcctggacacagacctgctgccctacaccaagtacagctactacatcgagaccaccaacgtgcacggcagcaccaggtctgtggccgtgacctacaagaccaagccaggagtgcctgagggcaacctgaccctgagctacatcatccccatcggcagtgacagcgtgaccctgacctggaccaccctgagcaaccagagcggccccatcgagaagtacatcctgagctgtgcccccctggccggcggccagccctgtgtgtcctatgagggccacgagaccagcgccaccatctggaacctggtgccctttgccaagtatgacttctctgtgcaggcctgcaccagcggcggctgcctgcacagcctgcccatcaccgtgaccacagcccaggccccaccccagaggctgagcccccccaagatgcagaagatcagcagcacagagctgcacgtggagtggagccccccagctgagctgaatggcatcatcatccgctatgagctgtacatgaggcggctgcggagcaccaaggagaccaccagcgaggagagcagggtcttccagagcagcggctggctgagcccccacagctttgtggagagcgccaatgaaaatgccctgaagccaccccagaccatgaccaccatcaccggcctggagccctacaccaagtatgagttccgggtgctggccgtgaacatggccggctctgtgagcagcgcctgggtgtctgagaggactggagagagcgcccctgtgttcatgatccccccatctgtgttccccctgagcagctacagcctgaacatctcctgggagaagccagctgacaacgtgacccggggcaaggtggtgggctatgacatcaacatgctgtctgagcagagcccccagcagagcatccccatggccttcagccagctgctgcacacagccaagagccaggagctgagctacacagtggagggcctgaagccctaccgcatctatgagttcaccatcaccctgtgcaacagcgtgggctgtgtgaccagcgccagcggggccggccagaccctggccgccgccccagcccagctgcggccccccctggtgaagggcatcaacagcaccaccatccacctgcgctggttccccccagaggagctgaatggccccagccccatctaccagctggagcggcgggagagcagcctgcctgccctgatgaccaccatgatgaagggcatccgcttcatcggaaatggctactgcaagttccccagcagcacccaccctgtgaacacagacttcaccggcatcaaggccagcttccgcaccaaggtgcctgagggcctgattgtgtttgctgccagccctggcaaccaggaggagtactttgccctgcagctgaagaagggccgcctgtacttcctgtttgacccccagggcagccctgtggaggtgaccaccaccaatgaccacggcaagcagtacagtgatggcaagtggcatgagatcatcgccatccgccaccaggccttcggccagatcaccctggatggcatctacacaggcagcagcgccatcctgaatggcagcaccgtcatcggggacaacacaggagtcttcctgggcggcctgcccaggagctacaccatcctgaggaaggaccctgagatcatccagaagggctttgtgggctgcctgaaggatgtgcacttcatgaagaactacaaccccagcgccatctgggagcccctggactggcagagcagcgaggagcagatcaacgtgtacaacagctgggagggctgcccagccagcctgaatgaaggagcccagttcctgggcgccggcttcctggagctgcacccctacatgtttcatggaggcatgaactttgagatctccttcaagttcagaacagaccagctgaatggcctgctgctgtttgtgtacaacaaggatggccctgacttcctggccatggagctgaagagcggcatcctgaccttccggctgaacaccagcctggccttcacccaggtggacctgctgctgggcctgagctactgcaatggcaagtggaacaaggtgatcatcaagaaggagggcagcttcatcagcgcctctgtgaatggcctgatgaagcacgccagcgagagcggggaccagcccctggtggtgaacagccctgtgtatgtgggcggcatcccccaggagctgctgaacagctaccagcacctgtgcctggagcagggctttggaggctgcatgaaggatgtgaagttcaccagaggagctgtggtgaacctggcctctgtgtcctctggagctgtgcgggtgaacctggatggctgcctgagcacagacagcgctgtgaactgcagaggaaatgacagcatcctggtgtaccagggcaaggagcagagcgtgtatgaaggaggcctgcagcccttcacagagtacctgtacagagtcatcgccagccatgaaggaggctctgtgtacagcgactggagccggggccgcaccaccggggccgccccccagagcgtgcccacccccagccgggtgcgcagcctgaatggctacagcattgaggtgacctgggatgagcctgtggtgcggggcgtcatcgagaagtacatcctgaaggcctacagcgaggacagcaccaggcctcccaggatgcccagcgccagcgctgagtttgtgaacaccagcaacctgaccggcatcctgaccggcctgctgcccttcaagaactatgctgtgaccctgacagcctgcaccctggccggctgcacagagagcagccacgccctgaacatcagcaccccccaggaggccccccaggaggtgcagccccctgtggccaagagcctgcccagcagcctgctgctgtcctggaacccccccaagaaggccaacggcatcatcacccagtactgcctgtacatggatggccgcctcatctacagcggcagcgaggagaactacatcgtgacagacctggccgtgttcaccccccaccagttcctgctgagcgcctgcacccacgtgggctgcaccaacagctcctgggtgctgctgtacacagcccagctgcccccagagcacgtggacagccctgtgctgactgtgctggacagcaggaccatccacatccagtggaagcagcccaggaagatcagcggcatcctggagcgctacgtgctgtacatgagcaaccacacccatgacttcaccatctggagcgtcatctacaacagcacagagctgttccaggaccacatgctgcagtatgtgctgcccggcaacaagtacctgatcaagctgggcgcctgcaccggcggcggctgcaccgtgtctgaggccagcgaggccctgacagatgaggacatccctgagggcgtgcctgcccccaaggcccacagctacagcccagacagcttcaacgtgtcctggacagagcctgagtaccccaacggggtcatcaccagctatggcctgtacctggatggcatcctgatccacaacagcagcgagctgagctaccgggcctacggctttgccccctggagcctgcacagcttccgggtgcaggcctgcacagccaagggctgtgccctgggccccctggtggagaacagaaccctggaggcccctcctgagggcaccgtgaatgtgtttgtgaagacccagggcagcaggaaggcccacgtgcgctgggaggcccccttccggcccaacggcctgctgacccacagcgtgctcttcaccggcatcttctacgtggaccctgtgggcaacaactacaccctgctgaatgtgaccaaggtgatgtacagcggggaggagaccaacctgtgggtgctgattgatggcctggtgcccttcaccaactacacagtgcaggtgaacatcagcaacagccagggcagcctcatcacagaccccatcaccatcgccatgcctcctggggccccagatggagtgctgcccccccggctgagcagcgccacccccaccagcctgcaggtggtgtggagcaccccagccaggaacaatgcccctggcagcccccgctaccagctgcagatgaggtctggggacagcacccacggcttcctggagctgttcagcaaccccagcgccagcctgtcctatgaggtgtctgacctgcagccctacacagagtacatgttccggctggtggccagcaatggcttcggcagcgcccacagctcctggatccccttcatgacagctgaggacaagccaggccctgtggtgccccccatcctgctggatgtgaagagcaggatgatgctggtgacctggcagcaccccaggaagagcaatggagtcatcacccactacaacatctacctgcacggccgcctgtacctgcggaccccaggaaatgtgaccaactgcaccgtgatgcacctgcacccctacacagcctacaagttccaggtggaggcctgcaccagcaagggctgcagcctgagccctgagagccagacagtgtggaccctgcccggggcccctgagggcatccccagccctgagctgttcagtgacacccccaccagcgtcatcatctcctggcagccccccacccaccccaacggcctggtggagaacttcaccattgaaagaagagtgaagggcaaggaggaggtgaccaccctggtgaccctgcccaggagccacagcatgaggttcatcgacaagaccagcgccctgagcccctggaccaagtatgagtacagagtgctgatgagcaccctgcacggcggcaccaacagcagcgcctgggtggaggtgaccacccggcccagcaggcctgctggggtgcagccccctgtggtgacagtgctggagccagatgctgtgcaggtgacctggaagccacccctcatccagaatggagacatcctgtcctatgagatccacatgccagacccccacatcaccctgaccaacgtgaccagcgctgtgctgagccagaaggtgacccacctgatccccttcaccaactacagcgtgaccatcgtggcctgcagcggcggcaatggctacctgggcggctgcacagagagcctgcccacctacgtgaccacccaccccaccgtgccccagaatgtgggccccctgagcgtcatccccctgtctgagagctatgtggtgatctcctggcagccccccagcaagcccaacggccccaacctgcgctatgagctgctgcggaggaagatccagcagcccctggccagcaaccccccagaggacctgaaccgctggcacaacatctacagcggcacccagtggctgtatgaggacaagggcctgagccgcttcaccacctatgagtacatgctgtttgtgcacaacagcgtgggcttcacccccagccgggaggtgacagtgaccaccctggccggcctgcctgagcggggggccaacctgacagcctctgtgctgaaccacacagccattgatgtgcgctgggccaagcccaccgtgcaggacctgcagggcgaggtggagtactacaccctcttctggagcagcgccaccagcaatgacagcctgaagatcctgcctgatgtgaacagccacgtgattggccacctgaagcccaacacagagtactggatcttcatcagcgtcttcaatggagtgcacagcatcaacagcgctggcctgcacgccaccacctgtgatggagagccccagggcatgctgcccccagaggtggtgatcatcaacagcacagctgtgcgggtcatctggaccagccccagcaaccccaatggagtggtgacagagtacagcatctacgtgaacaacaagctgtacaagacaggcatgaatgtgcccggcagcttcatcctgcgggacctgagccccttcaccatctatgacatccaggtggaggtgtgcaccatctatgcctgtgtgaagagcaatggcacccagatcaccaccgtggaggacacccccagcgacatccccacccccaccatccggggcatcaccagccgcagcctgcagattgactgggtgagccccaggaagcccaacggcatcatcctgggctatgacctgctgtggaagacctggtacccctgtgccaagacccagaagctggtgcaggaccagagtgatgagctgtgcaaggctgtgcgctgccagaagccagagagcatctgtggccacatctgctacagcagcgaggccaaggtgtgctgcaatggagtgctgtacaaccccaagccaggccaccgctgctgtgaggagaagtacatcccctttgtgctgaacagcactggagtgtgctgcggcggccgcatccaggaggcccagcccaaccaccagtgctgcagcggctactatgcccgcatcctgcccggggaggtgtgctgcccagatgagcagcacaacagagtgtctgtgggcattggagacagctgctgcggccgcatgccctacagcaccagcggcaaccagatctgctgtgccggccgcctgcatgatggccacggccagaagtgctgcggccggcagatcgtgtccaatgacctggagtgctgcggcggggaggagggcgtggtgtacaaccggctgcccggcatgttctgctgcggccaggactatgtgaacatgtctgacaccatctgctgcagcgccagcagtggagagagcaaggcccacatcaagaagaatgaccctgtgcctgtgaagtgctgtgaaacagagctgatccccaagagccagaagtgctgcaatggagtgggctacaaccccctgaagtatgtgtgcagcgacaagatcagcacaggcatgatgatgaaggagaccaaggagtgccgcatcctgtgcccagcctccatggaggccacagagcactgcggccgctgtgacttcaacttcaccagccacatctgcaccgtcatccggggcagccacaacagcacaggcaaggccagcattgaggagatgtgcagcagcgctgaggagaccatccacactggatctgtgaacacctacagctacacagatgtgaacctgaagccctacatgacctatgagtaccgcatcagcgcctggaacagctatggccggggcctgagcaaggctgtgcgggcccggaccaaggaggatgtgccccagggcgtgagcccccccacctggaccaagattgacaacctggaggacaccatcgtgctgaactggaggaagcccatccagagcaatggccccatcatctactacatcctgctgagaaatggaattgagcgcttccggggcaccagcctgtccttcagtgacaaggagggcatccagcccttccaggagtacagctaccagctgaaggcctgcaccgtggccggctgtgccaccagcagcaaggtggtggccgccaccacccagggcgtgcctgagagcatcctgcccccatccatcacagccctgtctgctgtggccctgcacctgtcctggagcgtgcctgagaagagcaatggagtcatcaaggagtaccagatccggcaggtgggcaagggcctcatccacacagacaccacagaccggcggcagcacacagtgacaggcctgcagccctacaccaactacagcttcaccctgacagcctgcaccagcgctggctgcaccagcagcgagcccttcctgggccagaccctgcaggccgcccctgagggcgtgtgggtgacccccaggcacatcatcatcaacagcaccaccgtggagctgtactggagcctgcctgagaagcccaacggcctggtgtcccagtaccagctgagcagaaatggaaacctgctcttcctgggcggcagcgaggagcagaacttcacagacaagaacctggagcccaacagccgctacacctacaagctggaggtgaagacaggaggcggcagcagcgccagtgatgactacatcgtgcagacccccatgagcaccccagaggagatctacccaccctacaacatcaccgtcatcggcccctacagcatctttgtggcctggatccccccaggcatcctgatccctgagatccctgtggagtacaacgtgctgctgaatgatggctctgtgacccccctggccttctctgtgggccaccaccagagcaccctgctggagaacctgacccccttcacccagtatgagatccgcatccaggcctgccagaatggcagctgtggggtgagcagcaggatgtttgtgaagaccccagaggccgcccccatggacctgaacagccctgtgctgaaggccctgggcagcgcctgcatcgagatcaagtggatgcctcctgagaagcccaacggcatcatcatcaactacttcatctacagaagacctgctggcatcgaggaggagagcgtgctgtttgtgtggagcgagggcgccctggagttcatggatgaaggagacaccctgcggcccttcaccctgtatgagtacagagtgcgggcctgcaacagcaagggctctgtggagagcctgtggagcctgacccagaccctggaggccccaccccaggacttccctgccccctgggcccaggccaccagcgcccacagcgtgctgctgaactggaccaagccagagagccccaacggcatcatcagccactacagagtggtgtaccaggagaggccagatgaccccaccttcaacagccccaccgtgcacgccttcaccgtgaagggcaccagccaccaggcccacctgtatggcctggagcccttcaccacctacagaattggagtggtggccgccaaccacgccggggagatcctgagcccctggaccctcatccagaccctggagagcagccccagcggcctgaggaacttcatcgtggagcagaaggaaaatggccgggccctgctgctgcagtggagcgagcccatgaggaccaacggggtcatcaagacctacaacatcttcagtgatggcttcctggagtacagcggcctgaaccggcagttcctgttccggcggctggaccccttcaccctgtacaccctgaccctggaggcctgcacccgggccggctgtgcccacagcgccccccagcccctgtggacagatgaggcccccccagacagccagctggcccccaccgtgcacagcgtgaagagcacctctgtggagctgtcctggagcgagcctgtgaaccccaacgggaagatcatccgctatgaggtgatccgccgctgctttgagggcaaggcctggggcaaccagaccatccaggctgatgagaagatcgtgttcacagagtacaacacagagaggaacaccttcatgtacaatgacaccggcctgcagccctggacccagtgtgagtacaagatctacacctggaacagcgctggccacacctgcagctcctggaatgtggtgaggaccctgcaggcccctcctgagggcctgagcccccctgtgatctcctatgtgtccatgaacccccagaagctgctgatctcctggatccccccagagcagagcaatggcatcatccagagctaccgcctgcagagaaatgagatgctgtaccccttctcctttgatcctgtgaccttcaactacacagatgaggagctgctgcccttcagcacctacagctatgccctgcaggcctgcaccagcggcggctgcagcaccagcaagcccaccagcatcaccaccctggaggccgcccccagcgaggtgtccccaccagacctgtgggccgtgtctgccacccagatgaatgtgtgctggagcccccccaccgtgcagaatggcaagatcaccaagtacctggtgcgctatgacaacaaggagagcctggccggccagggcctgtgcctgctggtgagccacctgcagccctacagccagtacaacttcagcctggtggcctgcaccaacggcggctgcacagcctctgtgtccaagagcgcctggaccatggaggccctgcctgagaacatggacagccccaccctgcaggtgactggaagtgagagcattgagatcacctggaagccacccaggaaccccaacggccagatccgctcctatgagctgcggagagatggcaccatcgtgtacacaggcctggagacccgctacagagacttcaccctgaccccaggagtggagtacagctacacagtgacagccagcaacagccagggcggcatcctgagccccctggtgaaggacaggaccagccccagcgcccccagcggcatggagccccccaagctgcaggcccggggcccccaggagatcctggtgaactgggacccccctgtgaggaccaatggagacatcatcaactacaccctcttcatccgggagctgtttgagcgggagaccaagatcatccacatcaacaccacccacaacagctttggcatgcagagctacatcgtgaaccagctgaagcccttccacagatatgagatccgcatccaggcctgcaccaccctgggctgtgccagcagtgactggaccttcatccagaccccagagatcgcccccctgatgcagcccccaccccacctggaggtgcagatggcccctgggggcttccagcccaccgtgtccctgctgtggacaggccccctgcagcccaacgggaaggtgctgtactatgagctgtaccgccggcagatcgccacccagcccaggaagagcaaccctgtgctgatctacaacggcagcagcaccagcttcatcgacagcgagctgctgcccttcacagaatatgagtaccaggtgtgggccgtgaacagcgctgggaaggcccccagctcctggacctggtgcaggacaggccctgcccctcctgagggcctgcgggcccccaccttccacgtgatcagcagcacccaggccgtggtgaacatcagcgcccctgggaagcccaacggcatcgtgtccctgtaccgcctcttcagcagcagcgcccacggggctgagaccgtgctgtctgagggcatggccacccagcagaccctgcacggcctgcaggccttcaccaactacagcattggagtggaggcctgcacctgcttcaactgctgcagcaagggccccacagctgagctgcggacccacccagccccacccagcggcctgagcagcccccagatcggcaccctggccagcaggacagccagcttccgctggagcccccccatgttccccaacggggtcatccacagctatgagctgcagttccacgtggcctgccccccagacagcgccctgccctgcacccccagccagatcgagaccaagtacacaggcctgggccagaaggccagcctgggcggcctgcagccctacaccacctacaagctgcgggtggtggcccacaatgaggtgggcagcacagccagcgagtggatctccttcaccacccagaaggagctgccccagtaccgggcccccttctctgtggacagcaacctgtctgtggtgtgtgtgaactggagcgacaccttcctgctgaatggccagctgaaggagtatgtgctgacagatggcggcagaagagtgtacagcggcctggacaccaccctgtacatccccaggacagctgacaagaccttcttcttccaggtgatctgcaccacagatgagggctctgtgaagacccccctcatccagtatgacaccagcacaggcctgggcctggtgctgaccacccctgggaagaagaagggcagccgcagcaagagcacagagttctacagcgagctgtggttcatcgtgctgatggccatgctgggcctcatcctgctggccatcttcctgagcctcatcctgcagaggaagatccacaaggagccctacatccgggagaggcctcccctggtgcccctgcagaagaggatgagccccctgaatgtgtacccacctggagagaaccacatgggcctggccgacaccaagatccccaggagcggcacccctgtgtccatccgcagcaacagaagtgcctgtgtgctgcgcatccccagccagaaccagaccagcctgacctacagccagggcagcctgcacaggtctgtgtcccagctgatggacatccaggacaagaaggtgctgatggacaacagcctgtgggaggccatcatgggccacaacagcggcctgtatgtggatgaggaggacctgatgaatgccatcaaggacttcagctctgtgaccaaggagaggaccaccttcacagacacccacctgtag

SEQ ID NO: 175618 - DNA, 4641 bp, synthetic construct
  misc_feature 1..4641: note = Description of Artificial Sequence: Synthetic coding sequence
  source 1..4641: mol_type = other DNA
atgaactgccctgtgctgagcctgggcagcggcttcctgttccaggtgattgagatgctgatctttgcctactttgccagcatcagcctgacagagagccggggcctcttcccccggctggagaatgtgggcgccttcaagaaggtgtccatcgtgcccacccaggccgtgtgtggcctgcctgacaggagcaccttctgccacagcagcgctgctgctgagagcatccagttctgcacccagcgcttctgcatccaggactgcccctaccgcagcagccaccccacctacacagccctcttctctgctggcctgagcagctgcatcaccccagacaagaatgacctgcaccccaatgcccacagcaacagcgccagcttcatctttggaaaccacaagagctgcttcagcagcccccccagccccaagctgatggccagcttcaccctggccgtgtggctgaagccagagcagcagggcgtgatgtgtgtgattgagaagacagtggatggccagatcgtgttcaagctgaccatcagcgagaaggagaccatgttctactacagaacagtgaatggcctgcagccccccatcaaggtgatgaccctgggccgcatcctggtgaagaagtggatccacctgtctgtgcaggtgcaccagaccaagatctccttcttcatcaacggggtggagaaggaccacacccccttcaatgcccggaccctgagcggcagcatcacagactttgccagcggcaccgtgcagatcggccagagcctgaatggcctggagcagtttgtgggccgcatgcaggacttccggctgtaccaggtggccctgaccaaccgggagatcctggaggtgttcagcggggacctgctgcggctgcacgcccagagccactgccgctgccccggcagccacccccgggtgcaccccctggcccagcgctactgcatccccaatgatgctggggacacagctgacaacagagtgtcccggctgaaccctgaggcccaccccctgagctttgtgaatgacaatgatgtgggcacctcctgggtgtccaatgtgttcaccaacatcacccagctgaaccagggcgtgaccatctctgtggacctggagaatggccagtaccaggtgttctacatcatcatccagttcttcagcccccagcccacagagatccgcatccagaggaagaaggagaacagcctggactgggaggactggcagtactttgccaggaactgtggggccttcggcatgaagaacaatggagacctggagaagccagattctgtgaactgcctgcagctgagcaacttcaccccctacagcagaggaaatgtgaccttcagcatcctgaccccaggccccaactacagacctggctacaacaacttctacaacacccccagcctgcaggagtttgtgaaggccacccagatccgcttccacttccacggccagtactacaccacagaaacagctgtgaacctgcggcaccgctactatgctgtggatgagatcaccatcagcggccgctgccagtgccacggccacgccgacaactgtgacaccaccagccagccctaccgctgcctgtgcagccaggagagcttcacagagggcctgcactgtgaccgctgcctgcccctgtacaatgacaagcccttccggcagggcgaccaggtgtatgccttcaactgcaagccctgccagtgcaacagccacagcaagagctgccactacaacatctctgtggaccccttcccctttgagcacttccggggcggcggcggcgtgtgtgatgactgtgagcacaacaccactggaagaaactgtgagctgtgcaaggactacttcttccggcaggtgggcgctgaccccagcgccattgatgtgtgcaagccctgtgactgtgacacagtgggcaccagaaatggcagcatcctgtgtgaccagatcggcggccagtgcaactgcaagagacatgtgtctggccggcagtgcaaccagtgccagaatggcttctacaacctgcaggagctggaccctgatggctgcagcccctgcaactgcaacaccagcggcaccgtggatggagacatcacctgccaccagaacagcggccagtgcaagtgcaaggccaacgtcatcggcctgcgctgtgaccactgcaactttggcttcaagttcctgcggagcttcaatgatgtgggctgtgagccctgccagtgcaacctgcacggctctgtgaacaagttctgcaacccccacagcggccagtgtgagtgcaagaaggaggccaagggcctgcagtgtgacacctgccgggagaacttctacggcctggatgtgaccaactgcaaggcctgtgactgtgacacagctggcagcctgcccggcaccgtgtgcaatgccaagacaggccagtgcatctgcaagcccaacgtggagggccggcagtgcaacaagtgcctggagggcaacttctacctgcggcagaacaacagcttcctgtgcctgccctgcaactgtgacaagacaggcaccatcaatggcagcctgctgtgcaacaagagcacaggccagtgcccctgcaagctgggcgtgacaggcctgcgctgcaaccagtgtgagccccaccgctacaacctgaccatcgacaacttccagcactgccagatgtgtgaatgtgacagcctgggcaccctgcccggcaccatctgtgaccccatcagcggccagtgcctgtgtgtgcccaaccggcagggccgccgctgcaaccagtgccagcccggcttctacatcagccctggaaatgccaccggctgcctgccctgcagctgccacaccaccggggctgtgaaccacatctgcaacagcctgaccggccagtgtgtgtgccaggatgccagcattgctggccagagatgtgaccagtgcaaggaccactacttcggctttgacccccagacaggccgctgccagccctgcaactgccacctgagcggggccctgaatgagacctgccacctggtgacaggccagtgcttctgcaagcagtttgtgacaggcagcaaatgtgatgcctgtgtgcccagcgccagccacctggatgtgaacaacctgctgggctgcagcaagacccccttccagcagcccccaccccggggccaggtgcagagcagcagcgccatcaacctgtcctggagccccccagacagccccaatgcccactggctgacctacagcctgctgagagatggctttgagatctacaccacagaggaccagtacccctacagcatccagtacttcctggacacagacctgctgccctacaccaagtacagctactacatcgagaccaccaacgtgcacggcagcaccaggtctgtggccgtgacctacaagaccaagccaggagtgcctgagggcaacctgaccctgagctacatcatccccatcggcagtgacagcgtgaccctgacctggaccaccctgagcaaccagagcggccccatcgagaagtacatcctgagctgtgcccccctggccggcggccagccctgtgtgtcctatgagggccacgagaccagcgccaccatctggaacctggtgccctttgccaagtatgacttctctgtgcaggcctgcaccagcggcggctgcctgcacagcctgcccatcaccgtgaccacagcccaggccccaccccagaggctgagcccccccaagatgcagaagatcagcagcacagagctgcacgtggagtggagccccccagctgagctgaatggcatcatcatccgctatgagctgtacatgaggcggctgcggagcaccaaggagaccaccagcgaggagagcagggtcttccagagcagcggctggctgagcccccacagctttgtggagagcgccaatgaaaatgccctgaagccaccccagaccatgaccaccatcaccggcctggagccctacaccaagtatgagttccgggtgctggccgtgaacatggccggctctgtgagcagcgcctgggtgtctgagaggactggagagagcgcccctgtgttcatgatccccccatctgtgttccccctgagcagctacagcctgaacatctcctgggagaagccagctgacaacgtgacccggggcaaggtggtgggctatgacatcaacatgctgtctgagcagagcccccagcagagcatccccatggccttcagccagctgctgcacacagccaagagccaggagctgagctacacagtggagggcctgaagccctaccgcatctatgagttcaccatcaccctgtgcaacagcgtgggctgtgtgaccagcgccagcggggccggccagaccctggccgccgccccagcccagctgcggccccccctggtgaagggcatcaacagcaccaccatccacctgcgctggttccccccagaggagctgaatggccccagccccatctaccagctggagcggcgggagagcagcctgcctgccctgatgaccaccatgatgaagggcatccgcttcatcggaaatggctactgcaagttccccagcagcacccaccctgtgaacacagacttcaccggaaaatgtgtgtag

SEQ ID NO: 175619 - DNA, 15681 bp, synthetic construct
  misc_feature 1..15681: note = Description of Artificial Sequence: Synthetic coding sequence
  source 1..15681: mol_type = other DNA
atgaactgccctgtgctgagcctgggcagcggcttcctgttccaggtgattgagatgctgatctttgcctactttgccagcatcagcctgacagagagccggggcctcttcccccggctggagaatgtgggcgccttcaagaaggtgtccatcgtgcccacccaggccgtgtgtggcctgcctgacaggagcaccttctgccacagcagcgctgctgctgagagcatccagttctgcacccagcgcttctgcatccaggactgcccctaccgcagcagccaccccacctacacagccctcttctctgctggcctgagcagctgcatcaccccagacaagaatgacctgcaccccaatgcccacagcaacagcgccagcttcatctttggaaaccacaagagctgcttcagcagcccccccagccccaagctgatggccagcttcaccctggccgtgtggctgaagccagagcagcagggcgtgatgtgtgtgattgagaagacagtggatggccagatcgtgttcaagctgaccatcagcgagaaggagaccatgttctactacagaacagtgaatggcctgcagccccccatcaaggtgatgaccctgggccgcatcctggtgaagaagtggatccacctgtctgtgcaggtgcaccagaccaagatctccttcttcatcaacggggtggagaaggaccacacccccttcaatgcccggaccctgagcggcagcatcacagactttgccagcggcaccgtgcagatcggccagagcctgaatggcctggagcagtttgtgggccgcatgcaggacttccggctgtaccaggtggccctgaccaaccgggagatcctggaggtgttcagcggggacctgctgcggctgcacgcccagagccactgccgctgccccggcagccacccccgggtgcaccccctggcccagcgctactgcatccccaatgatgctggggacacagctgacaacagagtgtcccggctgaaccctgaggcccaccccctgagctttgtgaatgacaatgatgtgggcacctcctgggtgtccaatgtgttcaccaacatcacccagctgaaccagggcgtgaccatctctgtggacctggagaatggccagtaccaggtgttctacatcatcatccagttcttcagcccccagcccacagagatccgcatccagaggaagaaggagaacagcctggactgggaggactggcagtactttgccaggaactgtggggccttcggcatgaagaacaatggagacctggagaagccagattctgtgaactgcctgcagctgagcaacttcaccccctacagcagaggaaatgtgaccttcagcatcctgaccccaggccccaactacagacctggctacaacaacttctacaacacccccagcctgcaggagtttgtgaaggccacccagatccgcttccacttccacggccagtactacaccacagaaacagctgtgaacctgcggcaccgctactatgctgtggatgagatcaccatcagcggccgctgccagtgccacggccacgccgacaactgtgacaccaccagccagccctaccgctgcctgtgcagccaggagagcttcacagagggcctgcactgtgaccgctgcctgcccctgtacaatgacaagcccttccggcagggcgaccaggtgtatgccttcaactgcaagccctgccagtgcaacagccacagcaagagctgccactacaacatctctgtggaccccttcccctttgagcacttccggggcggcggcggcgtgtgtgatgactgtgagcacaacaccactggaagaaactgtgagctgtgcaaggactacttcttccggcaggtgggcgctgaccccagcgccattgatgtgtgcaagccctgtgactgtgacacagtgggcaccagaaatggcagcatcctgtgtgaccagatcggcggccagtgcaactgcaagagacatgtgtctggccggcagtgcaaccagtgccagaatggcttctacaacctgcaggagctggaccctgatggctgcagcccctgcaactgcaacaccagcggcaccgtggatggagacatcacctgccaccagaacagcggccagtgcaagtgcaaggccaacgtcatcggcctgcgctgtgaccactgcaactttggcttcaagttcctgcggagcttcaatgatgtgggctgtgagccctgccagtgcaacctgcacggctctgtgaacaagttctgcaacccccacagcggccagtgtgagtgcaagaaggaggccaagggcctgcagtgtgacacctgccgggagaacttctacggcctggatgtgaccaactgcaaggcctgtgactgtgacacagctggcagcctgcccggcaccgtgtgcaatgccaagacaggccagtgcatctgcaagcccaacgtggagggccggcagtgcaacaagtgcctggagggcaacttctacctgcggcagaacaacagcttcctgtgcctgccctgcaactgtgacaagacaggcaccatcaatggcagcctgctgtgcaacaagagcacaggccagtgcccctgcaagctgggcgtgacaggcctgcgctgcaaccagtgtgagccccaccgctacaacctgaccatcgacaacttccagcactgccagatgtgtgaatgtgacagcctgggcaccctgcccggcaccatctgtgaccccatcagcggccagtgcctgtgtgtgcccaaccggcagggccgccgctgcaaccagtgccagcccggcttctacatcagccctggaaatgccaccggctgcctgccctgcagctgccacaccaccggggctgtgaaccacatctgcaacagcctgaccggccagtgtgtgtgccaggatgccagcattgctggccagagatgtgaccagtgcaaggaccactacttcggctttgacccccagacaggccgctgccagccctgcaactgccacctgagcggggccctgaatgagacctgccacctggtgacaggccagtgcttctgcaagcagtttgtgacaggcagcaaatgtgatgcctgtgtgcccagcgccagccacctggatgtgaacaacctgctgggctgcagcaagacccccttccagcagcccccaccccggggccaggtgcagagcagcagcgccatcaacctgtcctggagccccccagacagccccaatgcccactggctgacctacagcctgctgagagatggctttgagatctacaccacagaggaccagtacccctacagcatccagtacttcctggacacagacctgctgccctacaccaagtacagctactacatcgagaccaccaacgtgcacggcagcaccaggtctgtggccgtgacctacaagaccaagccaggagtgcctgagggcaacctgaccctgagctacatcatccccatcggcagtgacagcgtgaccctgacctggaccaccctgagcaaccagagcggccccatcgagaagtacatcctgagctgtgcccccctggccggcggccagccctgtgtgtcctatgagggccacgagaccagcgccaccatctggaacctggtgccctttgccaagtatgacttctctgtgcaggcctgcaccagcggcggctgcctgcacagcctgcccatcaccgtgaccacagcccaggccccaccccagaggctgagcccccccaagatgcagaagatcagcagcacagagctgcacgtggagtggagccccccagctgagctgaatggcatcatcatccgctatgagctgtacatgaggcggctgcggagcaccaaggagaccaccagcgaggagagcagggtcttccagagcagcggctggctgagcccccacagctttgtggagagcgccaatgaaaatgccctgaagccaccccagaccatgaccaccatcaccggcctggagccctacaccaagtatgagttccgggtgctggccgtgaacatggccggctctgtgagcagcgcctgggtgtctgagaggactggagagagcgcccctgtgttcatgatccccccatctgtgttccccctgagcagctacagcctgaacatctcctgggagaagccagctgacaacgtgacccggggcaaggtggtgggctatgacatcaacatgctgtctgagcagagcccccagcagagcatccccatggccttcagccagctgctgcacacagccaagagccaggagctgagctacacagtggagggcctgaagccctaccgcatctatgagttcaccatcaccctgtgcaacagcgtgggctgtgtgaccagcgccagcggggccggccagaccctggccgccgccccagcccagctgcggccccccctggtgaagggcatcaacagcaccaccatccacctgcgctggttccccccagaggagctgaatggccccagccccatctaccagctggagcggcgggagagcagcctgcctgccctgatgaccaccatgatgaagggcatccgcttcatcggaaatggctactgcaagttccccagcagcacccaccctgtgaacacagacttcaccggcatcaaggccagcttccgcaccaaggtgcctgagggcctgattgtgtttgctgccagccctggcaaccaggaggagtactttgccctgcagctgaagaagggccgcctgtacttcctgtttgacccccagggcagccctgtggaggtgaccaccaccaatgaccacggcaagcagtacagtgatggcaagtggcatgagatcatcgccatccgccaccaggccttcggccagatcaccctggatggcatctacacaggcagcagcgccatcctgaatggcagcaccgtcatcggggacaacacaggagtcttcctgggcggcctgcccaggagctacaccatcctgaggaaggaccctgagatcatccagaagggctttgtgggctgcctgaaggatgtgcacttcatgaagaactacaaccccagcgccatctgggagcccctggactggcagagcagcgaggagcagatcaacgtgtacaacagctgggagggctgcccagccagcctgaatgaaggagcccagttcctgggcgccggcttcctggagctgcacccctacatgtttcatggaggcatgaactttgagatctccttcaagttcagaacagaccagctgaatggcctgctgctgtttgtgtacaacaaggatggccctgacttcctggccatggagctgaagagcggcatcctgaccttccggctgaacaccagcctggccttcacccaggtggacctgctgctgggcctgagctactgcaatggcaagtggaacaaggtgatcatcaagaaggagggcagcttcatcagcgcctctgtgaatggcctgatgaagcacgccagcgagagcggggaccagcccctggtggtgaacagccctgtgtatgtgggcggcatcccccaggagctgctgaacagctaccagcacctgtgcctggagcagggctttggaggctgcatgaaggatgtgaagttcaccagaggagctgtggtgaacctggcctctgtgtcctctggagctgtgcgggtgaacctggatggctgcctgagcacagacagcgctgtgaactgcagaggaaatgacagcatcctggtgtaccagggcaaggagcagagcgtgtatgaaggaggcctgcagcccttcacagagtacctgtacagagtcatcgccagccatgaaggaggctctgtgtacagcgactggagccggggccgcaccaccggggccgccccccagagcgtgcccacccccagccgggtgcgcagcctgaatggctacagcattgaggtgacctgggatgagcctgtggtgcggggcgtcatcgagaagtacatcctgaaggcctacagcgaggacagcaccaggcctcccaggatgcccagcgccagcgctgagtttgtgaacaccagcaacctgaccggcatcctgaccggcctgctgcccttcaagaactatgctgtgaccctgacagcctgcaccctggccggctgcacagagagcagccacgccctgaacatcagcaccccccaggaggccccccaggaggtgcagccccctgtggccaagagcctgcccagcagcctgctgctgtcctggaacccccccaagaaggccaacggcatcatcacccagtactgcctgtacatggatggccgcctcatctacagcggcagcgaggagaactacatcgtgacagacctggccgtgttcaccccccaccagttcctgctgagcgcctgcacccacgtgggctgcaccaacagctcctgggtgctgctgtacacagcccagctgcccccagagcacgtggacagccctgtgctgactgtgctggacagcaggaccatccacatccagtggaagcagcccaggaagatcagcggcatcctggagcgctacgtgctgtacatgagcaaccacacccatgacttcaccatctggagcgtcatctacaacagcacagagctgttccaggaccacatgctgcagtatgtgctgcccggcaacaagtacctgatcaagctgggcgcctgcaccggcggcggctgcaccgtgtctgaggccagcgaggccctgacagatgaggacatccctgagggcgtgcctgcccccaaggcccacagctacagcccagacagcttcaacgtgtcctggacagagcctgagtaccccaacggggtcatcaccagctatggcctgtacctggatggcatcctgatccacaacagcagcgagctgagctaccgggcctacggctttgccccctggagcctgcacagcttccgggtgcaggcctgcacagccaagggctgtgccctgggccccctggtggagaacagaaccctggaggcccctcctgagggcaccgtgaatgtgtttgtgaagacccagggcagcaggaaggcccacgtgcgctgggaggcccccttccggcccaacggcctgctgacccacagcgtgctcttcaccggcatcttctacgtggaccctgtgggcaacaactacaccctgctgaatgtgaccaaggtgatgtacagcggggaggagaccaacctgtgggtgctgattgatggcctggtgcccttcaccaactacacagtgcaggtgaacatcagcaacagccagggcagcctcatcacagaccccatcaccatcgccatgcctcctggggccccagatggagtgctgcccccccggctgagcagcgccacccccaccagcctgcaggtggtgtggagcaccccagccaggaacaatgcccctggcagcccccgctaccagctgcagatgaggtctggggacagcacccacggcttcctggagctgttcagcaaccccagcgccagcctgtcctatgaggtgtctgacctgcagccctacacagagtacatgttccggctggtggccagcaatggcttcggcagcgcccacagctcctggatccccttcatgacagctgaggacaagccaggccctgtggtgccccccatcctgctggatgtgaagagcaggatgatgctggtgacctggcagcaccccaggaagagcaatggagtcatcacccactacaacatctacctgcacggccgcctgtacctgcggaccccaggaaatgtgaccaactgcaccgtgatgcacctgcacccctacacagcctacaagttccaggtggaggcctgcaccagcaagggctgcagcctgagccctgagagccagacagtgtggaccctgcccggggcccctgagggcatccccagccctgagctgttcagtgacacccccaccagcgtcatcatctcctggcagccccccacccaccccaacggcctggtggagaacttcaccattgaaagaagagtgaagggcaaggaggaggtgaccaccctggtgaccctgcccaggagccacagcatgaggttcatcgacaagaccagcgccctgagcccctggaccaagtatgagtacagagtgctgatgagcaccctgcacggcggcaccaacagcagcgcctgggtggaggtgaccacccggcccagcaggcctgctggggtgcagccccctgtggtgacagtgctggagccagatgctgtgcaggtgacctggaagccacccctcatccagaatggagacatcctgtcctatgagatccacatgccagacccccacatcaccctgaccaacgtgaccagcgctgtgctgagccagaaggtgacccacctgatccccttcaccaactacagcgtgaccatcgtggcctgcagcggcggcaatggctacctgggcggctgcacagagagcctgcccacctacgtgaccacccaccccaccgtgccccagaatgtgggccccctgagcgtcatccccctgtctgagagctatgtggtgatctcctggcagccccccagcaagcccaacggccccaacctgcgctatgagctgctgcggaggaagatccagcagcccctggccagcaaccccccagaggacctgaaccgctggcacaacatctacagcggcacccagtggctgtatgaggacaagggcctgagccgcttcaccacctatgagtacatgctgtttgtgcacaacagcgtgggcttcacccccagccgggaggtgacagtgaccaccctggccggcctgcctgagcggggggccaacctgacagcctctgtgctgaaccacacagccattgatgtgcgctgggccaagcccaccgtgcaggacctgcagggcgaggtggagtactacaccctcttctggagcagcgccaccagcaatgacagcctgaagatcctgcctgatgtgaacagccacgtgattggccacctgaagcccaacacagagtactggatcttcatcagcgtcttcaatggagtgcacagcatcaacagcgctggcctgcacgccaccacctgtgatggagagccccagggcatgctgcccccagaggtggtgatcatcaacagcacagctgtgcgggtcatctggaccagccccagcaaccccaatggagtggtgacagagtacagcatctacgtgaacaacaagctgtacaagacaggcatgaatgtgcccggcagcttcatcctgcgggacctgagccccttcaccatctatgacatccaggtggaggtgtgcaccatctatgcctgtgtgaagagcaatggcacccagatcaccaccgtggaggacacccccagcgacatccccacccccaccatccggggcatcaccagccgcagcctgcagattgactgggtgagccccaggaagcccaacggcatcatcctgggctatgacctgctgtggaagacctggtacccctgtgccaagacccagaagctggtgcaggaccagagtgatgagctgtgcaaggctgtgcgctgccagaagccagagagcatctgtggccacatctgctacagcagcgaggccaaggtgtgctgcaatggagtgctgtacaaccccaagccaggccaccgctgctgtgaggagaagtacatcccctttgtgctgaacagcactggagtgtgctgcggcggccgcatccaggaggcccagcccaaccaccagtgctgcagcggctactatgcccgcatcctgcccggggaggtgtgctgcccagatgagcagcacaacagagtgtctgtgggcattggagacagctgctgcggccgcatgccctacagcaccagcggcaaccagatctgctgtgccggccgcctgcatgatggccacggccagaagtgctgcggccggcagatcgtgtccaatgacctggagtgctgcggcggggaggagggcgtggtgtacaaccggctgcccggcatgttctgctgcggccaggactatgtgaacatgtctgacaccatctgctgcagcgccagcagtggagagagcaaggcccacatcaagaagaatgaccctgtgcctgtgaagtgctgtgaaacagagctgatccccaagagccagaagtgctgcaatggagtgggctacaaccccctgaagtatgtgtgcagcgacaagatcagcacaggcatgatgatgaaggagaccaaggagtgccgcatcctgtgcccagcctccatggaggccacagagcactgcggccgctgtgacttcaacttcaccagccacatctgcaccgtcatccggggcagccacaacagcacaggcaaggccagcattgaggagatgtgcagcagcgctgaggagaccatccacactggatctgtgaacacctacagctacacagatgtgaacctgaagccctacatgacctatgagtaccgcatcagcgcctggaacagctatggccggggcctgagcaaggctgtgcgggcccggaccaaggaggatgtgccccagggcgtgagcccccccacctggaccaagattgacaacctggaggacaccatcgtgctgaactggaggaagcccatccagagcaatggccccatcatctactacatcctgctgagaaatggaattgagcgcttccggggcaccagcctgtccttcagtgacaaggagggcatccagcccttccaggagtacagctaccagctgaaggcctgcaccgtggccggctgtgccaccagcagcaaggtggtggccgccaccacccagggcgtgcctgagagcatcctgcccccatccatcacagccctgtctgctgtggccctgcacctgtcctggagcgtgcctgagaagagcaatggagtcatcaaggagtaccagatccggcaggtgggcaagggcctcatccacacagacaccacagaccggcggcagcacacagtgacaggcctgcagccctacaccaactacagcttcaccctgacagcctgcaccagcgctggctgcaccagcagcgagcccttcctgggccagaccctgcaggccgcccctgagggcgtgtgggtgacccccaggcacatcatcatcaacagcaccaccgtggagctgtactggagcctgcctgagaagcccaacggcctggtgtcccagtaccagctgagcagaaatggaaacctgctcttcctgggcggcagcgaggagcagaacttcacagacaagaacctggagcccaacagccgctacacctacaagctggaggtgaagacaggaggcggcagcagcgccagtgatgactacatcgtgcagacccccatgagcaccccagaggagatctacccaccctacaacatcaccgtcatcggcccctacagcatctttgtggcctggatccccccaggcatcctgatccctgagatccctgtggagtacaacgtgctgctgaatgatggctctgtgacccccctggccttctctgtgggccaccaccagagcaccctgctggagaacctgacccccttcacccagtatgagatccgcatccaggcctgccagaatggcagctgtggggtgagcagcaggatgtttgtgaagaccccagaggccgcccccatggacctgaacagccctgtgctgaaggccctgggcagcgcctgcatcgagatcaagtggatgcctcctgagaagcccaacggcatcatcatcaactacttcatctacagaagacctgctggcatcgaggaggagagcgtgctgtttgtgtggagcgagggcgccctggagttcatggatgaaggagacaccctgcggcccttcaccctgtatgagtacagagtgcgggcctgcaacagcaagggctctgtggagagcctgtggagcctgacccagaccctggaggccccaccccaggacttccctgccccctgggcccaggccaccagcgcccacagcgtgctgctgaactggaccaagccagagagccccaacggcatcatcagccactacagagtggtgtaccaggagaggccagatgaccccaccttcaacagccccaccgtgcacgccttcaccgtgaagggcaccagccaccaggcccacctgtatggcctggagcccttcaccacctacagaattggagtggtggccgccaaccacgccggggagatcctgagcccctggaccctcatccagaccctggagagcagccccagcggcctgaggaacttcatcgtggagcagaaggaaaatggccgggccctgctgctgcagtggagcgagcccatgaggaccaacggggtcatcaagacctacaacatcttcagtgatggcttcctggagtacagcggcctgaaccggcagttcctgttccggcggctggaccccttcaccctgtacaccctgaccctggaggcctgcacccgggccggctgtgcccacagcgccccccagcccctgtggacagatgaggcccccccagacagccagctggcccccaccgtgcacagcgtgaagagcacctctgtggagctgtcctggagcgagcctgtgaaccccaacgggaagatcatccgctatgaggtgatccgccgctgctttgagggcaaggcctggggcaaccagaccatccaggctgatgagaagatcgtgttcacagagtacaacacagagaggaacaccttcatgtacaatgacaccggcctgcagccctggacccagtgtgagtacaagatctacacctggaacagcgctggccacacctgcagctcctggaatgtggtgaggaccctgcaggcccctcctgagggcctgagcccccctgtgatctcctatgtgtccatgaacccccagaagctgctgatctcctggatccccccagagcagagcaatggcatcatccagagctaccgcctgcagagaaatgagatgctgtaccccttctcctttgatcctgtgaccttcaactacacagatgaggagctgctgcccttcagcacctacagctatgccctgcaggcctgcaccagcggcggctgcagcaccagcaagcccaccagcatcaccaccctggaggccgcccccagcgaggtgtccccaccagacctgtgggccgtgtctgccacccagatgaatgtgtgctggagcccccccaccgtgcagaatggcaagatcaccaagtacctggtgcgctatgacaacaaggagagcctggccggccagggcctgtgcctgctggtgagccacctgcagccctacagccagtacaacttcagcctggtggcctgcaccaacggcggctgcacagcctctgtgtccaagagcgcctggaccatggaggccctgcctgagaacatggacagccccaccctgcaggtgactggaagtgagagcattgagatcacctggaagccacccaggaaccccaacggccagatccgctcctatgagctgcggagagatggcaccatcgtgtacacaggcctggagacccgctacagagacttcaccctgaccccaggagtggagtacagctacacagtgacagccagcaacagccagggcggcatcctgagccccctggtgaaggacaggaccagccccagcgcccccagcggcatggagccccccaagctgcaggcccggggcccccaggagatcctggtgaactgggacccccctgtgaggaccaatggagacatcatcaactacaccctcttcatccgggagctgtttgagcgggagaccaagatcatccacatcaacaccacccacaacagctttggcatgcagagctacatcgtgaaccagctgaagcccttccacagatatgagatccgcatccaggcctgcaccaccctgggctgtgccagcagtgactggaccttcatccagaccccagagatcgcccccctgatgcagcccccaccccacctggaggtgcagatggcccctgggggcttccagcccaccgtgtccctgctgtggacaggccccctgcagcccaacgggaaggtgctgtactatgagctgtaccgccggcagatcgccacccagcccaggaagagcaaccctgtgctgatctacaacggcagcagcaccagcttcatcgacagcgagctgctgcccttcacagaatatgagtaccaggtgtgggccgtgaacagcgctgggaaggcccccagctcctggacctggtgcaggacaggccctgcccctcctgagggcctgcgggcccccaccttccacgtgatcagcagcacccaggccgtggtgaacatcagcgcccctgggaagcccaacggcatcgtgtccctgtaccgcctcttcagcagcagcgcccacggggctgagaccgtgctgtctgagggcatggccacccagcagaccctgcacggcctgcaggccttcaccaactacagcattggagtggaggcctgcacctgcttcaactgctgcagcaagggccccacagctgagctgcggacccacccagccccacccagcggcctgagcagcccccagatcggcaccctggccagcaggacagccagcttccgctggagcccccccatgttccccaacggggtcatccacagctatgagctgcagttccacgtggcctgccccccagacagcgccctgccctgcacccccagccagatcgagaccaagtacacaggcctgggccagaaggccagcctgggcggcctgcagccctacaccacctacaagctgcgggtggtggcccacaatgaggtgggcagcacagccagcgagtggatctccttcaccacccagaaggagctgccccagtaccgggcccccttctctgtggacagcaacctgtctgtggtgtgtgtgaactggagcgacaccttcctgctgaatggccagctgaaggagtatgtgctgacagatggcggcagaagagtgtacagcggcctggacaccaccctgtacatccccaggacagctgacaagaccttcttcttccaggtgatctgcaccacagatgagggctctgtgaagacccccctcatccagtatgacaccagcacaggcctgggcctggtgctgaccacccctgggaagaagaagggcagccgcagcaagagcacagagttctacagcgagctgtggttcatcgtgctgatggccatgctgggcctcatcctgctggccatcttcctgagcctcatcctgcagaggaagatccacaaggagccctacatccgggagaggcctcccctggtgcccctgcagaagaggatgagccccctgaatgtgtacccacctggagagaaccacatgtttgacagcgtggccgacatcagtgatgtgagcagcaatgtgaccctgaagagctacaccatgcactttgagggcctggccgacaccaagatccccaggagcggcacccctgtgtccatccgcagcaacagaagtgcctgtgtgctgcgcatccccagccagaaccagaccagcctgacctacagccagggcagcctgcacaggtctgtgtcccagctgatggacatccaggacaagaaggtgctgatggacaacagcctgtgggaggccatcatgggccacaacagcggcctgtatgtggatgaggaggacctgatgaatgccatcaaggacttcagctctgtgaccaaggagaggaccaccttcacagacacccacctgtag

SEQ ID NO: 175620 - DNA, 2538 bp, synthetic construct
  misc_feature 1..2538: note = Description of Artificial Sequence: Synthetic coding sequence
  source 1..2538: mol_type = other DNA
atgaggacagaagctgtggtgaacagccagggccagacagactacctgaccaaggacagcgaccaggatgtggccctgaagctggcccaggagagagctgagatcgtggccaagtatgaccggggccgggagggcgctgagattgagccctgggaggatgctgactacctggtgtacaaggtgacagacagatttggcttcctgcacgaggaggagctgcctgaccacaacgtggccgtggagcggcagaagcacctggagattgaaagaaccaccaagtggctgaagatgctgaagggctgggagaagtacaagaacacagagaagttccaccggcgcatctacaagggcatccccctgcagctgcggggggaggtgtgggccctgctgctggagatccccaagatgaaggaggagacccgggacctgtacagcaagctgaagcaccgggcccggggctgcagcccagacatccggcagattgacctggatgtgaacagaaccttccgggaccacatcatgttccgggacagatatggagtgaagcagcagagcctcttccacgtgctggccgcctacagcatctacaacacagaggtgggctactgccagggcatgagccagatcacagccctgctgctgatgtacatgaatgaggaggatgccttctgggccctggtgaagctgttcagcggccccaagcacgccatgcacggcttctttgtgcagggcttccccaagctgctgcgcttccaggagcaccacgagaagatcctgaacaagttcctgagcaagctgaagcagcacctggacagccaggagatctacaccagcttctacaccatgaagtggttcttccagtgcttcctggacaggacccccttcaccctgaacctgcgcatctgggacatctacatctttgaaggagagcgggtgctgacagccatgagctacaccatcctgaagctgcacaagaagcacctgatgaagctgtccatggaggagctggtggagttcttccaggagaccctggccaaggacttcttctttgaagatgactttgtgattgagcagctgcagatctccatgacagagctgaagagggccaagctggacctgcctgagcccgggaaggaggatgagtaccccaagaagcccctgggccagctgcccccagagctgcagagctggggcgtgcaccacctgagcaatggccagaggtctgtgggccggcccagccccctggccagcggcagaagagagagcggggccccccacagaagacatgagcacagcccccacccccagagcaggacaggcaccccagagcgggcccagccccccaggaggaagtctgtggaggaggagagcaagaagctgaaggatgaggccgacttccagaggaagctgcccagcggcccccaggacagcagccggcagtacaaccacgccgccgccaaccagaacagcaatgccaccagcaacatcaggaaggagtttgtgcccaagtggaacaagcccagtgatgtgtctgccacagagaggacagccaagtacaccatggagggcaagggccgggccgcccacccagccctggccgtgacagtgcccggccctgctgaggtgcgggtgtccaatgtgcggcccaagatgaaggccctggatgctgaagatggcaagaggggcagcacagccagccagtatgacaacgtgcccggccctgagctggacagcggggcctctgtggaggaggccctggagcgggcctacagccagagccccaggcatgccctgtacccacccagccccaggaagcatgctgagcccagcagcagccccagcaaggtgagcaacaagttcaccttcaaggtgcagccccccagccacgcccgctaccccagccagctggatggagaggcccggggcctggcccacccccccagctacagcaacccccctgtgtaccacggcaacagccccaagcacttccccacagccaacagcagctttgccagcccccagttcagccctggcacccagctgaaccccagcagaagaccccacggcagcaccctgtctgtgtctgccagccctgagaagagctacagccggcccagccccctggtgctgcccagcagcagaattgaggtgctgcctgtggacaccggggccggcggctacagcggcaacagcggcagccccaagaatggcaagctgatcatcccccctgtggactacctgcctgacaacagaacctggagcgaggtgtcctacacctacagacctgagacccagggccagagctggaccagagatgccagccggggcaacctgcccaagtacagcgccttccagctggcccccttccaggaccacggcctgcctgctgtgtctgtggacagccctgtgcgctacaaggccagccctgctgctgaagatgccagccccagcggctacccctacagcggccccccacctccagcctaccactacagaaacagagatggcctgagcatccaggagagcgtgctgctgtag

SEQ ID NO: 175621 - DNA, 2487 bp, synthetic construct
  misc_feature 1..2487: note = Description of Artificial Sequence: Synthetic coding sequence
  source 1..2487: mol_type = other DNA
atgaacagcgaccaggatgtggccctgaagctggcccaggagcgggcagagatcgtggccaagtatgaccggggccgggagggcgctgagattgagccctgggaggatgctgactacctggtgtacaaggtgacagaccgcttcggcttcctgcacgaggaggagctgcctgaccacaacgtggccgtggagcggcagaagcacctggagattgaaagaaccaccaagtggctgaagatgctgaagggctgggagaagtacaagaacacagagaagttccaccggcgcatctacaagggcatccccctgcagctgcggggggaggtgtgggccctgctgctggagatccccaagatgaaggaggagacccgggacctgtacagcaagctgaagcaccgggcccggggctgcagcccagacatccggcagattgacctggatgtgaacagaaccttccgggaccacatcatgttccgggacagatatggagtgaagcagcagagcctcttccacgtgctggccgcctacagcatctacaacacagaggtgggctactgccagggcatgagccagatcacagccctgctgctgatgtacatgaatgaagaagatgccttctgggccctggtgaagctgttcagcggccccaagcacgccatgcacggcttctttgtgcagggcttccccaagctgctgcgcttccaggagcaccacgagaagatcctgaacaagttcctgagcaagctgaagcagcacctggacagccaggagatctacaccagcttctacaccatgaagtggttcttccagtgcttcctggacaggacccccttcaccctgaacctgcgcatctgggacatctacatctttgaaggagagcgggtgctgacagccatgagctacaccatcctgaagctgcacaagaagcacctgatgaagctgtccatggaggagctggtggagttcttccaggagaccctggccaaggacttcttctttgaagatgactttgtgattgagcagctgcagatctccatgacagagctgaagagggccaagctggacctgcctgagcccgggaaggaggatgagtaccccaagaagcccctgggccagctgcccccagagctgcagagctggggcgtgcaccacctgagcaatggccagaggtctgtgggccggcccagccccctggccagcggccggcgggagagcggggccccccacagaagacatgagcacagcccccacccccagagcaggacaggcaccccagagcgggcccagccccccaggaggaagtctgtggaggaggagagcaagaagctgaaggatgaagctgacttccagaggaagctgcccagcggcccccaggacagcagccggcagtacaaccacgccgccgccaaccagaacagcaatgccaccagcaacatcaggaaggagtttgtgcccaagtggaacaagcccagtgatgtgtctgccacagagaggacagccaagtacaccatggagggcaagggccgggccgcccacccagccctggccgtgacagtgcccggccctgctgaggtgcgggtgtccaatgtgcggcccaagatgaaggccctggatgctgaagatggcaagaggggcagcacagccagccagtatgacaacgtgcccggccctgagctggacagcggggcctctgtggaggaggccctggagcgggcctacagccagagccccaggcatgccctgtacccacccagccccaggaagcacgccgagcccagcagcagccccagcaaggtgagcaacaagttcaccttcaaggtgcagccccccagccacgcccgctaccccagccagctggatggagaggcccggggcctggcccaccccccatcctacagcaacccccctgtgtaccacggcaacagccccaagcacttccccacagccaacagcagctttgccagcccccagttcagccctggcacccagctgaaccccagccggcggccccacggcagcaccctgtctgtgtctgccagccctgagaagagctacagccggcccagccccctggtgctgcccagcagccgcatcgaggtgctgcctgtggacacaggagctgggggctacagcggcaacagcggcagccccaagaatggcaagctgatcatcccccctgtggactacctgcctgacaacagaacctggagcgaggtgtcctacacctacagacctgagacccagggccagagctggaccagagatgccagccggggcaacctgcccaagtacagcgccttccagctggcccccttccaggaccacggcctgcctgctgtgtctgtggacagccctgtgcgctacaaggccagccctgctgctgaagatgccagccccagcggctacccctacagcggccccccacctccagcctaccactacagaaacagagatggcctgagcatccaggagagcgtgctgctgtag

SEQ ID NO: 175622 - DNA, 2487 bp, synthetic construct; identical to SEQ ID NO: 175621
  misc_feature 1..2487: note = Description of Artificial Sequence: Synthetic coding sequence
  source 1..2487: mol_type = other DNA

SEQ ID NO: 175623 - DNA, 762 bp, synthetic construct
  misc_feature 1..762: note = Description of Artificial Sequence: Synthetic coding sequence
  source 1..762: mol_type = other DNA
atggctgctgccttcaggaaggccgccaagagccggcagcgggagcaccgggagaggagccagcccggcttcaggaagcacctgggcctgctggagaagaagaaggactacaagctgcgggcagatgactacaggaagaagcaggagtacctgaaggccctgaggaagaaggccctggagaagaacccagatgagttctactacaagatgaccagggtgaagctgcaggatggagtgcacatcatcaaggagaccaaggaggaggtgaccccagagcagctgaagctgatgaggacccaggatgtgaagtacatcgagatgaagagggtggccgaggccaagaagattgaaaggctgaagtctgagctgcacctgctggacttccagggcaagcagcagaacaagcacgtgttcttctttgacaccaagaaggaggtggagcagtttgatgtggccacccacctgcagacagcccctgagctggtggacagagtcttcaaccggcccagaattgagaccctgcagaaggagaaggtgaagggcgtgaccaaccagacaggcctgaagagaattgccaaggagcggcagaagcagtacaactgcctgacccagagaattgaaagagagaagaagctgtttgtgattgcccagaagatccagaccaggaaggacctgatggacaagacccagaaggtgaaggtgaagaaggagaccgtgaacagccctgccatctacaagttccagagcaggaggaagaggtag

SEQ ID NO: 175624 - DNA, 447 bp, synthetic construct
  misc_feature 1..447: note = Description of Artificial Sequence: Synthetic coding sequence
  source 1..447: mol_type = other DNA
atggctgctgccttcaggaaggccgccaagagccggcagcgggagcaccgggagaggagccagcccggcttcaggaagcacctgggcctgctggagaagaagaaggactacaagctgcgggcagatgactacaggaagaagcaggagtacctgaaggccctgaggaagaaggccctggagaagaacccagatgagttctactacaagatgaccagggtgaagctgcaggatggagtgcacatcatcaaggagaccaaggaggaggtgaccccagagcagctgaagctgatgaggacccaggatgtgaagtacatcgagatgaagagggtggccgaggccaagaagattgaaaggctgaagtctgagctgcacctgctggacttccagggcaagcagcagaacaagcacgtgttcttctttgacaccaagaaggaggccaacagctag

SEQ ID NO: 175625 - DNA, 2124 bp, synthetic construct
  misc_feature 1..2124: note = Description of Artificial Sequence: Synthetic coding sequence
  source 1..2124: mol_type = other DNA
atgcctgaggaggccggcttccccccagccaagcgcttccggcccggcagcggcccccccagcagagctggcagcttccccccaggccggcaggtggtgatgctgctgacagctggcagcggcggccggggcggcggcggcggccggcggcagcagccccccctggcccagcccagcgccagcccctacccagaggccgtggagctgcagaggaggagcctgcccatcttccaggcccggggccagctgctggcccagctgaggaacctggacaatgctgtgctgattggagaaacaggcagcggcaagaccacccagatcccccagtacctgtatgagggcggcatcagccggcagggcatcatcgctgtgacccagccccggcgggtggccgccatcagcctggccaccagggtgtctgatgagaagaggacagagctgggcaagctggtgggctacacagtgcgctttgatgatgtgaccagcgaggacacccgcatcaagttcctgacagatggcatgctgctgcgggaggccatcagtgacagcctgctgaggaagtacagctgtgtgatcctggatgaggcccacgagaggaccatccacacagatgtgctgtttggagtggtgaaggccgcccagaagaggaggaaggagctgggcaagctgcccctgaaggtgattgtgatgtctgccaccatggatgtggacctcttcagccagtacttcaacggggcccctgtgctgtacctggagggccggcagcaccccatccaggtgttctacaccaagcagccccagaatgactacctgcatgctgccctggtgtctgtgttccagatccaccaggaggcccccagcagccaggacatcctggtgttcctgaccggccaggaggagattgaggccatgagcaagacctgccgggacatcgccaagcacctgcctgatggctgcccagccatgctggtgctgcccctgtatgccagcctgccctatgcccagcagctgcgggtcttccagggcgcccccaagggctacaggaaggtgatcatcagcaccaacattgctgagaccagcatcaccatcaccggcatcaagtatgtggtggacaccggcatggtgaaggccaagaagtacaacccagacagcggcctggaggtgctggccgtgcagagggtgtccaagacccaggcctggcagaggacaggccgggccggcagagaagattctggcatctgctaccgcctgtacacagaagatgaatttgagaagtttgacaagatgacagtgcctgagatccagcgctgcaacctggcctctgtgatgctgcagctgctggccatgaaggtgcccaacgtgctgacctttgacttcatgagcaagcccagcccagaccacatccaggccgccatcgcccagctggacctgctgggcgccctggagcacaaggatgaccagctgaccctgacccccatgggcaggaagatggccgccttccccctggagcccaagtttgccaagaccatcctgatgagccccaagttccactgcacagaggagatcctgaccatcgtgtccctgctgtctgtggacagcgtgctgcacaacccccccagcagaagagaggaggtgcagggcgtgaggaagaagttcatcagcagcgagggggaccacatgaccctgctgaacatctaccgcaccttcaagaacctgggcggcaacaaggactggtgcaaggaaaattttgtgaacagcaagaacatgaccctggtggccgaggtgcgggcccagctgcgggacatctgcctgaagatgtccatgcccatcgccagcagcagaggagatgtggagagcgtgcggcgctgcctggcccacagcctcttcatgagcacagctgagctgcagccagatggcacctacgccaccacagacacccaccagcctgtggccatccaccccagctctgtgctcttccactgcaagccagcctgtgtggtgtacacagagctgctgtacaccaacaagtgctacatgagggacctgtgtgtgattgatgcccagtggctgtatgaagctgcccctgagtacttccggaggaagctgaggacagccaggaactag

SEQ ID NO: 175626 - DNA, 1566 bp, synthetic construct
  misc_feature 1..1566: note = Description of Artificial Sequence: Synthetic coding sequence
  source 1..1566: mol_type = other DNA
atgaggccagactggaaggccggggccggccctgggggccccccccagaagccagcccccagcagccagaggaagcccccagcccggcccagcgctgctgctgctgccatcgctgtggccgctgctgaggaggagcggcggctgcggcagaggaaccggctgcggctggaggaggacaagccagctgtggagcgctgcctggaggagctggtgtttggagatgtggagaatgatgaagatgccctgctgcggcggctgcggggcccccgggtgcaggagcatgaagattctggggacagcgaggtggagaatgaggccaagggcaacttccccccccagaagaagcctgtgtgggtggatgaggaggatgaagatgaggagatggtggacatgatgaacaaccgcttcaggaaggacatgatgaagaatgccagcgagagcaagctgagcaaggacaacctgaagaagaggctgaaggaggagttccagcacgccatgggcggcgtgcctgcctgggccgagaccaccaagaggaagaccagcagtgatgatgagagcgaggaggatgaagatgacctgctgcagaggactggaaacttcatcagcaccagcaccagcctgccccggggcatcctgaagatgaagaactgccagcacgccaatgctgagcggcccaccgtggcccgcatcagctctgtgcagttccaccctggggcccagatcgtgatggtggccggcctggacaatgctgtgtccctcttccaggtggatggcaagaccaaccccaagatccagagcatctacctggagcgcttccccatcttcaaggcctgcttcagcgccaacggggaggaggtgctggccaccagcacccacagcaaggtgctgtatgtgtatgacatgctggccggcaagctgatccctgtgcaccaggtgcggggcctgaaggagaagatcgtgcgcagctttgaggtgtccccagatggcagcttcctgctgatcaatggaattgctggctacctgcacctgctggccatgaagaccaaggagctgattggctccatgaagatcaatggccgggtggccgccagcaccttcagcagtgacagcaagaaggtgtatgccagcagtggagatggagaggtgtatgtgtgggatgtgaacagcaggaagtgcctgaacagatttgtggatgagggcagcctgtatggcctgagcatcgccaccagcagaaatggccagtatgtggcctgtggcagcaactgtggggtggtgaacatctacaaccaggacagctgcctgcaggagaccaaccccaagcccatcaaggccatcatgaacctggtgactggagtgaccagcctgaccttcaaccccaccacagagatcctggccatcgccagcgagaagatgaaggaggccgtgcggctggtgcacctgcccagctgcaccgtcttcagcaacttccctgtgatcaagaacaagaacatcagccacgtgcacaccatggacttcagccccaggagcggctactttgccctgggcaatgagaaggcccggccctag

SEQ ID NO: 175627 - DNA, 8358 bp, synthetic construct
  misc_feature 1..8358: note = Description of Artificial Sequence: Synthetic coding sequence
  source 1..8358: mol_type = other DNA
atgaagaccaagcctgtgagccacaagacagagaacacctaccgcttcctgacctttgctgagcggctgggcaatgtgaacatcgacatcatccacagaattgacagaacagccagctatgaggaggaggtggagacctacttctttgagggcctgctgaagtggagggagctgaacctgacagagcactttgggaagttctacaaggaggtgattgacaagtgccagagcttcaaccagctggtgtaccaccagaatgagatcgtgcagagcctgaagacccacctgcaggtgaagaacagctttgcctaccagcccctgctggacctggtggtgcagctggcccgggacctgcagatggacttctacccccacttccctgagttcttcctgaccatcaccagcatcctggagacccaggacacagagctgctggagtgggccttcaccagcctgagctacctgtacaagtacctgtggaggctgatggtgaaggacatgagcagcatctacagcatgtacagcaccctgctggcccacaagaagctgcacatccggaactttgctgctgagagcttcaccttcctgatgaggaaggtgtctgacaagaatgccctcttcaacctgatgttcctggacctggacaagcaccctgagaaggtggagggcgtgggccagctgctgtttgagatgtgcaagggcgtgaggaacatgttccacagctgcaccggccaggccgtgaagctgatcctgaggaagctgggccctgtgacagaaacagagacccagctgccctggatgctgattggagagaccctgaagaacatggtgaagagcacagtgtcctacatcagcaaggagcacttcggcaccttctttgagtgcctgcaggagagcctgctggacctgcacaccaaggtgaccaagaccaactgctgtgagagcagcgagcagatcaagaggctgctggagacctacctgatcctggtgaagcacggcagcggcaccaagatccccaccccagcagatgtgtgcaaggtgctgagccagaccctgcaggtggccagcctgagcaccagctgctgggagaccctgctggatgtgatcagcgccctgatcctgggggagaatgtgtccctgcctgagaccctcatcaaggagaccatcgagaagatctttgagagcagatttgagaagaggctcatcttctccttcagcgaggtgatgtttgccatgaagcagtttgagcagctgttcctgcccagcttcctgagctacatcgtgaactgcttcctgattgatgatgctgtggtgaaggatgaggccctggccatcctggccaagctgatcctgaacaaggccgccccacccacagctggctccatggccatcgagaagtaccccctggtgttcagcccccagatggtgggcttctacatcaagcagaagaagaccaggagcaagggcagaaatgagcagtttcctgtgctggaccacctgctgagcatcatcaagctgccccccaacaaggacaccacctacctgagccagagctgggccgccctggtggtgctgccccacatccggcccctggagaaggagaaggtgatccccctggtgacaggcttcatcgaggccctcttcatgacagtggacaagggcagctttgggaagggcaacctgtttgtgctgtgccaggccgtgaacaccctgctgagcctggaggagagcagcgagctgctgcacctggtgcctgtggagcgggtgaagaacctggtgctgaccttccccctggagcccagcgtgctgctgctgacagacctgtactaccagaggctggccctgtgtggctgcaagggccccctgagccaggaggccctgatggagctgttccccaagctgcaggccaacatcagcactggagtgtccaagatccggctgctgaccatccgcatcctgaaccactttgatgtgcagctgcctgagagcatggaggatgatggcctgtctgagcggcagagcgtgtttgccatcctgcggcaggccgagctggtgcctgccaccgtgaatgactaccgggagaagctgctgcacctgaggaagctgcggcatgatgtggtgcagacagctgtgcctgatggccccctgcaggaggtgcccctgcgctacctgctgggcatgctgtacatcaacttcagcgccctgtgggaccccgtcatcgagctgatcagcagccacgcccacgagatggagaacaagcagttctggaaggtgtactatgagcacctggagaaggccgccacccacgccgagaaggagctgcagaatgacatgacagatgagaagtctgtgggagatgagagctgggagcagacccaggagggagatgtgggcgccctgtaccacgagcagctggccctgaagacagactgccaggagcggctggaccacaccaacttccgcttcctgctgtggagggccctgaccaagtttcctgagcgggtggagcccaggagccgggagctgagccccctcttcctgcgcttcatcaacaatgagtactacccagctgacctgcaggtggcccccacccaggacctgcggaggaagggcaagggcatggtggccgaggagattgaggaggagcctgctgctggagatgatgaggagctggaggaggaggccgtgccccaggatgagagcagccagaagaagaagacccggcgggctgctgccaagcagctgattgcccacctgcaggtgttcagcaagttcagcaacccccgggccctgtacctggagagcaagctgtatgagctgtacctgcagctgctgctgcaccaggaccagatggtgcagaagatcaccctggactgcatcatgacctacaagcacccccacgtgctgccctaccgggagaacctgcagaggctgctggaggaccgctccttcaaggaggagatcgtgcacttcagcatcagtgaagataatgctgtggtgaagacagcccacagagctgacctcttccccatcctgatgaggatcctgtatggccgcatgaagaacaagacaggcagcaagacccagggcaagagcgccagcggcaccaggatggccatcgtgctgcgcttcctggccggcacccagcctgaggagatccagatcttcctggacctgctgtttgagcctgtgcgccacttcaagaatggagagtgccacagcgctgtgatccaggccgtggaggacctggacctgagcaaggtgctgcccctgggccggcagcacggcatcctgaacagcctggagatcgtgctgaagaacatcagccacctgatcagcgcctacctgcccaagatcctgcagatcctgctgtgcatgacagccaccgtgagccacatcctggaccagcgggagaagatccagctgcgcttcatcaaccccctgaagaacctgcggcggctgggcatcaagatggtgacagacatcttcctggactgggagagctaccagttcagaacagaggagattgatgctgtgttccatggagctgtgtggccccagatcagccggctgggcagcgagagccagtacagccccacccccctgctgaagctgatcagcatctggagcagaaatgcccgctacttccccctgctggccaagcagaagccaggccacccagaatgtgacatcctgaccaacgtgtttgccatcctgagcgccaagaacctgagtgatgccacagccagcatcgtgatggacatcgtggatgacctgctgaacctgcctgactttgagcccacagagaccgtgctgaacctgctggtgacaggctgtgtgtacccaggcattgctgagaacatcggggagagcatcaccatcggcggccgcctcatcctgccccacgtgcctgccatcctgcagtacctgagcaagaccaccatctctgctgagaaggtgaagaagaagaagaacagagcccaggtgtccaaggagctgggcatcctgagcaagatcagcaagttcatgaaggacaaggagcagagctctgtgctgatcaccctgctgctgcccttcctgcaccggggcaacattgctgaggacacagaggtggacatcctggtgacagtgcagaacctgctgaagcactgtgtggaccccaccagcttcctgaagcccatcgccaagctgttcagcgtcatcaagaacaagctgagcaggaagctgctgtgcaccgtgtttgagaccctgagtgactttgagagcggcctgaagtacatcacagatgtggtgaagctgaatgcctttgaccagaggcacctggatgacatcaactttgatgtgcgctttgagaccttccagaccatcaccagctacatcaaggagatgcagatcgtggatgtgaactacctgatccctgtgatgcacaactgcttctacaacctggagctgggggacatgagcctgagtgacaatgcctccatgtgcctgatgagcatcatcaagaagctggccgccctgaatgtgacagagaaggactaccgggagatcatccacaggagcctgctggagaagctgaggaagggcctgaagagccagacagagagcatccagcaggactacaccaccatcctgagctgcctgatccagaccttccccaaccagctggagttcaaggacctggtgcagctgacccactaccatgaccctgagatggacttctttgagaacatgaagcacatccagatccacagaagagcccgggccctgaagaagctggccaagcagctgatggagggcaaggtggtgctgagcagcaagagcctgcagaactacatcatgccctatgccatgacccccatctttgatgagaagatgctgaagcatgagaacatcaccacagctgccacagagatcatcggggccatctgcaagcacctgtcctggagcgcctacatgtactacctgaagcacttcatccacgtgctgcagacaggccagatcaaccagaagctgggcgtgtccctgctggtgattgtgctggaggccttccactttgaccacaagaccctggaggagcagatgggcaagattgaaaatgaggagaatgccatcgaggccatcgagctgcctgagcctgaggccatggagctggagcgggtggatgaggaggagaaggagtacacctgcaagagcctgagtgacaatggccagcccggcaccccagaccctgctgacagcggcggcaccagcgccaaggagagcgagtgcatcaccaagcctgtgtccttcctgccccagaacaaggaggagattgaaagaaccatcaagaacatccagggcaccatcaccggggacatcctgccccggctgcacaagtgcctggccagcaccaccaagcgggaggaggagcacaagctggtgaagagcaaggtggtgaatgatgaggaggtggtgcgggtgcccctggcctttgccatggtgaagctgatgcagagcctgccccaggaggtgatggaggccaacctgcccagcatcctgctgaaggtgtgtgccctgctgaagaacagagcccaggagatccgggacatcgcccggagcaccctggccaagatcatcgaggacctgggcgtgcacttcctgctgtatgtgctgaaggagctgcagaccaccctggtgcggggctaccaggtgcacgtgctgaccttcaccgtgcacatgctgctgcagggcctgaccaacaagctgcaggtgggggacctggacagctgcctggacatcatgattgagatcttcaaccacgagctgtttggagctgtggccgaggagaaggaggtgaagcagatcctgagcaaggtgatggaggcccggcgcagcaagagctatgacagctatgagatcctgggcaagtttgtgggcaaggaccaggtgaccaagctgatcctgcccctgaaggagatcctgcagaacaccaccagcctgaagctggccaggaaggtgcatgagaccctgcggcgcatcaccgtgggcctcatcgtgaaccaggagatgacagctgagagcatcctgctgctgtcctatggcctcatcagcgagaacctgcccctgctgacagagaaggagaagaaccctgtggccccagccccagacccccggctgcccccccagagctgcctgctgctgccccccacccctgtgcggggcggccagaaggctgtggtgtccaggaagaccaacatgcacatcttcatcgagagcggcctgcggctgctgcacctgagcctgaagaccagcaagatcaagagcagtggagaatgtgtgctggagatgctggacccctttgtgtccctgctgattgactgcctgggctccatggatgtgaaggtgatcactggagccctgcagtgcctgatctgggtgctgcgcttccccctgcccagcattgagaccaaggccgagcagctgaccaagcacctgttcctgctgctgaaggactatgccaagctgggcgccgcccggggccagaacttccacctggtggtgaactgcttcaagtgtgtgaccatcctggtgaagaaggtgaagagctaccagatcacagagaagcagctgcaggtgctgctggcctatgcagaggaggacatctatgacaccagccggcaggccacagccttcggcctgctgaaggccatcctgagcaggaagctgctggtgcctgagattgatgaggtgatgaggaaggtgtccaagctggccgtgtctgcccagagcgagcccgcccgggtgcagtgccggcaggtgttcctgaagtacatcctggactaccccctgggggacaagctgcggcccaacctggagttcatgctggcccagctgaactatgagcacgagaccggccgggagagcaccctggagatgattgcctacctgtttgacaccttcccccagggcctgctgcacgagaactgtggcatgttcttcatccccctgtgcctgatgaccatcaatgatgattctgccacctgcaagaagatggcctccatgaccatcaagagcctgctgggcaagatcagcctggagaagaaggactggctgtttgacatggtgaccacctggtttggagccaagaagaggctgaaccggcagctggccgccctgatctgtggcctgtttgtggagagcgagggcgtggactttgagaagaggctgggcaccgtgctgcccgtcatcgagaaggagattgatcctgagaacttcaaggacatcatggaggagacagaggagaaggctgctgaccggctgctcttctccttcctgaccctcatcaccaagctgatcaaggagtgcaacatcatccagttcaccaagccagctgagaccctgagcaagatctggagccacgtgcacagccacctgcggcacccccacaactgggtgtggctgacagctgcccagatcttcggcctgctgtttgccagctgccagcctgaggagctgatccagaagtggaacaccaagaagaccaagaagcacctgcctgagcctgtggccatcaagttcctggccagtgacctggaccagaagatgaagagcatcagcctggccagctgccaccagctgcacagcaagttcctggaccagagcctgggggagcaggtggtgaagaacctgctgtttgctgccaaggtgctgtacctgctggagctgtactgtgaggacaagcagagcaagatcaaggaggacctggaggagcaggaggccctggaggatggagtggcctgtgctgatgagaaggccgagagtgatggagaggagaaggaggaggtgaaggaggagctgggccggcctgccaccctgctgtggctgatccagaagctgagcagaattgccaagctggaggccgcctacagccccaggaaccccctgaagaggacctgcatcttcaagttcctgggcgctgtggccatggacctgggcatcgacaaggtgaagccctacctgcccatgatcatcgcccccctcttccgggagctgaacagcacctacagcgagcaggaccccctgctgaagaacctgagccaggagatcatcgagctgctgaagaagctggtgggcctggagagcttcagcctggcctttgcctctgtgcagaagcaggccaatgagaagagggccctgaggaagaagaggaaggccctggagtttgtgaccaacccagacattgctgccaagaagaagatgaagaagcacaagaacaagtctgaggccaagaagaggaagattgagttcctgcggcccggctacaaggccaagaggcagaagagccacagcctgaaggacctggccatggtggagtag

SEQ ID NO: 175628 - DNA, 1440 bp, synthetic construct
  misc_feature 1..1440: note = Description of Artificial Sequence: Synthetic coding sequence
  source 1..1440: mol_type = other DNA
atggtgggccgcagcagaagaagaggagctgccaagtgggccgctgtgcgggccaaggccggccccaccctgacagatgaaaatggagatgacctgggcctgccccccagccctggggacaccagctactaccaggaccaggtggatgacttccacgaggcccggagccgggccgccctggccaagggctggaatgaggtgcagagcggagatgaagaagatggagaggaggaggaggaggaggtgctggccctggacatggatgatgaagatgatgaagatggcggcaatgctggggaggaggaggaggaggagaatgctgatgatgatggcggcagctctgtgcagagcgaggccgaggcctctgtggaccccagcctgtcctggggccagaggaagaagctgtactatgacacagattatggcagcaagagccggggccggcagagccagcaggaggccgaggaggaggagcgggaggaggaggaggaggcccagatcatccagaggcggctggcccaggccctgcaggaggatgactttggagtggcctgggtggaggcctttgccaagcctgtgccccaggtggatgaagctgagaccagggtggtgaaggacctggccaaggtgtctgtgaaggagaagctgaagatgctgaggaaggagagccctgagctgctggagctgattgaggacctgaaggtgaagctgacagaggtgaaggatgagctggagcccctgctggagctggtggagcagggcatcatccccccaggcaagggcagccagtacctgcggaccaagtacaacctgtacctgaactactgcagcaacatctccttctacctgatcctgaaggcccggcgggtgcctgcccacggccaccctgtgattgaaaggctggtgacctacagaaacctgatcaacaagctgtctgtggtggaccagaagctgagcagcgagatccgccacctgctgaccctgaaggatgatgctgtgaagaaggagctgatccccaaggccaagagcaccaagcccaagcccaagtctgtgtccaagaccagcgctgctgcctgtgctgtgacagacctgagtgatgacagcgactttgatgagaaggccaagctgaagtactacaaggagattgaagatcggcagaagctgaagaggaagaaggaggagaacagcacagaggagcaggccctggaggaccagaatgccaagagggccatcacctaccagatcgccaagaacagaggcctgacccccaggaggaagaagattgacaggaacccccgggtgaagcaccgggagaagttcagaagagccaagatcagaagaagaggccaggtgcgggaggtgaggaaggaggagcagcgctacagcggggagctgagcggcatccgggccggcgtgaagaagagcatcaagctgaagtag

SEQ ID NO: 175629 - DNA, 756 bp, synthetic construct
  misc_feature 1..756: note = Description of Artificial Sequence: Synthetic coding sequence
  source 1..756: mol_type = other DNA
tgaattggcctgatgagcctgagcaagggcctgctggaggagaagtaccgctacctgttcaaggaggtggccggccccacagagatgtgtgaccagaggcagctgggcctgctgctgcatgatgccatccagatcccccggcagctgggggaggtggccgcctttggaggcagcaacatcgagcccagcgtgcgcagctgcttccagcagaacaacaacaagccagagatctctgtgaaggagttcatcgactggatgcacctggagccccagagcatggtgtggctgcctgtgctgcaccgggtggccgctgctgagacagccaagcaccaggccaagtgcaacatctgcaaggaatgtcccatcgtgggcttccgctaccgcagcctgaagcacttcaactatgatgtgtgccagagctgcttcttcagcggccgcacagccaagggccacaagctgcactaccccatggtggagtactgcatccccaccaccagcggggaggatgtgcgggacttcaccaaggtgctgaagaacaagttccgcagcaagaagtactttgccaagcacccccggctgggctacctgcctgtgcagacagtgctggagggggacaacctggagacccccagccagagcccccagctgttccatgatgacacccacagcagaattgagcagtatgccacccggctggcccagatggagaggaccaacggcagcttcctgacagacagcagcagcaccaccggctag

SEQ ID NO: 175630 - DNA, 201 bp, synthetic construct
  misc_feature 1..201: note = Description of Artificial Sequence: Synthetic coding sequence
  source 1..201: mol_type = other DNA
atgattggcctgaacttcaacctgcgggagctgctgaccaagtttgagaaggacatccaggccgagattgatgcccacaatgacatcttcaagagcattgatggcaaccggcagaagatggtgaaggccctgggcaacagcgaggaggccaccatgctgcagcaccggctggatgacatgaaccagcgctggaatgactag

SEQ ID NO: 175631 - DNA, 2967 bp, synthetic construct
  misc_feature 1..2967: note = Description of Artificial Sequence: Synthetic coding sequence
  source 1..2967: mol_type = other DNA
atgcagatcctgcgctgcctgcagaagtgtgggaagctgaagatgatggctgtggtgaggaccagcctgcagaaggtggtggtgctgctgcaccggctgcagaggatggctgtgagcagcccccgctaccagaagctgtgcaaggacatccaggccgagattgatgcccacaatgacatcttcaagagcattgatggcaaccggcagaagatggtgaaggccctgggcaacagcgaggaggccaccatgctgcagcaccggctggatgacatgaaccagcgctggaatgacctgaaggccaagagcgccagcatccgggcccacctggaggccagcgctgagaagtggaaccggctgctgatgagcctggaggagctgatcaagtggctgaacatgaaggatgaggagctgaagaagcagatgcccatcggaggagatgtgcctgccctgcagctgcagtatgaccactgcaaggccctgcggcgggagctgaaggagaaggagtacagcgtgctgaatgctgtggaccaggcccgggtcttcctggccgaccagcccatcgaggcccctgaggagcccaggaggaacctgcagagcaagacagagctgaccccagaggagcgggcccagaagatcgccaaggccatgaggaagcagagcagcgaggtgaaggagaagtgggagagcctgaatgctgtgaccagcaactggcagaagcaggtggacaaggccctggagaagctgcgggacctgcagggcgccatggatgacctggatgctgacatgaaggaggccgagagcgtgagaaatggctggaagcctgtgggggacctgctgattgacagcctgcaggaccacatcgagaagatcatggccttccgggaggagatcgcccccatcaacttcaaggtgaagacagtgaatgacctgagcagccagctgagccccctggacctgcaccccagcctgaagatgagccggcagctggatgacctgaacatgcgctggaagctgctgcaggtgtctgtggatgaccggctgaagcagctgcaggaggcccaccgggactttggccccagcagccagcacttcctgagcacctctgtgcagctgccctggcagaggagcatcagccacaacaaggtgccctactacatcaaccaccagacccagaccacctgctgggaccaccccaagatgacagagctgttccagagcctggccgacctgaacaacgtgcgcttcagcgcctacagaacagccatcaagatccggcggctgcagaaggccctgtgcctggacctgctggagctgagcaccaccaatgagatcttcaagcagcacaagctgaaccagaatgaccagctgctgtctgtgcctgatgtgatcaactgcctgaccaccacctatgatggcctggagcagatgcacaaggacctggtgaatgtgcccctgtgtgtggacatgtgcctgaactggctgctgaatgtgtatgacaccggccgcacaggcaagatccgggtgcagagcctgaagattggcctgatgagcctgagcaagggcctgctggaggagaagtaccgctacctgttcaaggaggtggccggccccacagagatgtgtgaccagaggcagctgggcctgctgctgcatgatgccatccagatcccccggcagctgggggaggtggccgccttcggcggcagcaacatcgagcccagcgtgcgcagctgcttccagcagaacaacaacaagccagagatctctgtgaaggagttcatcgactggatgcacctggagccccagagcatggtgtggctgcctgtgctgcaccgggtggccgctgctgagacagccaagcaccaggccaagtgcaacatctgcaaggagtgccccatcgtgggcttccgctaccgcagcctgaagcacttcaactatgatgtgtgccagagctgcttcttcagcggccgcacagccaagggccacaagctgcactaccccatggtggagtactgcatccccaccaccagcggagaagatgtgcgggacttcaccaaggtgctgaagaacaagttccgcagcaagaagtactttgccaagcacccccggctgggctacctgcctgtgcagacagtgctggagggggacaacctggagacccccatcaccctcatctccatgtggccagagcactatgaccccagccagagcccccagctgttccatgatgacacccacagcagaattgagcagtatgccacccggctggcccagatggagaggaccaacggcagcttcctgacagacagcagcagcaccaccggctctgtggaggatgaacatgccctgatccagcagtactgccagaccctgggcggggagagccctgtgtcccagccccagagccctgcccagatcctgaagtctgtggagcgggaggagcggggggagctggagcgcatcatcgctgacctggaggaggagcagaggaacctgcaggtggagtatgagcagctgaaggaccagcacctgcggcggggcctgcctgtgggcagccccccagagagcatcatcagcccccaccacaccagtgaagattctgagctgattgctgaggccaagctgctgcggcagcacaagggccgcctggaggccaggatgcagatcctggaggaccacaacaagcagctggagagccagctgcaccggctgcggcagctgctggagcagcctgagagtgacagccgcatcaacggggtgagcccctgggccagcccccagcacagcgccctgagctacagcctggaccctgatgccagcggcccccagttccaccaggccgccggggaggacctgctggcccctcctcatgacaccagcacagacctgacagaggtgatggagcagatccacagcaccttccccagctgctgccccaacgtgcccagccggccccaggccatgtag

SEQ ID NO: 175632 - DNA, 3069 bp, synthetic construct
  misc_feature 1..3069: note = Description of Artificial Sequence: Synthetic coding sequence
  source 1..3069: mol_type = other DNA
atggccaagtacggggagcacgaggccagcccagacaatggccagaatgagttcagtgacatcatcaagagcagaagtgatgagcacaatgatgtgcagaagaagaccttcaccaagtggatcaatgcccgcttcagcaagagcggcaagccacccatcaatgacatgttcacagacctgaaggatggcaggaagctgctggacctgctggagggcctgaccggcaccagcctgcccaaggagcggggcagcaccagggtgcacgccctgaacaacgtgaacagagtgctgcaggtgctgcaccagaacaacgtggagctggtgaacatcggcggcacagacatcgtggatggcaaccacaagctgaccctgggcctgctgtggagcatcatcctgcactggcaggtgaaggatgtgatgaaggatgtgatgtctgacctgcagcagaccaacagcgagaagatcctgctgtcctgggtgcggcagaccacccggccctacagccaggtgaatgtgctgaacttcaccacctcctggacagatggcctggccttcaatgctgtgctgcaccgccacaagccagacctcttctcctgggacaaggtggtgaagatgagccccatcgagcggctggagcacgccttcagcaaggcccagacctacctgggcatcgagaagctgctggaccctgaagatgtggccgtgcagctgcctgacaagaagagcatcatcatgtacctgaccagcctgtttgaggtgctgccccagcaggtgaccattgatgccatccgggaggtggagaccctgcccaggaagtacaagaaggaatgtgaggaggaggccatcaacatccagagcacagcccctgaggaggagcacgagagccccagggctgagacccccagcacagtgacagaggtggacatggacctggacagctaccagatcgccctggaggaggtgctgacctggctgctgtctgctgaggacaccttccaggagcaggatgacatcagtgatgatgtggaggaggtgaaggaccagtttgccacccatgaggccttcatgatggagctgacagcccaccagagctctgtgggctctgtgctgcaggccggcaaccagctgatcacccagggcaccctgagtgatgaggaggagtttgagatccaggagcagatgaccctgctgaatgcccgctgggaggccctgcgggtggagagcatggaccggcagagccggctgcatgatgtgctgatggagctgcagaagaagcagctgcagcagctgagcgcctggctgaccctgacagaggagcgcatccagaagatggagacctgccccctggatgatgatgtgaagagcctgcagaagctgctggaggagcacaagagcctgcagagcgacctggaggccgagcaggtgaaggtgaacagcctgacccacatggtggtgattgtggatgaaaattctggagagagcgccacagccatcctggaggaccagctgcagaagctgggggagcgctggacagctgtgtgccgctggacagaggagcgctggaaccggctgcaggagatcaacatcctgtggcaggagctgctggaggagcagtgcctgctgaaggcctggctgacagagaaggaggaggccctgaacaaggtgcagaccagcaacttcaaggaccagaaggagctgtctgtgtctgtgcggcggctggccatcctgaaggaggacatggagatgaagaggcagaccctggaccagctgtctgaaattggccaggatgtgggccagctgctggacaacagcaaggccagcaagaagatcaacagcgacagcgaggagctgacccagcgctgggacagcctggtgcagaggctggaggacagcagcaaccaggtgacccaggccgtggccaagctgggcatgagccagatcccccagaaggacctgctggagaccgtgcgggtgcgggagcaggccatcaccaagaagagcaagcaggagctgcccccacctcctccacccaagaagaggcagatccacgtggacatcgaggccaagaagaagtttgatgccatctctgctgagctgctgaactggatcctgaagtggaagacagccatccagaccacagagatcaaggagtacatgaagatgcaggacaccagcgagatgaagaagaagctgaaggccctggagaaggagcagcgggagcgcatccccagggcagatgagctgaaccagacaggccagatcctggtggagcagatgggcaaggagggcctgcccacagaggagatcaagaatgtgctggagaaggtgagcagcgagtggaagaatgtgtcccagcacctggaggacctggagaggaagatccagctgcaggaggacatcaatgcctacttcaagcagctggatgagctggagaaggtgatcaagaccaaggaggagtgggtgaagcacaccagcatcagcgagagcagccggcagagcctgcccagcctgaaggacagctgccagcgggagctgaccaacctgctgggcctgcaccccaagattgagatggcccgggccagctgcagcgccctgatgagccagcccagcgccccagactttgtgcagaggggctttgacagcttcctgggccgctaccaggccgtgcaggaggccgtggaggaccggcagcagcacctggagaatgagctgaagggccagcccggccacgcctacctggagaccctgaagaccctgaaggatgtgctgaatgacagcgagaacaaggcccaggtgtccctgaatgtgctgaatgacctggccaaggtggagaaggccctgcaggagaagaagaccctggatgagatcctggagaaccagaagccagccctgcacaagctggccgaggagaccaaggccctggagaagaatgtgcacccagatgtggagaagctgtacaagcaggagtttgatgatgtgcagggcaagtggaacaagctgaaggtgctggtgtccaaggacctgcacctgctggaggagatcgccctgaccctgcgggcctttgaatag

SEQ ID NO: 175633 - DNA, 10302 bp, synthetic construct
  misc_feature 1..10302: note = Description of Artificial Sequence: Synthetic coding sequence
  source 1..10302: mol_type = other DNA
atggccaagtacggggagcacgaggccagcccagacaatggccagaatgagttcagtgacatcatcaagagcagaagtgatgagcacaatgatgtgcagaagaagaccttcaccaagtggatcaatgcccgcttcagcaagagcggcaagccacccatcaatgacatgttcacagacctgaaggatggcaggaagctgctggacctgctggagggcctgaccggcaccagcctgcccaaggagcggggcagcaccagggtgcacgccctgaacaacgtgaacagagtgctgcaggtgctgcaccagaacaacgtggagctggtgaacatcggcggcacagacatcgtggatggcaaccacaagctgaccctgggcctgctgtggagcatcatcctgcactggcaggtgaaggatgtgatgaaggatgtgatgtctgacctgcagcagaccaacagcgagaagatcctgctgtcctgggtgcggcagaccacccggccctacagccaggtgaatgtgctgaacttcaccacctcctggacagatggcctggccttcaatgctgtgctgcaccgccacaagccagacctcttctcctgggacaaggtggtgaagatgagccccatcgagcggctggagcacgccttcagcaaggcccagacctacctgggcatcgagaagctgctggaccctgaagatgtggccgtgcagctgcctgacaagaagagcatcatcatgtacctgaccagcctgtttgaggtgctgccccagcaggtgaccattgatgccatccgggaggtggagaccctgcccaggaagtacaagaaggaatgtgaggaggaggccatcaacatccagagcacagcccctgaggaggagcacgagagccccagggctgagacccccagcacagtgacagaggtggacatggacctggacagctaccagatcgccctggaggaggtgctgacctggctgctgtctgctgaggacaccttccaggagcaggatgacatcagtgatgatgtggaggaggtgaaggaccagtttgccacccatgaggccttcatgatggagctgacagcccaccagagctctgtgggctctgtgctgcaggccggcaaccagctgatcacccagggcaccctgagtgatgaggaggagtttgagatccaggagcagatgaccctgctgaatgcccgctgggaggccctgcgggtggagagcatggaccggcagagccggctgcatgatgtgctgatggagctgcagaagaagcagctgcagcagctgagcgcctggctgaccctgacagaggagcgcatccagaagatggagacctgccccctggatgatgatgtgaagagcctgcagaagctgctggaggagcacaagagcctgcagagcgacctggaggccgagcaggtgaaggtgaacagcctgacccacatggtggtgattgtggatgaaaattctggagagagcgccacagccatcctggaggaccagctgcagaagctgggggagcgctggacagctgtgtgccgctggacagaggagcgctggaaccggctgcaggagatcaacatcctgtggcaggagctgctggaggagcagtgcctgctgaaggcctggctgacagagaaggaggaggccctgaacaaggtgcagaccagcaacttcaaggaccagaaggagctgtctgtgtctgtgcggcggctggccatcctgaaggaggacatggagatgaagaggcagaccctggaccagctgtctgaaattggccaggatgtgggccagctgctggacaacagcaaggccagcaagaagatcaacagcgacagcgaggagctgacccagcgctgggacagcctggtgcagaggctggaggacagcagcaaccaggtgacccaggccgtggccaagctgggcatgagccagatcccccagaaggacctgctggagaccgtgcgggtgcgggagcaggccatcaccaagaagagcaagcaggagctgcccccacctcctccacccaagaagaggcagatccacgtggacatcgaggccaagaagaagtttgatgccatctctgctgagctgctgaactggatcctgaagtggaagacagccatccagaccacagagatcaaggagtacatgaagatgcaggacaccagcgagatgaagaagaagctgaaggccctggagaaggagcagcgggagcgcatccccagggcagatgagctgaaccagacaggccagatcctggtggagcagatgggcaaggagggcctgcccacagaggagatcaagaatgtgctggagaaggtgagcagcgagtggaagaatgtgtcccagcacctggaggacctggagaggaagatccagctgcaggaggacatcaatgcctacttcaagcagctggatgagctggagaaggtgatcaagaccaaggaggagtgggtgaagcacaccagcatcagcgagagcagccggcagagcctgcccagcctgaaggacagctgccagcgggagctgaccaacctgctgggcctgcaccccaagattgagatggcccgggccagctgcagcgccctgatgagccagcccagcgccccagactttgtgcagaggggctttgacagcttcctgggccgctaccaggccgtgcaggaggccgtggaggaccggcagcagcacctggagaatgagctgaagggccagcccggccacgcctacctggagaccctgaagaccctgaaggatgtgctgaatgacagcgagaacaaggcccaggtgtccctgaatgtgctgaatgacctggccaaggtggagaaggccctgcaggagaagaagaccctggatgagatcctggagaaccagaagccagccctgcacaagctggccgaggagaccaaggccctggagaagaatgtgcacccagatgtggagaagctgtacaagcaggagtttgatgatgtgcagggcaagtggaacaagctgaaggtgctggtgtccaaggacctgcacctgctggaggagatcgccctgaccctgcgggcctttgaagctgacagcaccgtcatcgagaagtggatggatggagtgaaggacttcctgatgaagcagcaggccgcccagggagatgatgctggcctgcagaggcagctggaccagtgcagcgcctttgtgaatgaaattgagaccatcgagagcagcctgaagaacatgaaggagattgagaccaacctgcggagcggccctgtggccggcatcaagacctgggtgcagacccggctgggggactaccagacccagctggagaagctgagcaaggagatcgccacccagaagagccggctgtctgagagccaggagaaggccgccaacctgaagaaggacctggccgagatgcaggagtggatgacccaggccgaggaggagtacctggagcgggactttgagtacaagagccctgaggagctggagagcgctgtggaggagatgaagagggccaaggaggatgtgctgcagaaggaggtgcgggtgaagatcctgaaggacaacatcaagctgctggccgccaaggtgcccagcggcggccaggagctgaccagcgagctgaatgtggtgctggagaactaccagctgctgtgcaaccgcatccggggcaagtgccacaccctggaggaggtgtggagctgctggattgagctgctgcactacctggacctggagaccacctggctgaacaccctggaggagaggatgaagagcacagaggtgctgcctgagaagacagatgctgtgaatgaggccctggagagcctggagagcgtgctgcggcaccctgctgacaacagaacccagatccgggagctgggccagaccctgattgatggcggcatcctggatgacatcatcagcgagaagctggaggccttcaacagccgctatgaggacctgagccacctggccgagagcaagcagatcagcctggagaagcagctgcaggtgctgcgggagacagaccagatgctgcaggtgctgcaggagagcctgggggagctggacaagcagctgaccacctacctgacagacagaattgatgccttccaggtgccccaggaggcccagaagatccaggccgagatcagcgcccacgagctgaccctggaggagctgcggaggaacatgaggagccagcccctgaccagccctgagagcaggacagcccggggcggcagccagatggatgtgctgcagaggaagctgcgggaggtgtccaccaagttccagctgttccagaagccagccaactttgagcagaggatgctggactgcaagagggtgctggatggagtgaaggccgagctgcacgtgctggatgtgaaggatgtggaccctgatgtgatccagacccacctggacaagtgcatgaagctgtacaagaccctgtctgaggtgaagctggaggtggagaccgtcatcaagacaggccgccacatcgtgcagaagcagcagacagacaaccccaagggcatggatgagcagctgaccagcctgaaggtgctgtacaatgacctgggcgcccaggtgacagagggcaagcaggacctggagcgggccagccagctggccaggaagatgaagaaggaggccgccagcctgtctgagtggctgagcgccacagaaacagagctggtgcagaagagcaccagcgagggcctgctgggggacctggacacagagatctcctgggccaagaatgtgctgaaggacctggagaagaggaaggctgacctgaacaccatcacagagagcagcgctgccctgcagaacctgattgagggcagcgagcccatcctggaggagcggctgtgtgtgctgaatgccggctggagccgggtgaggacctggacagaggactggtgcaacaccctgatgaaccaccagaaccagctggagatctttgatggaaatgtggcccacatcagcacctggctgtaccaggccgaggccctgctggatgaaattgagaagaagcccaccagcaagcaggaggagatcgtgaagaggctggtgtctgagctggatgatgccaacctgcaggtggagaatgtgcgggaccaggccctgatcctgatgaatgcccggggcagcagcagccgggagctggtggagcccaagctggccgagctgaacagaaactttgagaaggtgtcccagcacatcaagagcgccaagctgctgattgcccaggagcccctgtaccagtgcctggtgaccacagagacctttgagaccggggtgcccttcagtgacctggagaagctggagaatgacatcgagaacatgctgaagtttgtggagaagcacctggagagcagtgatgaagatgagaagatggatgaggagagcgcccagatcgaggaggtgctgcagagaggagaggagatgctgcaccagcccatggaggacaacaagaaggagaagatccggctgcagctgctgctgctgcacacccgctacaacaagatcaaggccatccccatccagcagaggaagatgggccagctggccagcggcatccgcagcagcctgctgcccacagactacctggtggagatcaacaagatcctgctgtgcatggatgatgtggagctgagcctgaatgtgcctgagctgaacacagccatctatgaggacttctccttccaggaggacagcctgaagaacatcaaggaccagctggacaagctgggggagcagattgctgtgatccacgagaagcagccagatgtgatcctggaggccagcggccctgaggccatccagatccgggacaccctgacccagctgaatgccaagtgggaccgcatcaacaggatgtacagcgacaggaagggctgctttgaccgggccatggaggagtggaggcagttccactgtgacctgaatgacctgacccagtggatcacagaagctgaggagctgctggtggacacctgtgcccctgggggcagcctggacctggagaaggcccgcatccaccagcaggagctggaggtgggcatcagcagccaccagcccagctttgctgccctgaacagaactggagatggcatcgtgcagaagctgagccaggctgatggcagcttcctgaaggagaagctggccggcctgaaccagcgctgggatgccatcgtggccgaggtgaaggaccggcagccccggctgaagggggagagcaagcaggtgatgaagtaccgccaccagctggatgagatcatctgctggctgaccaaggccgagcacgccatgcagaagaggagcaccacagagctgggggagaacctgcaggagctgcgggacctgacccaggagatggaggtgcatgctgagaagctgaagtggctgaacagaacagagctggagatgctgagtgacaagagcctgagcctgcctgagcgggacaagatcagcgagagcctgaggacagtgaacatgacctggaacaagatctgccgggaggtgcccaccaccctgaaggagtgcatccaggagcccagctctgtgtcccagaccagaattgctgcccaccccaacgtgcagaaggtggtgctggtgtcctctgccagtgacatccctgtgcagagccacaggaccagcgagatcagcatcccagctgacctggacaagaccatcacagagctggccgactggctggtgctgattgaccagatgctgaagagcaacatcgtgacagtgggagatgtggaggagatcaacaagacagtgtccaggatgaagatcaccaaggctgacctggagcagaggcacccccagctggactatgtgttcaccctggcccagaacctgaagaacaaggccagcagcagtgacatgaggacagccatcacagagaagctggagcgggtgaagaaccagtgggatggcacccagcacggcgtggagctgcggcagcagcagctggaggacatgatcatcgacagcctgcagtgggatgaccaccgggaggagacagaggagctgatgaggaaatatgaggcccggctgtacatcctgcagcaggcccggcgggaccccctgaccaagcagatcagtgacaaccagatcctgctgcaggagctgggccctggagatggcatcgtgatggcctttgacaacgtgctgcagaagctgctggaggagtatggcagtgatgacaccagaaatgtgaaggagaccacagagtacctgaagacctcctggatcaacctgaagcagagcattgctgaccggcagaatgccctggaggccgagtggaggacagtgcaggccagcagaagagacctggagaacttcctgaagtggatccaggaggccgagaccaccgtgaatgtgctggtggatgccagccaccgggagaatgccctgcaggacagcatcctggcccgggagctgaagcagcagatgcaggacatccaggccgagattgatgcccacaatgacatcttcaagagcattgatggcaaccggcagaagatggtgaaggccctgggcaacagcgaggaggccaccatgctgcagcaccggctggatgacatgaaccagcgctggaatgacctgaaggccaagagcgccagcatccgggcccacctggaggccagcgctgagaagtggaaccggctgctgatgagcctggaggagctgatcaagtggctgaacatgaaggatgaggagctgaagaagcagatgcccatcggaggagatgtgcctgccctgcagctgcagtatgaccactgcaaggccctgcggcgggagctgaaggagaaggagtacagcgtgctgaatgctgtggaccaggcccgggtcttcctggccgaccagcccatcgaggcccctgaggagcccaggaggaacctgcagagcaagacagagctgaccccagaggagcgggcccagaagatcgccaaggccatgaggaagcagagcagcgaggtgaaggagaagtgggagagcctgaatgctgtgaccagcaactggcagaagcaggtggacaaggccctggagaagctgcgggacctgcagggcgccatggatgacctggatgctgacatgaaggaggccgagagcgtgagaaatggctggaagcctgtgggggacctgctgattgacagcctgcaggaccacatcgagaagatcatggccttccgggaggagatcgcccccatcaacttcaaggtgaagacagtgaatgacctgagcagccagctgagccccctggacctgcaccccagcctgaagatgagccggcagctggatgacctgaacatgcgctggaagctgctgcaggtgtctgtggatgaccggctgaagcagctgcaggaggcccaccgggactttggccccagcagccagcacttcctgagcacctctgtgcagctgccctggcagaggagcatcagccacaacaaggtgccctactacatcaaccaccagacccagaccacctgctgggaccaccccaagatgacagagctgttccagagcctggccgacctgaacaacgtgcgcttcagcgcctacagaacagccatcaagatccggcggctgcagaaggccctgtgcctggacctgctggagctgagcaccaccaatgagatcttcaagcagcacaagctgaaccagaatgaccagctgctgtctgtgcctgatgtgatcaactgcctgaccaccacctatgatggcctggagcagatgcacaaggacctggtgaatgtgcccctgtgtgtggacatgtgcctgaactggctgctgaatgtgtatgacaccggccgcacaggcaagatccgggtgcagagcctgaagattggcctgatgagcctgagcaagggcctgctggaggagaagtaccgctacctgttcaaggaggtggccggccccacagagatgtgtgaccagaggcagctgggcctgctgctgcatgatgccatccagatcccccggcagctgggggaggtggccgcctttggaggcagcaacatcgagcccagcgtgcgcagctgcttccagcagaacaacaacaagccagagatctctgtgaaggagttcatcgactggatgcacctggagccccagagcatggtgtggctgcctgtgctgcaccgggtggccgctgctgagacagccaagcaccaggccaagtgcaacatctgcaaggaatgtcccatcgtgggcttccgctaccgcagcctgaagcacttcaactatgatgtgtgccagagctgcttcttcagcggccgcacagccaagggccacaagctgcactaccccatggtggagtactgcatccccaccaccagcggggaggatgtgcgggacttcaccaaggtgctgaagaacaagttccgcagcaagaagtactttgccaagcacccccggctgggctacctgcctgtgcagacagtgctggagggggacaacctggagacccccatcaccctcatctccatgtggccagagcactatgaccccagccagagcccccagctgttccatgatgacacccacagccgcatcgagcagtatgccacccggctggcccagatggagaggaccaacggcagcttcctgacagacagcagcagcaccactggatctgtggaggatgagcacgccctgatccagcagtactgccagaccctgggcggggagagccctgtgtcccagccccagagccctgcccagatcctgaagtctgtggagcgggaggagcggggggagctggagcgcatcatcgctgacctggaggaggagcagaggaacctgcaggtggagtatgagcagctgaaggaccagcacctgcggcggggcctgcctgtgggcagccccccagagagcatcatcagcccccaccacaccagcgaggacagcgagctgattgctgaggccaagctgctgcggcagcacaagggccgcctggaggccaggatgcagatcctggaggaccacaacaagcagctggagagccagctgcaccggctgcggcagctgctggagcagcctgagagtgacagccgcatcaatggagtgagcccctgggccagcccccagcacagcgccctgagctacagcctggaccctgatgccagcggcccccagttccaccaggccgccggggaggacctgctggcccctcctcatgacaccagcacagacctgacagaggtgatggagcagatccacagcaccttccccagctgctgccccaacgtgcccagccggccccaggccatgtag

SEQ ID NO: 175634 - DNA, 555 bp, synthetic construct
  misc_feature 1..555: note = Description of Artificial Sequence: Synthetic coding sequence
  source 1..555: mol_type = other DNA
atgcacctggagccccagagcatggtgtggctgcctgtgctgcaccgggtggccgctgctgagacagccaagcaccaggccaagtgcaacatctgcaaggagtgccccatcgtgggcttccgctaccgcagcctgaagcacttcaactatgatgtgtgccagagctgcttcttcagcggccgcacagccaagggccacaagctgcactaccccatggtggagtactgcatccccaccaccagcggagaagatgtgcgggacttcaccaaggtgctgaagaacaagttccgcagcaagaagtactttgccaagcacccccggctgggctacctgcctgtgcagacagtgctggagggggacaacctggagacccccagccagagcccccagctgttccatgatgacacccacagccgcatcgagcagtatgccacccggctggcccagatggagaggaccaacggcagcttcctgacagacagcagcagcaccactggatctgtggaggatgagcacgccctgatccagcagtactgccagaccctgggcggctag

SEQ ID NO: 175635 - DNA, 462 bp, synthetic construct
  misc_feature 1..462: note = Description of Artificial Sequence: Synthetic coding sequence
  source 1..462: mol_type = other DNA
atgagcggcctggccgccaccaccttccactggaagaagtgccgcctggacctgcccggccacgtggccctgcaggcctgcaagaggctgcctgatgagcacaatgatgtgcagaagaagaccttcaccaagtggatcaatgcccgcttcagcaagagcggcaagccacccatcaatgacatgttcacagacctgaaggatggcaggaagctgctggacctgctggagggcctgaccggcaccagcctgcccaaggagcggggcagcaccagggtgcacgccctgaacaacgtgaacagagtgctgcaggtgctgcaccagaacaacgtggagctggtgaacattggaggaacagacatcgtggatggcaaccacaagctgaccctgggcctgctgtggagcatcatcctgcactggcaggtggatgtgatgaaggatgtgatgtctgacctgcagcagtag

SEQ ID NO: 175636 - DNA, 546 bp, synthetic construct
  misc_feature 1..546: note = Description of Artificial Sequence: Synthetic coding sequence
  source 1..546: mol_type = other DNA
atgcacctggagccccagagcatggtgtggctgcctgtgctgcaccgggtggccgctgctgagacagccaagcaccaggccaagtgcaacatctgcaaggagtgccccatcgtgggcttccgctaccgcagcctgaagcacttcaactatgatgtgtgccagagctgcttcttcagcggccgcacagccaagggccacaagctgcactaccccatggtggagtactgcatccccaccaccagcggagaagatgtgcgggacttcaccaaggtgctgaagaacaagttccgcagcaagaagtactttgccaagcacccccggctgggctacctgcctgtgcagacagtgctggagggggacaacctggagacccccatcaccctcatctccatgtggccagagcactatgaccccagccagagcccccagctgttccatgatgacacccacagcagaattgagcagtatgccacccggctggcccagatggagaggaccaacggcagcttcctgacagacagcagcagcaccaccggctctgtgtag

SEQ ID NO: 175637 - DNA, 144 bp, synthetic construct
  misc_feature 1..144: note = Description of Artificial Sequence: Synthetic coding sequence
  source 1..144: mol_type = other DNA
atggccaagtacggggagcacgaggccagcccagacaatggccagaatgagttcagtgacatcatcaagagcagaagtgatgagcacaatgatgtgcagaagaagaccttcaccaagtggatcaatgcccgcttcagcaagtag

SEQ ID NO: 175638 - DNA, 561 bp, synthetic construct
  misc_feature 1..561: note = Description of Artificial Sequence: Synthetic coding sequence
  source 1..561: mol_type = other DNA
atgctggaggaggaggagtggtaccgcagcctgaagcacttcaactatgatgtgtgccagagctgcttcttcagcggccgcacagccaagggccacaagctgcactaccccatggtggagtactgcatccccaccaccagcggagaagatgtgcgggacttcaccaaggtgctgaagaacaagttccgcagcaagaagtactttgccaagcacccccggctgggctacctgcctgtgcagacagtgctggagggggacaacctggagacccccagccagagcccccagctgttccatgatgacacccacagccgcatcgagcagtatgccacccggctggcccagatggagaggaccaacggcagcttcctgacagacagcagcagcaccactggatctgtggaggatgagcacgccctgatccagcagtactgccagaccctgggcggggagagccctgtgtcccagccccagagccctgcccagatcctgaagtctgtggagcgggaggagcggggggagctggagcgcatcatcgctgacctggaggaggagcagtag

SEQ ID NO: 175639 - DNA, 201 bp, synthetic construct; identical to SEQ ID NO: 175630
  misc_feature 1..201: note = Description of Artificial Sequence: Synthetic coding sequence
  source 1..201: mol_type = other DNA

SEQ ID NO: 175640 - DNA, 555 bp, synthetic construct; identical to SEQ ID NO: 175634
  misc_feature 1..555: note = Description of Artificial Sequence: Synthetic coding sequence
  source 1..555: mol_type = other DNA

SEQ ID NO: 175641 - DNA, 2100 bp, synthetic construct
  misc_feature 1..2100: note = Description of Artificial Sequence: Synthetic coding sequence
  source 1..2100: mol_type = other DNA
atgtctgccagcgcctctgtgggcggccctgtgccccagcccccacctggccctgctgctgccctgcccccaggcagcgctgcccgggccctgcacgtggagctgcccagccagcagaggcggctgcggcacctgaggaacattgctgccagaaatattgtgaacagaaatggccaccagctgctggacacctacttcaccctgcacctgtgcagcacagagaagatctacaaggagttctacagaagtgaggtgatcaagaacagcctgaaccccacctggaggagcctggactttggcatcatgccagaccggctggacacctctgtgtcctgctttgtggtgaagatctggggcggcaaggagaacatctaccagctgctgattgagtggaaggtgtgcctggatggcctgaagtacctgggccagcagatccacgccaggaaccagaatgagatcatcttcggcctgaatgatggctactacggggccccctttgagcacaagggctacagcaatgcccagaagaccatcctgctgcaggtggaccagaactgtgtgaggaacagctatgatgtgttcagcctgctgcggctgcaccgggcccagtgtgccatcaagcagacccaggtgacagtgcagaagattggcaaggagattgaggagaagctgcggctgaccagcaccagcaatgagctgaagaagaagtctgagtgcctgcagctgaagatcctggtgctgcagaatgagctggagcggcagaagaaggccctgggccgggaggtggccctgctgcacaagcagcagatcgccctgcaggacaagggcagcgccttctctgctgagcacctgaagctgcagctgcagaaggagagcctgaatgagctgaggaaagaatgtacagccaagcgggagctgttcctgaagaccaatgcccagctgaccatccgctgccggcagctgctgtctgagctgagctacatctaccccatcgacctgaatgagcacaaggactactttgtgtgtggggtgaagctgcccaacagcgaggacttccaggccaaggatgatggcagcattgctgtggccctgggctacacagcccacctggtgtccatgatctccttcttcctgcaggtgcccctgcgctaccccatcatccacaagggcagccgcagcaccatcaaggacaacatcaatgacaagctgacagagaaggagcgggagttccccctgtaccccaagggcggggagaagctgcagtttgattatggagtgtacctgctgaacaagaacatcgcccagctgcgctaccagcacggcctgggcaccccagacctgcggcagaccctgcccaacctgaagaacttcatggagcacggcctgatggtgcgctgtgacagacaccacaccagcagcgccatccctgtgcccaagaggcagagcagcatctttggaggagcagatgtgggcttcagcggcggcatccccagcccagacaagggccacaggaagagggccagcagtgaaaatgaaaggctgcagtacaagaccccaccacccagctacaacagcgccctggcccagcctgtgaccaccgtgcccagcatgggagaaacagagaggaagatcaccagcctgagcagcagcctggacaccagcctggacttcagcaaggagaacaagaagaagggggaggacctggtgggcagcctgaatggaggccacgccaacgtgcaccccagccaggagcagggcgaggccctgagcggccaccgggccaccgtgaatggcaccctgctgcccagcgagcaggccggcagcgcctctgtgcagctgcccggggagttccaccctgtgtctgaggccgagctgtgctgcaccgtggagcaggccgaggagatcatcggcctggaggccactggatttgccagcggggaccagctggaggccttcaactgcatccctgtggacagcgctgtggccgtggagtgtgatgagcaggtgctgggggagtttgaggagttcagccgccgcatctatgccctgaatgaaaatgtgtcctccttcagaagaccccggcgcagcagtgacaagtag

SEQ ID NO: 175642 - DNA, 768 bp, synthetic construct
  misc_feature 1..768: note = Description of Artificial Sequence: Synthetic coding sequence
  source 1..768: mol_type = other DNA
atgttcatctctgtggcccagaggcagagagaaaatgccttcagctgcagcaccttcctgcgctgtgacagacaccacaccagcagcgccatccctgtgcccaagaggcagagcagcatctttggaggagcagatgtgggcttcagcggcggcatccccagcccagacaagggccacaggaagagggccagcagtgaaaatgaaaggctgcagtacaagaccccaccacccagctacaacagcgccctggcccagcctgtgaccaccgtgcccagcatgggagaaacagagaggaagatcaccagcctgagcagcagcctggacaccagcctggacttcagcaaggagaacaagaagaagggggaggacctggtgggcagcctgaatggaggccacgccaacgtgcaccccagccaggagcagggcgaggccctgagcggccaccgggccaccgtgaatggcaccctgctgcccagcgagcaggccggcagcgcctctgtgcagctgcccggggagttccaccctgtgtctgaggccgagctgtgctgcaccgtggagcaggccgaggagatcatcggcctggaggccactggatttgccagcggggaccagctggaggccttcaactgcatccctgtggacagcgctgtggccgtggagtgtgatgagcaggtgctgggggagtttgaggagttcagccgccgcatctatgccctgaatgaaaatgtgtcctccttcagaagaccccggcgcagcagtgacaagtag

SEQ ID NO: 175643 - DNA, 984 bp, synthetic construct
  misc_feature 1..984: note = Description of Artificial Sequence: Synthetic coding sequence
  source 1..984: mol_type = other DNA
atgatctccttcttcctgcaggtgcccctgcgctaccccatcatccacaagggcagccgcagcaccatcaaggacaacatcaatgacaagctgacagagaaggagcgggagttccccctgtaccccaagggcggggagaagctgcagtttgattatggagtgtacctgctgaacaagaacatcgcccagctgcgctaccagcacggcctgggcaccccagacctgcggcagaccctgcccaacctgaagaacttcatggagcacggcctgatggtgcgctgtgacagacaccacaccagcagcgccatccctgtgcccaagaggcagagcagcatctttggaggagcagatgtgggcttcagcggcggcatccccagcccagacaagggccacaggaagagggccagcagtgaaaatgaaaggctgcagtacaagaccccaccacccagctacaacagcgccctggcccagcctgtgaccaccgtgcccagcatgggagaaacagagaggaagatcaccagcctgagcagcagcctggacaccagcctggacttcagcaaggagaacaagaagaagggggaggacctggtgggcagcctgaatggaggccacgccaacgtgcaccccagccaggagcagggcgaggccctgagcggccaccgggccaccgtgaatggcaccctgctgcccagcgagcaggccggcagcgcctctgtgcagctgcccggggagttccaccctgtgtctgaggccgagctgtgctgcaccgtggagcaggccgaggagatcatcggcctggaggccactggatttgccagcggggaccagctggaggccttcaactgcatccctgtggacagcgctgtggccgtggagtgtgatgagcaggtgctgggggagtttgaggagttcagccgccgcatctatgccctgaatgaaaatgtgtcctccttcagaagaccccggcgcagcagtgacaagtag

SEQ ID NO: 175644 - DNA, 4251 bp, synthetic construct
  misc_feature 1..4251: note = Description of Artificial Sequence: Synthetic coding sequence
  source 1..4251: mol_type = other DNA
atgaagagcctgaagagccggctgcggcggcaggatgtgcccggccctgccagcagtggagctgctgctgccagcgcccacgccgctgactggaacaagtatgatgaccggctgatgaaggctgctgagagaggagatgtggagaaggtgaccagcatcctggccaagaagggcgtgaaccctgggaagctggatgtggagggccgcagcgtcttccacgtggtgaccagcaagggcaacctggagtgcctgaatgccatcctgatccacggcgtggacatcaccaccagtgacacagctggaagaaatgccctgcacctggccgccaagtatggccacgccctgtgcctgcagaagctgctgcagtacaactgccccacagaacatgctgacctgcagggccgcacagccctgcatgatgctgccatggctgactgccccagcagcatccagctgctgtgtgaccacggggcctctgtgaatgccaaggatgtggatggccgcacccccctggtgctggccacccagatgagccggcccaccatctgccagctgctgattgacagaggagcagatgtgaacagccgggacaagcagaacagaacagccctgatgctgggctgtgaatatggctgcagagatgctgtggaggtgctgatcaagaatggagctgacatcagcctgctggatgccctgggccatgacagcagctactatgcccgcatcggggacaacctggacatcctgaccctgctgaagacagccagcgagaacaccaacaagggccgggagctgtggaagaagggccccagcctgcagcagaggaacctgacccacatgcaggatgaggtgaatgtgaagagccaccagcgggagcaccagaacatccaggacctggagattgaaaatgaagacctgaaggagcggctgaggaagatccagcaggagcagaggatcctgctggacaaggtgaatggcctgcagctgcagctgaatgaggaggtgatggtggctgatgacctggagagcgagcgggagaagctgaagagcctgctggccgccaaggagaagcagcacgaggagagcctgcggaccatcgaggccctgaagaaccgcttcaagtactttgaaagtgaccacctgggcagcggcagccacttcagcaacaggaaggaggacatgctgctgaagcagggccagatgtacatggctgacagccagtgcaccagccctggcatcccagcccacatgcagagccgctccatgctgcggcccctggagctgagcctgcccagccagaccagctacagtgaaaatgagatcctgaagaaggagctggaggccatgaggaccttctgtgagagcgccaagcaggaccggctgaagctgcagaatgagctggcccacaaggtggccgagtgcaaggccctggccctggagtgtgagcgggtgaaggaggacagtgatgagcagatcaagcagctggaggatgccctgaaggatgtgcagaagaggatgtatgaaagtgagggcaaggtgaagcagatgcagacccacttcctggccctgaaggagcacctgaccagcgaggccgccagcggcaaccaccggctgacagaggagctgaaggaccagctgaaggacctgaaggtgaagtatgaaggagccagcgctgaggtgggcaagctgaggaaccagatcaagcagaatgagatgattgtggaggagttcaagagagatgagggcaagctgattgaggagaacaagaggctgcagaaggagctgtccatgtgtgagatggagcgggagaagaagggcaggaaggtgacagagatggagggccaggccaaggagctgagcgccaagctggccctgagcatcccagctgagaagtttgagaacatgaagagcagcctgagcaatgaggtgaatgagaaggccaagaagctggtggagatggagcgggagcacgagaagagcctgtctgagatccggcagctgaagcgggagctggagaatgtgaaggccaagctggcccagcacgtgaagccagaggagcacgagcaggtgaagagccggctggagcagaagagcggggagctgggcaagaagatcacagagctgaccctgaagaaccagaccctgcagaaggagattgagaaggtgtacctggacaacaagctgctgaaggagcaggcccacaacctgaccatcgagatgaagaaccactacgtgcccctgaaggtgtctgaggacatgaagaagagccatgatgccatcattgatgacctgaacaggaagctgctggatgtgacccagaagtacacagagaagaagctggagatggagaagctgctgctggagaatgacagcctgagcaaggatgtgtcccggctggagaccgtgtttgtgcccccagagaagcatgagaaggagatcatcgccctgaagagcaacatcgtggagctgaagaagcagctgtctgagctgaagaagaagtgtggggaggaccaggagaagatccacgccctgaccagcgagaacaccaacctgaagaagatgatgagcaaccagtatgtgcctgtgaagacccatgaggaggtgaagatgaccctgaatgacaccctggccaagaccaaccgggagctgctggatgtgaagaagaagtttgaggacatcaaccaggagtttgtgaagatcaaggacaagaatgagatcctgaagaggaacctggagaacacccagaaccagatcaaggccgagtacatcagcctggccgagcacgaggccaagatgagcagcctgagccagagcatgaggaaggtgcaggacagcaatgctgagatcctggccaactacaggaagggccaggaggagatcgtgaccctgcatgctgagatcaaggcccagaagaaggagctggacaccatccaggagtgcatcaaggtgaagtatgcccccatcgtgtcctttgaagaatgtgagaggaagttcaaggccacagagaaggagctgaaggaccagctgtctgagcagacccagaagtacagcgtgtctgaggaggaggtgaagaagaacaagcaggagaatgacaagctgaagaaggagatcttcaccctgcagaaggacctgcgggacaagacagtgctgattgagaagagccatgagatggagcgggccctgagcaggaagacagatgagctgaacaagcagctgaaggacctgagccagaagtacacagaggtgaagaatgtgaaggagaagctggtggaggagaatgccaagcagaccagcgagatcctggccgtgcagaacctgctgcagaagcagcacgtgcccctggagcaggtggaggccctgaagaagagcctgaatggcaccatcgagaacctgaaggaggagctgaagtccatgcagcgctgctatgagaaggagcagcagacagtgaccaagctgcaccagctgctggagaaccagaagaacagctctgtgcccctggccgagcacctgcagatcaaggaggcctttgagaaggaggtgggcatcatcaaggccagcctgcgggagaaggaggaggagagccagaacaagatggaggaggtgtccaagctgcagagcgaggtgcagaacaccaagcaggccctgaagaagctggagacccgggaggtggtggacctgagcaagtacaaggccaccaagagtgacctggagacccagatcagcagcctgaatgagaagctggccaacctgaacagaaaatatgaggaggtgtgtgaggaggtgctgcacgccaagaagaaggagatcagcgccaaggatgagaaggagctgctgcacttcagcattgagcaggagatcaaggaccagaaggagcgctgtgacaagagcctgaccaccatcacagagctgcagaggcgcatccaggagagcgccaagcagatcgaggccaaggacaacaagatcacagagctgctgaatgatgtggagcggctgaagcaggccctgaatggcctgagccagctgacctacaccagcggcaaccccaccaagaggcagagccagctgattgacaccctgcagcaccaggtgaagagcctggagcagcagctggctgatgctgaccggcagcaccaggaggtgattgccatctaccgcacccacctgctgtctgctgcccagggccacatggatgaagatgtgcaggaggccctgctgcagatcatccagatgaggcagggcctggtgtgctag

SEQ ID NO: 175645 - DNA, 4212 bp, synthetic construct
  misc_feature 1..4212: note = Description of Artificial Sequence: Synthetic coding sequence
  source 1..4212: mol_type = other DNA
atgatgaactgctggttcagctgcacccccaagaacagacatgctgctgactggaacaagtatgatgaccggctgatgaaggctgctgagagaggagatgtggagaaggtgaccagcatcctggccaagaagggcgtgaaccctgggaagctggatgtggagggccgctctgtgttccacgtggtgaccagcaaaggaaacctggagtgcctgaatgccatcctgattcatggagtggacatcaccaccagtgacacagctggaagaaatgccctgcacctggccgccaagtatggccacgccctgtgcctgcagaagctgctgcagtacaactgccccacagagcacgccgacctgcagggccgcacagccctgcatgatgctgccatggctgactgccccagcagcatccagctgctgtgtgaccatggagcctctgtgaatgccaaggatgtggatggccgcacccccctggtgctggccacccagatgagccggcccaccatctgccagctgctgattgacagaggagcagatgtgaacagccgggacaagcagaacagaacagccctgatgctgggctgtgaatatggctgcagagatgctgtggaggtgctgatcaagaatggagctgacatcagcctgctggatgccctgggccatgacagcagctactatgccagaattggagacaacctggacatcctgaccctgctgaagacagccagcgagaacaccaacaagggccgggagctgtggaagaagggccccagcctgcagcagaggaacctgacccacatgcaggatgaggtgaatgtgaagagccaccagcgggagcaccagaacatccaggacctggagattgaaaatgaagacctgaaggagcggctgaggaagatccagcaggagcagaggatcctgctggacaaggtgaatggcctgcagctgcagctgaatgaggaggtgatggtggctgatgacctggagagcgagcgggagaagctgaagagcctgctggccgccaaggagaagcagcacgaggagagcctgcggaccatcgaggccctgaagaaccgcttcaagtactttgaaagtgaccacctgggcagcggcagccacttcagcaacagaaaagaagacatgctgctgaagcagggccagatgtacatggctgacagccagtgcaccagccctggcatcccagcccacatgcagagccgctccatgctgcggcccctggagctgagcctgcccagccagaccagctacagtgaaaatgagatcctgaagaaggagctggaggccatgaggaccttctgtgagagcgccaagcaggaccggctgaagctgcagaatgagctggcccacaaggtggccgagtgcaaggccctggccctggagtgtgagcgggtgaaggaggacagtgatgagcagatcaagcagctggaggatgccctgaaggatgtgcagaagaggatgtatgagagcgagggcaaggtgaagcagatgcagacccacttcctggccctgaaggagcacctgaccagcgaggccgccagcggcaaccaccggctgacagaggagctgaaggaccagctgaaggacctgaaggtgaagtatgagggcgccagcgctgaggtgggcaagctgaggaaccagatcaagcagaatgagatgattgtggaggagttcaagagagatgagggcaagctgattgaggagaacaagaggctgcagaaggagctgtccatgtgtgagatggagcgggagaagaagggcaggaaggtgacagagatggagggccaggccaaggagctgagcgccaagctggccctgagcatcccagctgagaagtttgagaacatgaagagcagcctgagcaatgaggtgaatgagaaggccaagaagctggtggagatggagcgggagcacgagaagagcctgtctgagatccggcagctgaagcgggagctggagaatgtgaaggccaagctggcccagcacgtgaagccagaggagcacgagcaggtgaagagccggctggagcagaagtctggagagctgggcaagaagatcacagagctgaccctgaagaaccagaccctgcagaaggagattgagaaggtgtacctggacaacaagctgctgaaggagcaggcccacaacctgaccatcgagatgaagaaccactacgtgcccctgaaggtgtctgaggacatgaagaagagccatgatgccatcattgatgacctgaacaggaagctgctggatgtgacccagaagtacacagagaagaagctggagatggagaagctgctgctggagaatgacagcctgagcaaggatgtgtcccggctggagaccgtgtttgtgcccccagagaagcatgagaaggagatcatcgccctgaagagcaacatcgtggagctgaagaagcagctgtctgagctgaagaagaagtgtggggaggaccaggagaagatccacgccctgaccagcgagaacaccaacctgaagaagatgatgagcaaccagtatgtgcctgtgaagacccatgaggaggtgaagatgaccctgaatgacaccctggccaagaccaaccgggagctgctggatgtgaagaagaagtttgaggacatcaaccaggagtttgtgaagatcaaggacaagaatgagatcctgaagaggaacctggagaacacccagaaccagatcaaggccgagtacatcagcctggccgagcacgaggccaagatgagcagcctgagccagagcatgaggaaggtgcaggacagcaatgctgagatcctggccaactacaggaagggccaggaggagatcgtgaccctgcacgccgagatcaaggcccagaagaaggagctggacaccatccaggagtgcatcaaggtgaagtatgcccccatcgtgtcctttgaggagtgtgagaggaagttcaaggccacagagaaggagctgaaggaccagctgtctgagcagacccagaagtacagcgtgtctgaggaggaggtgaagaagaacaagcaggagaatgacaagctgaagaaggagatcttcaccctgcagaaggacctgcgggacaagacagtgctgattgagaagagccatgagatggagcgggccctgagcaggaagacagatgagctgaacaagcagctgaaggacctgagccagaagtacacagaggtgaagaatgtgaaggagaagctggtggaggagaatgccaagcagaccagcgagatcctggccgtgcagaacctgctgcagaagcagcacgtgcccctggagcaggtggaggccctgaagaagagcctgaatggcaccatcgagaacctgaaggaggagctgaagtccatgcagcgctgctatgagaaggagcagcagacagtgaccaagctgcaccagctgctggagaaccagaagaacagctctgtgcccctggccgagcacctgcagatcaaggaggcctttgagaaggaggtgggcatcatcaaggccagcctgcgggagaaggaggaggagagccagaacaagatggaggaggtgtccaagctgcagagcgaggtgcagaacaccaagcaggccctgaagaagctggagacccgggaggtggtggacctgagcaagtacaaggccaccaagagtgacctggagacccagatcagcagcctgaatgagaagctggccaacctgaacagaaaatatgaggaggtgtgtgaggaggtgctgcacgccaagaagaaggagatcagcgccaaggatgagaaggagctgctgcacttcagcattgagcaggagatcaaggaccagaaggagcgctgtgacaagagcctgaccaccatcacagagctgcagaggcgcatccaggagagcgccaagcagatcgaggccaaggacaacaagatcacagagctgctgaatgatgtggagcggctgaagcaggccctgaatggcctgagccagctgacctacaccagcggcaaccccaccaagaggcagagccagctgattgacaccctgcagcaccaggtgaagagcctggagcagcagctggctgatgctgaccggcagcaccaggaggtgattgccatctaccgcacccacctgctgtctgctgcccagggccacatggatgaagatgtgcaggaggccctgctgcagatcatccagatgaggcagggcctggtgtgctag

SEQ ID NO: 175646 - DNA, 1686 bp, synthetic construct
  misc_feature 1..1686: note = Description of Artificial Sequence: Synthetic coding sequence
  source 1..1686: mol_type = other DNA
atgatgaactgctggttcagctgcacccccaagaacagacatgctgctgactggaacaagtatgatgaccggctgatgaaggctgctgagagaggagatgtggagaaggtgaccagcatcctggccaagaagggcgtgaaccctgggaagctggatgtggagggccgctctgtgttccacgtggtgaccagcaaaggaaacctggagtgcctgaatgccatcctgattcatggagtggacatcaccaccagtgacacagctggaagaaatgccctgcacctggccgccaagtatggccacgccctgtgcctgcagaagctgctgcagtacaactgccccacagagcacgccgacctgcagggccgcacagccctgcatgatgctgccatggctgactgccccagcagcatccagctgctgtgtgaccatggagcctctgtgaatgccaaggatgtggatggccgcacccccctggtgctggccacccagatgagccggcccaccatctgccagctgctgattgacagaggagcagatgtgaacagccgggacaagcagaacagaacagccctgatgctgggctgtgaatatggctgcagagatgctgtggaggtgctgatcaagaatggagctgacatcagcctgctggatgccctgggccatgacagcagctactatgccagaattggagacaacctggacatcctgaccctgctgaagacagccagcgagaacaccaacaagggccgggagctgtggaagaagggccccagcctgcagcagaggaacctgacccacatgcaggatgaggtgaatgtgaagagccaccagcgggagcaccagaacatccaggacctggagattgaaaatgaagacctgaaggagcggctgaggaagatccagcaggagcagaggatcctgctggacaaggtgaatggcctgcagctgcagctgaatgaaagagagaagctgaagagcctgctggccgccaaggagaagcagcacgaggagagcctgcggaccatcgaggccctgaagaaccgcttcaagtactttgaaagtgaccacctgggcagcggcagccacttcagcaacaggaaggaggacatgctgctgaagcagggccagatgtacatggctgacagccagtgcaccagccctggcatcccagcccacatgcagagccgctccatgctgcggcccctggagctgagcctgcccagccagaccagctacagtgaaaatgagatcctgaagaaggagctggaggccatgaggaccttctgtgagagcgccaagcaggaccggctgaagctgcagaatgagctggcccacaaggtggccgagtgcaaggccctggccctggagtgtgagcgggtgaaggaggacagtgatgagcagatcaagcagctggaggatgccctgaaggatgtgcagaagaggatgtatgaaagtgagggcaaggtgaagcagatgcagacccacttcctggccctgaaggagcacctgaccagcgaggccgccagcggcaaccaccggctgacagaggagctgaaggaccagctgaaggacctgaaggtgaagtatgaaggagccagcgctgaggtgggcaagctgaggaaccagatcaagcagaatgagatgattgtggaggagttcaagagagatgagggcaagctgatctag

SEQ ID NO: 175647 - DNA, 4206 bp, synthetic construct
  misc_feature 1..4206: note = Description of Artificial Sequence: Synthetic coding sequence
  source 1..4206: mol_type = other DNA
atgatgaactgctggttcagctgcacccccaagaacagacatgctgctgactggaacaagtatgatgaccggctgatgaaggctgctgagagaggagatgtggagaaggtgaccagcatcctggccaagaagggcgtgaaccctgggaagctggatgtggagggccgctctgtgttccacgtggtgaccagcaaaggaaacctggagtgcctgaatgccatcctgattcatggagtggacatcaccaccagtgacacagctggaagaaatgccctgcacctggccgccaagtatggccacgccctgtgcctgcagaagctgctgcagtacaactgccccacagagcacgccgacctgcagggccgcacagccctgcatgatgctgccatggctgactgccccagcagcatccagctgctgtgtgaccatggagcctctgtgaatgccaaggatgtggatggccgcacccccctggtgctggccacccagatgagccggcccaccatctgccagctgctgattgacagaggagcagatgtgaacagccgggacaagcagaacagaacagccctgatgctgggctgtgaatatggctgcagagatgctgtggaggtgctgatcaagaatggagctgacatcagcctgctggatgccctgggccatgacagcagctactatgccagaattggagacaacctggacatcctgaccctgctgaagacagccagcgagaacaccaacaagggccgggagctgtggaagaagggccccagcctgcagcagaggaacctgacccacatgcaggatgaggtgaatgtgaagagccaccagcgggagcaccagaacatccaggacctggagattgaaaatgaagacctgaaggagcggctgaggaagatccagcaggagcagaggatcctgctggacaaggtgaatggcctgcagctgcagctgaatgaggaggtgatggtggctgatgacctggagagcgagcgggagaagctgaagagcctgctggccgccaaggagaagcagcacgaggagagcctgcggaccatcgaggccctgaagaaccgcttcaagtactttgaaagtgaccacctgggcagcggcagccacttcagaaaagaagacatgctgctgaagcagggccagatgtacatggctgacagccagtgcaccagccctggcatcccagcccacatgcagagccgctccatgctgcggcccctggagctgagcctgcccagccagaccagctacagtgaaaatgagatcctgaagaaggagctggaggccatgaggaccttctgtgagagcgccaagcaggaccggctgaagctgcagaatgagctggcccacaaggtggccgagtgcaaggccctggccctggagtgtgagcgggtgaaggaggacagtgatgagcagatcaagcagctggaggatgccctgaaggatgtgcagaagaggatgtatgagagcgagggcaaggtgaagcagatgcagacccacttcctggccctgaaggagcacctgaccagcgaggccgccagcggcaaccaccggctgacagaggagctgaaggaccagctgaaggacctgaaggtgaagtatgagggcgccagcgctgaggtgggcaagctgaggaaccagatcaagcagaatgagatgattgtggaggagttcaagagagatgagggcaagctgattgaggagaacaagaggctgcagaaggagctgtccatgtgtgagatggagcgggagaagaagggcaggaaggtgacagagatggagggccaggccaaggagctgagcgccaagctggccctgagcatcccagctgagaagtttgagaacatgaagagcagcctgagcaatgaggtgaatgagaaggccaagaagctggtggagatggagcgggagcacgagaagagcctgtctgagatccggcagctgaagcgggagctggagaatgtgaaggccaagctggcccagcacgtgaagccagaggagcacgagcaggtgaagagccggctggagcagaagtctggagagctgggcaagaagatcacagagctgaccctgaagaaccagaccctgcagaaggagattgagaaggtgtacctggacaacaagctgctgaaggagcaggcccacaacctgaccatcgagatgaagaaccactacgtgcccctgaaggtgtctgaggacatgaagaagagccatgatgccatcattgatgacctgaacaggaagctgctggatgtgacccagaagtacacagagaagaagctggagatggagaagctgctgctggagaatgacagcctgagcaaggatgtgtcccggctggagaccgtgtttgtgcccccagagaagcatgagaaggagatcatcgccctgaagagcaacatcgtggagctgaagaagcagctgtctgagctgaagaagaagtgtggggaggaccaggagaagatccacgccctgaccagcgagaacaccaacctgaagaagatgatgagcaaccagtatgtgcctgtgaagacccatgaggaggtgaagatgaccctgaatgacaccctggccaagaccaaccgggagctgctggatgtgaagaagaagtttgaggacatcaaccaggagtttgtgaagatcaaggacaagaatgagatcctgaagaggaacctggagaacacccagaaccagatcaaggccgagtacatcagcctggccgagcacgaggccaagatgagcagcctgagccagagcatgaggaaggtgcaggacagcaatgctgagatcctggccaactacaggaagggccaggaggagatcgtgaccctgcacgccgagatcaaggcccagaagaaggagctggacaccatccaggagtgcatcaaggtgaagtatgcccccatcgtgtcctttgaggagtgtgagaggaagttcaaggccacagagaaggagctgaaggaccagctgtctgagcagacccagaagtacagcgtgtctgaggaggaggtgaagaagaacaagcaggagaatgacaagctgaagaaggagatcttcaccctgcagaaggacctgcgggacaagacagtgctgattgagaagagccatgagatggagcgggccctgagcaggaagacagatgagctgaacaagcagctgaaggacctgagccagaagtacacagaggtgaagaatgtgaaggagaagctggtggaggagaatgccaagcagaccagcgagatcctggccgtgcagaacctgctgcagaagcagcacgtgcccctggagcaggtggaggccctgaagaagagcctgaatggcaccatcgagaacctgaaggaggagctgaagtccatgcagcgctgctatgagaaggagcagcagacagtgaccaagctgcaccagctgctggagaaccagaagaacagctctgtgcccctggccgagcacctgcagatcaaggaggcctttgagaaggaggtgggcatcatcaaggccagcctgcgggagaaggaggaggagagccagaacaagatggaggaggtgtccaagctgcagagcgaggtgcagaacaccaagcaggccctgaagaagctggagacccgggaggtggtggacctgagcaagtacaaggccaccaagagtgacctggagacccagatcagcagcctgaatgagaagctggccaacctgaacagaaaatatgaggaggtgtgtgaggaggtgctgcacgccaagaagaaggagatcagcgccaaggatgagaaggagctgctgcacttcagcattgagcaggagatcaaggaccagaaggagcgctgtgacaagagcctgaccaccatcacagagctgcagaggcgcatccaggagagcgccaagcagatcgaggccaaggacaacaagatcacagagctgctgaatgatgtggagcggctgaagcaggccctgaatggcctgagccagctgacctacaccagcggcaaccccaccaagaggcagagccagctgattgacaccctgcagcaccaggtgaagagcctggagcagcagctggctgatgctgaccggcagcaccaggaggtgattgccatctaccgcacccacctgctgtctgctgcccagggccacatggatgaagatgtgcaggaggccctgctgcagatcatccagatgaggcagggcctggtgtgctag

SEQ ID NO: 175648 - DNA, 3195 bp, synthetic construct
  misc_feature 1..3195: note = Description of Artificial Sequence: Synthetic coding sequence
  source 1..3195: mol_type = other DNA
atggtgctgggcaccgtgctgctgccccccaacagctatggccgggaccaggacaccagcctgtgctgcctgtgcacagaggccagcgagagcgccctgcctgacctgacagaccactttgccagctgtgtggaggatggctttgaaggagacaagacaggaggcagcagccctgaggccctgcaccggccctacggctgtgatgtggagccccaggccctgaatgaggccatccgctggagcagcaaggagaacctgctgggcgccacagaaagtgaccccaacctgtttgtggccctgtatgactttgtggccagcggggacaacaccctgagcatcaccaagggggagaagctgcgggtgctgggctacaaccagaatggagagtggagcgaggtgcgcagcaagaatggccagggctgggtgcccagcaactacatcacccctgtgaacagcctggagaagcacagctggtaccacggccctgtgagccgctctgctgctgagtacctgctgagcagcctcatcaatggcagcttcctggtgcgggagagcgagagcagccctggccagctgagcatcagcctgcgctatgagggccgggtgtaccactaccgcatcaacaccacagcagatggcaaggtgtatgtgacagctgagagccgcttcagcaccctggccgagctggtgcaccaccacagcacagtggctgatggcctggtgaccaccctgcactacccagcccccaagtgcaacaagcccaccgtgtatggagtgagccccatccatgacaagtgggagatggagaggacagacatcaccatgaagcacaagctgggcggcggccagtacggggaggtgtatgtgggcgtgtggaagaagtacagcctgactgtggccgtgaagaccctgaaggaggacaccatggaggtggaggagttcctgaaggaggccgctgtgatgaaggagatcaagcaccccaacctggtgcagctgctgggcgtgtgcaccctggagccccccttctacatcgtgacagagtacatgccctacggcaacctgctggactacctgcgggagtgcaaccgggaggaggtgacagctgtggtgctgctgtacatggccacccagatcagcagcgccatggagtacctggagaagaagaacttcatccaccgggacctggccgccaggaactgcctggtgggggagaaccacgtggtgaaggtggccgactttggcctgagccggctgatgaccggggacacctacacagcccacgccggggccaagttccccatcaagtggacagcccctgagagcctggcctacaacaccttcagcatcaagagtgatgtgtgggccttcggcgtgctgctgtgggagatcgccacctacggcatgagcccctacccaggcatcgacctgagccaggtgtatgacctgctggagaagggctacaggatggagcagcctgagggctgcccccccaaggtgtatgagctgatgagggcctgctggaagtggagccctgctgaccggcccagctttgctgagacccaccaggcctttgagaccatgtttcatgacagcagcatcagcgaggaggtggccgaggagctgggccgggccgccagcagcagctctgtggtgccctacctgccccggctgcccatcctgcccagcaagaccaggaccctgaagaagcaggtggagaacaaggaaaatattgaaggagcccaggatgccacagaaaattctgccagcagcctggcccctggcttcatccggggggcccaggccagcagcggcagccctgccctgcccaggaagcagagggacaagagccccagcagcctgctggaggatgccaaggagacctgcttcacccgggacaggaagggcggcttcttcagcagcttcatgaagaagagaaatgcccccaccccacccaagaggagcagcagcttccgggagatggagaaccagccccacaagaagtatgagctgaccggcctgcctgagcaggacaggatggccatgaccctgcccaggaactgccagaggagcaagctgcagctggagaggacagtgtccaccagcagccagcctgaggagaatgtggaccgggccaatgacatgctgcccaagaagtctgaggagagcgctgcccccagccgggagcggcccaaggccaagctgctgcccaggggggccacagccctgcccctgcggacccccagcggggacctggccatcacagagaaggaccccccaggagtgggcgtggccggcgtggccgccgcccccaagggcaaggagaagaatggaggagcccggctgggcatggccggcgtgcctgaagatggagagcagcccggctggcccagccctgccaaggccgcccctgtgctgcccaccacccacaaccacaaggtgcctgtgctgatcagccccaccctgaagcacaccccagcagatgtgcagctgattggaacagacagccagggcaacaagttcaagctgctgtctgagcaccaggtgaccagcagcggggacaaggaccggccccggcgggtgaagcccaagtgtgcccctcctcctcctcctgtgatgaggctgctgcagcaccccagcatctgcagcgaccccacagaggagcccacagccctgacagctggccagagcaccagcgagacccaggagggcggcaagaaggccgccctgggcgctgtgcccatcagcggcaaggccggccggcctgtgatgcccccaccccaggtgcccctgcccaccagcagcatcagccctgccaagatggccaacggcacagctggcaccaaggtggccctgaggaagaccaagcaggccgctgagaagatctctgctgacaagatcagcaaggaggccctgctggagtgtgccgacctgctgagcagcgccctgacagagcctgtgcccaacagccagctggtggacaccggccaccagctgctggactactgcagcggctacgtggactgcatcccccagaccaggaacaagtttgccttccgggaggccgtgtccaagctggagctgagcctgcaggagctgcaggtgagcagcgctgctgctggggtgcccggcaccaaccctgtgctgaacaacctgctgagctgtgtgcaggagatcagtgatgtggtgcagaggtag

SEQ ID NO: 175649 - DNA, 1629 bp, synthetic construct
  misc_feature 1..1629: note = Description of Artificial Sequence: Synthetic coding sequence
  source 1..1629: mol_type = other DNA
atgggccagcaggtgggccgggtgggggaggcccctggcctgcagcagccccagccccggggcatccggggcagcagcgctgcccggcccagcggcagaagaagagatcctgctggccgcaccacagagaccggcttcaacatcttcacccagcacgaggccctgcaccggccctacggctgtgatgtggagccccaggccctgaatgaggccatccgctggagcagcaaggagaacctgctgggcgccacagaaagtgaccccaacctgtttgtggccctgtatgactttgtggccagcggggacaacaccctgagcatcaccaagggggagaagctgcgggtgctgggctacaaccagaatggagagtggagcgaggtgcgcagcaagaatggccagggctgggtgcccagcaactacatcacccctgtgaacagcctggagaagcacagctggtaccacggccctgtgagccgctctgctgctgagtacctgctgagcagcctcatcaatggcagcttcctggtgcgggagagcgagagcagccctggccagctgagcatcagcctgcgctatgagggccgggtgtaccactaccgcatcaacaccacagcagatggcaaggtgtatgtgacagctgagagccgcttcagcaccctggccgagctggtgcaccaccacagcacagtggctgatggcctggtgaccaccctgcactacccagcccccaagtgcaacaagcccaccgtgtatggagtgagccccatccatgacaagtgggagatggagaggacagacatcaccatgaagcacaagctgggcggcggccagtacggggaggtgtatgtgggcgtgtggaagaagtacagcctgactgtggccgtgaagaccctgaaggaggacaccatggaggtggaggagttcctgaaggaggccgctgtgatgaaggagatcaagcaccccaacctggtgcagctgctgggcgtgtgcaccctggagccccccttctacatcgtgacagagtacatgccctacggcaacctgctggactacctgcgggagtgcaaccgggaggaggtgacagctgtggtgctgctgtacatggccacccagatcagcagcgccatggagtacctggagaagaagaacttcatccaccgggacctggccgccaggaactgcctggtgggggagaaccacgtggtgaaggtggccgactttggcctgagccggctgatgaccggggacacctacacagcccacgccggggccaagttccccatcaagtggacagcccctgagagcctggcctacaacaccttcagcatcaagagtgatgtgtgggccttcggcgtgctgctgtgggagatcgccacctacggcatgagcccctacccaggcatcgacctgagccaggtgtatgacctgctggagaagggctacaggatggagcagcctgagggctgcccccccaaggtgtatgagctgatgagggcctgctggaagtggagccctgctgaccggcccagctttgctgagacccaccaggcctttgagaccatgtttcatgacagcagcatcagcgaggtgctgctgcactgtgccaaccagacctgcatcaccctgtag

SEQ ID NO: 175650 - DNA, 3441 bp, synthetic construct
  misc_feature 1..3441: note = Description of Artificial Sequence: Synthetic coding sequence
  source 1..3441: mol_type = other DNA
atggtgctgggcaccgtgctgctgccccccaacagctatggccgggaccaggacaccagcctgtgctgcctgtgcacagaggccagcgagagcgccctgcctgacctgacagaggccctgcaccggccctacggctgtgatgtggagccccaggccctgaatgaggccatccgctggagcagcaaagaaaacctgctgggcgccacagaaagtgaccccaacctgtttgtggccctgtatgactttgtggccagcggggacaacaccctgagcatcaccaagggggagaagctgcgggtgctgggctacaaccagaatggagagtggagcgaggtgcgcagcaagaatggccagggctgggtgcccagcaactacatcacccctgtgaacagcctggagaagcacagctggtaccacggccctgtgagccgctctgctgctgagtacctgctgagcagcctcatcaatggcagcttcctggtgcgggagagcgagagcagccctggccagctgagcatcagcctgcgctatgagggccgggtgtaccactaccgcatcaacaccacagcagatggcaaggtgtatgtgacagctgagagccgcttcagcaccctggccgagctggtgcaccaccacagcacagtggctgatggcctggtgaccaccctgcactacccagcccccaagtgcaacaagcccaccgtgtatggagtgagccccatccatgacaagtgggagatggagaggacagacatcaccatgaagcacaagctgggcggcggccagtatggagaggtgtatgtgggcgtgtggaagaagtacagcctgactgtggccgtgaagaccctgaaggaggacaccatggaggtggaggagttcctgaaggaggccgctgtgatgaaggagatcaagcaccccaacctggtgcagctgctgggcgtgtgcaccctggagccccccttctacatcgtgacagagtacatgccctacggcaacctgctggactacctgcgggagtgcaaccgggaggaggtgacagctgtggtgctgctgtacatggccacccagatcagcagcgccatggagtacctggagaagaagaacttcatccaccgggacctggccgccaggaactgcctggtgggagaaaatcatgtggtgaaggtggccgactttggcctgagccggctgatgactggagacacctacacagcccatgctggggccaagttccccatcaagtggacagcccctgagagcctggcctacaacaccttcagcatcaagagtgatgtgtgggcctttggagtgctgctgtgggagatcgccacctacggcatgagcccctacccaggcatcgacctgagccaggtgtatgacctgctggagaagggctacaggatggagcagcctgagggctgcccccccaaggtgtatgagctgatgagggcctgctggaagtggagccctgctgaccggcccagctttgctgagacccaccaggcctttgagaccatgtttcatgacagcagcatcagcgaggaggtggccgaggagctgggccgggccgccagcagcagctctgtggtgccctacctgccccggctgcccatcctgcccagcaagaccaggaccctgaagaagcaggtggagaacaaggagaacatcgagggcgcccaggatgccacagagaacagcgccagcagcctggcccctggcttcatccggggggcccaggccagcagcggcagccctgccctgcccaggaagcagagggacaagagccccagcagcctgctggaggatgccaaggagacctgcttcacccgggacagaaaaggaggcttcttcagcagcttcatgaagaagagaaatgcccccaccccacccaagaggagcagcagcttccgggagatggagaaccagccccacaagaagtatgagctgaccggcaacttcagctctgtggccagcctgcagcacgcagatggcttctccttcaccccagcccagcaggaggccaacctggtgccccccaagtgctacggcggcagctttgcccagaggaacctgtgcaatgatgatggcggcggcggcggcggcagcggcacagctgggggcggctggagcggcatcaccggcttcttcacccccaggctcatcaagaagaccctgggcctgcgggccggcaagcccacagccagtgatgacaccagcaagcccttccccaggagcaacagcaccagctccatgagcagcggcctgcctgagcaggacaggatggccatgaccctgcccaggaactgccagaggagcaagctgcagctggagaggacagtgtccaccagcagccagcctgaggagaatgtggaccgggccaatgacatgctgcccaagaagtctgaggagagcgctgcccccagccgggagcggcccaaggccaagctgctgcccaggggggccacagccctgcccctgcggacccccagcggggacctggccatcacagagaaggaccccccaggagtgggcgtggccggcgtggccgccgcccccaagggcaaggagaagaatggaggagcccggctgggcatggccggcgtgcctgaagatggagagcagcccggctggcccagccctgccaaggccgcccctgtgctgcccaccacccacaaccacaaggtgcctgtgctgatcagccccaccctgaagcacaccccagcagatgtgcagctgattggaacagacagccagggcaacaagttcaagctgctgtctgagcaccaggtgaccagcagcggggacaaggaccggccccggcgggtgaagcccaagtgtgcccctcctcctcctcctgtgatgaggctgctgcagcaccccagcatctgcagcgaccccacagaggagcccacagccctgacagctggccagagcaccagcgagacccaggagggcggcaagaaggccgccctgggcgctgtgcccatcagcggcaaggccggccggcctgtgatgcccccaccccaggtgcccctgcccaccagcagcatcagccctgccaagatggccaacggcacagctggcaccaaggtggccctgaggaagaccaagcaggccgctgagaagatctctgctgacaagatcagcaaggaggccctgctggagtgtgccgacctgctgagcagcgccctgacagagcctgtgcccaacagccagctggtggacaccggccaccagctgctggactactgcagcggctacgtggactgcatcccccagaccaggaacaagtttgccttccgggaggccgtgtccaagctggagctgagcctgcaggagctgcaggtgagcagcgctgctgctggggtgcccggcaccaaccctgtgctgaacaacctgctgagctgtgtgcaggagatcagtgatgtggtgcagaggtag

SEQ ID NO: 175651 - DNA, 3549 bp, synthetic construct
  misc_feature 1..3549: note = Description of Artificial Sequence: Synthetic coding sequence
  source 1..3549: mol_type = other DNA
atgggccagcaggtgggccgggtgggggaggcccctggcctgcagcagccccagccccggggcatccggggcagcagcgctgcccggcccagcggcagaagaagagatcctgctggccgcaccacagagaccggcttcaacatcttcacccagcacgaccactttgccagctgtgtggaggatggctttgaaggagacaagacaggaggcagcagccctgaggccctgcaccggccctacggctgtgatgtggagccccaggccctgaatgaggccatccgctggagcagcaaagaaaacctgctgggcgccacagaaagtgaccccaacctgtttgtggccctgtatgactttgtggccagcggggacaacaccctgagcatcaccaagggggagaagctgcgggtgctgggctacaaccagaatggagagtggagcgaggtgcgcagcaagaatggccagggctgggtgcccagcaactacatcacccctgtgaacagcctggagaagcacagctggtaccacggccctgtgagccgctctgctgctgagtacctgctgagcagcctcatcaatggcagcttcctggtgcgggagagcgagagcagccctggccagctgagcatcagcctgcgctatgagggccgggtgtaccactaccgcatcaacaccacagcagatggcaaggtgtatgtgacagctgagagccgcttcagcaccctggccgagctggtgcaccaccacagcacagtggctgatggcctggtgaccaccctgcactacccagcccccaagtgcaacaagcccaccgtgtatggagtgagccccatccatgacaagtgggagatggagaggacagacatcaccatgaagcacaagctgggcggcggccagtatggagaggtgtatgtgggcgtgtggaagaagtacagcctgactgtggccgtgaagaccctgaaggaggacaccatggaggtggaggagttcctgaaggaggccgctgtgatgaaggagatcaagcaccccaacctggtgcagctgctgggcgtgtgcaccctggagccccccttctacatcgtgacagagtacatgccctacggcaacctgctggactacctgcgggagtgcaaccgggaggaggtgacagctgtggtgctgctgtacatggccacccagatcagcagcgccatggagtacctggagaagaagaacttcatccaccgggacctggccgccaggaactgcctggtgggagaaaatcatgtggtgaaggtggccgactttggcctgagccggctgatgactggagacacctacacagcccatgctggggccaagttccccatcaagtggacagcccctgagagcctggcctacaacaccttcagcatcaagagtgatgtgtgggcctttggagtgctgctgtgggagatcgccacctacggcatgagcccctacccaggcatcgacctgagccaggtgtatgacctgctggagaagggctacaggatggagcagcctgagggctgcccccccaaggtgtatgagctgatgagggcctgctggaagtggagccctgctgaccggcccagctttgctgagacccaccaggcctttgagaccatgtttcatgacagcagcatcagcgaggaggtggccgaggagctgggccgggccgccagcagcagctctgtggtgccctacctgccccggctgcccatcctgcccagcaagaccaggaccctgaagaagcaggtggagaacaaggagaacatcgagggcgcccaggatgccacagagaacagcgccagcagcctggcccctggcttcatccggggggcccaggccagcagcggcagccctgccctgcccaggaagcagagggacaagagccccagcagcctgctggaggatgccaaggagacctgcttcacccgggacagaaaaggaggcttcttcagcagcttcatgaagaagagaaatgcccccaccccacccaagaggagcagcagcttccgggagatggagaaccagccccacaagaagtatgagctgaccggcaacttcagctctgtggccagcctgcagcacgcagatggcttctccttcaccccagcccagcaggaggccaacctggtgccccccaagtgctacggcggcagctttgcccagaggaacctgtgcaatgatgatggcggcggcggcggcggcagcggcacagctgggggcggctggagcggcatcaccggcttcttcacccccaggctcatcaagaagaccctgggcctgcgggccggcaagcccacagccagtgatgacaccagcaagcccttccccaggagcaacagcaccagctccatgagcagcggcctgcctgagcaggacaggatggccatgaccctgcccaggaactgccagaggagcaagctgcagctggagaggacagtgtccaccagcagccagcctgaggagaatgtggaccgggccaatgacatgctgcccaagaagtctgaggagagcgctgcccccagccgggagcggcccaaggccaagctgctgcccaggggggccacagccctgcccctgcggacccccagcggggacctggccatcacagagaaggaccccccaggagtgggcgtggccggcgtggccgccgcccccaagggcaaggagaagaatggaggagcccggctgggcatggccggcgtgcctgaagatggagagcagcccggctggcccagccctgccaaggccgcccctgtgctgcccaccacccacaaccacaaggtgcctgtgctgatcagccccaccctgaagcacaccccagcagatgtgcagctgattggaacagacagccagggcaacaagttcaagctgctgtctgagcaccaggtgaccagcagcggggacaaggaccggccccggcgggtgaagcccaagtgtgcccctcctcctcctcctgtgatgaggctgctgcagcaccccagcatctgcagcgaccccacagaggagcccacagccctgacagctggccagagcaccagcgagacccaggagggcggcaagaaggccgccctgggcgctgtgcccatcagcggcaaggccggccggcctgtgatgcccccaccccaggtgcccctgcccaccagcagcatcagccctgccaagatggccaacggcacagctggcaccaaggtggccctgaggaagaccaagcaggccgctgagaagatctctgctgacaagatcagcaaggaggccctgctggagtgtgccgacctgctgagcagcgccctgacagagcctgtgcccaacagccagctggtggacaccggccaccagctgctggactactgcagcggctacgtggactgcatcccccagaccaggaacaagtttgccttccgggaggccgtgtccaagctggagctgagcctgcaggagctgcaggtgagcagcgctgctgctggggtgcccggcaccaaccctgtgctgaacaacctgctgagctgtgtgcaggagatcagtgatgtggtgcagaggtag

SEQ ID NO: 175652 - DNA, 3132 bp, synthetic construct
  misc_feature 1..3132: note = Description of Artificial Sequence: Synthetic coding sequence
  source 1..3132: mol_type = other DNA
atggtgctgggcaccgtgctgctgccccccaacagctatggccgggaccaggacaccagcctgtgctgcctgtgcacagaggccagcgagagcgccctgcctgacctgacagaggccctgcaccggccctacggctgtgatgtggagccccaggccctgaatgaggccatccgctggagcagcaaagaaaacctgctgggcgccacagaaagtgaccccaacctgtttgtggccctgtatgactttgtggccagcggggacaacaccctgagcatcaccaagggggagaagctgcgggtgctgggctacaaccagaatggagagtggagcgaggtgcgcagcaagaatggccagggctgggtgcccagcaactacatcacccctgtgaacagcctggagaagcacagctggtaccacggccctgtgagccgctctgctgctgagtacctgctgagcagcctcatcaatggcagcttcctggtgcgggagagcgagagcagccctggccagctgagcatcagcctgcgctatgagggccgggtgtaccactaccgcatcaacaccacagcagatggcaaggtgtatgtgacagctgagagccgcttcagcaccctggccgagctggtgcaccaccacagcacagtggctgatggcctggtgaccaccctgcactacccagcccccaagtgcaacaagcccaccgtgtatggagtgagccccatccatgacaagtgggagatggagaggacagacatcaccatgaagcacaagctgggcggcggccagtatggagaggtgtatgtgggcgtgtggaagaagtacagcctgactgtggccgtgaagaccctgaaggaggacaccatggaggtggaggagttcctgaaggaggccgctgtgatgaaggagatcaagcaccccaacctggtgcagctgctgggcgtgtgcaccctggagccccccttctacatcgtgacagagtacatgccctacggcaacctgctggactacctgcgggagtgcaaccgggaggaggtgacagctgtggtgctgctgtacatggccacccagatcagcagcgccatggagtacctggagaagaagaacttcatccaccgggacctggccgccaggaactgcctggtgggagaaaatcatgtggtgaaggtggccgactttggcctgagccggctgatgactggagacacctacacagcccatgctggggccaagttccccatcaagtggacagcccctgagagcctggcctacaacaccttcagcatcaagagtgatgtgtgggcctttggagtgctgctgtgggagatcgccacctacggcatgagcccctacccaggcatcgacctgagccaggtgtatgacctgctggagaagggctacaggatggagcagcctgagggctgcccccccaaggtgtatgagctgatgagggcctgctggaagtggagccctgctgaccggcccagctttgctgagacccaccaggcctttgagaccatgtttcatgacagcagcatcagcgaggaggtggccgaggagctgggccgggccgccagcagcagctctgtggtgccctacctgccccggctgcccatcctgcccagcaagaccaggaccctgaagaagcaggtggagaacaaggagaacatcgagggcgcccaggatgccacagagaacagcgccagcagcctggcccctggcttcatccggggggcccaggccagcagcggcagccctgccctgcccaggaagcagagggacaagagccccagcagcctgctggaggatgccaaggagacctgcttcacccgggacagaaaaggaggcttcttcagcagcttcatgaagaagagaaatgcccccaccccacccaagaggagcagcagcttccgggagatggagaaccagccccacaagaagtatgagctgaccggcctgcctgagcaggacaggatggccatgaccctgcccaggaactgccagaggagcaagctgcagctggagaggacagtgtccaccagcagccagccagaagaaaatgtggaccgggccaatgacatgctgcccaagaagtctgaggagagcgctgcccccagccgggagcggcccaaggccaagctgctgcccaggggggccacagccctgcccctgcggaccccatctggggacctggccatcacagagaaggaccccccaggagtgggcgtggccggcgtggccgccgcccccaagggcaaggagaagaatggaggagcccggctgggcatggccggcgtgcctgaagatggagagcagcccggctggcccagccctgccaaggccgcccctgtgctgcccaccacccacaaccacaaggtgcctgtgctgatcagccccaccctgaagcacaccccagcagatgtgcagctgattggaacagacagccagggcaacaagttcaagctgctgtctgagcaccaggtgaccagcagcggggacaaggaccggcccaggagagtgaagcccaagtgtgcccctcctcctcctcctgtgatgaggctgctgcagcaccccagcatctgcagcgaccccacagaggagcccacagccctgacagctggccagagcaccagcgagacccaggagggcggcaagaaggccgccctgggcgctgtgcccatcagcggcaaggccggccggcctgtgatgcccccaccccaggtgcccctgcccaccagcagcatcagccctgccaagatggccaatggaacagctggcaccaaggtggccctgaggaagaccaagcaggccgctgagaagatctctgctgacaagatcagcaaggaggccctgctggagtgtgccgacctgctgagcagcgccctgacagagcctgtgcccaacagccagctggtggacaccggccaccagctgctggactactgcagcggctacgtggactgcatcccccagaccaggaacaagtttgccttccgggaggccgtgtccaagctggagctgagcctgcaggagctgcaggtgtcctctgctgctgctggggtgcccggcaccaaccctgtgctgaacaacctgctgagctgtgtgcaggagatcagtgatgtggtgcagaggtag

SEQ ID NO: 175653 - DNA, 3504 bp, synthetic construct
  misc_feature 1..3504: note = Description of Artificial Sequence: Synthetic coding sequence
  source 1..3504: mol_type = other DNA
atggtgctgggcaccgtgctgctgccccccaacagctatggccgggaccaggacaccagcctgtgctgcctgtgcacagaggccagcgagagcgccctgcctgacctgacagaccactttgccagctgtgtggaggatggctttgaaggagacaagacaggaggcagcagccctgaggccctgcaccggccctacggctgtgatgtggagccccaggccctgaatgaggccatccgctggagcagcaaggagaacctgctgggcgccacagaaagtgaccccaacctgtttgtggccctgtatgactttgtggccagcggggacaacaccctgagcatcaccaagggggagaagctgcgggtgctgggctacaaccagaatggagagtggagcgaggtgcgcagcaagaatggccagggctgggtgcccagcaactacatcacccctgtgaacagcctggagaagcacagctggtaccacggccctgtgagccgctctgctgctgagtacctgctgagcagcctcatcaatggcagcttcctggtgcgggagagcgagagcagccctggccagctgagcatcagcctgcgctatgagggccgggtgtaccactaccgcatcaacaccacagcagatggcaaggtgtatgtgacagctgagagccgcttcagcaccctggccgagctggtgcaccaccacagcacagtggctgatggcctggtgaccaccctgcactacccagcccccaagtgcaacaagcccaccgtgtatggagtgagccccatccatgacaagtgggagatggagaggacagacatcaccatgaagcacaagctgggcggcggccagtacggggaggtgtatgtgggcgtgtggaagaagtacagcctgactgtggccgtgaagaccctgaaggaggacaccatggaggtggaggagttcctgaaggaggccgctgtgatgaaggagatcaagcaccccaacctggtgcagctgctgggcgtgtgcaccctggagccccccttctacatcgtgacagagtacatgccctacggcaacctgctggactacctgcgggagtgcaaccgggaggaggtgacagctgtggtgctgctgtacatggccacccagatcagcagcgccatggagtacctggagaagaagaacttcatccaccgggacctggccgccaggaactgcctggtgggggagaaccacgtggtgaaggtggccgactttggcctgagccggctgatgaccggggacacctacacagcccacgccggggccaagttccccatcaagtggacagcccctgagagcctggcctacaacaccttcagcatcaagagtgatgtgtgggccttcggcgtgctgctgtgggagatcgccacctacggcatgagcccctacccaggcatcgacctgagccaggtgtatgacctgctggagaagggctacaggatggagcagcctgagggctgcccccccaaggtgtatgagctgatgagggcctgctggaagtggagccctgctgaccggcccagctttgctgagacccaccaggcctttgagaccatgtttcatgacagcagcatcagcgaggaggtggccgaggagctgggccgggccgccagcagcagctctgtggtgccctacctgccccggctgcccatcctgcccagcaagaccaggaccctgaagaagcaggtggagaacaaggaaaatattgaaggagcccaggatgccacagaaaattctgccagcagcctggcccctggcttcatccggggggcccaggccagcagcggcagccctgccctgcccaggaagcagagggacaagagccccagcagcctgctggaggatgccaaggagacctgcttcacccgggacaggaagggcggcttcttcagcagcttcatgaagaagagaaatgcccccaccccacccaagaggagcagcagcttccgggagatggagaaccagccccacaagaagtatgagctgactggaaacttcagctctgtggccagcctgcagcacgcagatggcttctccttcaccccagcccagcaggaggccaacctggtgccccccaagtgctatggaggcagctttgcccagaggaacctgtgcaatgatgatggcggcggcggcggcggcagcggcacagctgggggcggctggagcggcatcaccggcttcttcacccccaggctcatcaagaagaccctgggcctgcgggccggcaagcccacagccagtgatgacaccagcaagcccttccccaggagcaacagcaccagctccatgagcagcggcctgcctgagcaggacaggatggccatgaccctgcccaggaactgccagaggagcaagctgcagctggagaggacagtgtccaccagcagccagccagaagaaaatgtggaccgggccaatgacatgctgcccaagaagtctgaggagagcgctgcccccagccgggagcggcccaaggccaagctgctgcccaggggggccacagccctgcccctgcggaccccatctggggacctggccatcacagagaaggaccccccaggagtgggcgtggccggcgtggccgccgcccccaagggcaaggagaagaatggaggagcccggctgggcatggccggcgtgcctgaagatggagagcagcccggctggcccagccctgccaaggccgcccctgtgctgcccaccacccacaaccacaaggtgcctgtgctgatcagccccaccctgaagcacaccccagcagatgtgcagctgattggaacagacagccagggcaacaagttcaagctgctgtctgagcaccaggtgaccagcagcggggacaaggaccggcccaggagagtgaagcccaagtgtgcccctcctcctcctcctgtgatgaggctgctgcagcaccccagcatctgcagcgaccccacagaggagcccacagccctgacagctggccagagcaccagcgagacccaggagggcggcaagaaggccgccctgggcgctgtgcccatcagcggcaaggccggccggcctgtgatgcccccaccccaggtgcccctgcccaccagcagcatcagccctgccaagatggccaatggaacagctggcaccaaggtggccctgaggaagaccaagcaggccgctgagaagatctctgctgacaagatcagcaaggaggccctgctggagtgtgccgacctgctgagcagcgccctgacagagcctgtgcccaacagccagctggtggacaccggccaccagctgctggactactgcagcggctacgtggactgcatcccccagaccaggaacaagtttgccttccgggaggccgtgtccaagctggagctgagcctgcaggagctgcaggtgtcctctgctgctgctggggtgcccggcaccaaccctgtgctgaacaacctgctgagctgtgtgcaggagatcagtgatgtggtgcagaggtag

SEQ ID NO: 175654 - DNA, 3486 bp, synthetic construct
  misc_feature 1..3486: note = Description of Artificial Sequence: Synthetic coding sequence
  source 1..3486: mol_type = other DNA
atgggccagcaggtgggccgggtgggggaggcccctggcctgcagcagccccagccccggggcatccggggcagcagcgctgcccggcccagcggcagaagaagagatcctgctggccgcaccacagagaccggcttcaacatcttcacccagcacgaggccctgcaccggccctacggctgtgatgtggagccccaggccctgaatgaggccatccgctggagcagcaaggagaacctgctgggcgccacagaaagtgaccccaacctgtttgtggccctgtatgactttgtggccagcggggacaacaccctgagcatcaccaagggggagaagctgcgggtgctgggctacaaccagaatggagagtggagcgaggtgcgcagcaagaatggccagggctgggtgcccagcaactacatcacccctgtgaacagcctggagaagcacagctggtaccacggccctgtgagccgctctgctgctgagtacctgctgagcagcctcatcaatggcagcttcctggtgcgggagagcgagagcagccctggccagctgagcatcagcctgcgctatgagggccgggtgtaccactaccgcatcaacaccacagcagatggcaaggtgtatgtgacagctgagagccgcttcagcaccctggccgagctggtgcaccaccacagcacagtggctgatggcctggtgaccaccctgcactacccagcccccaagtgcaacaagcccaccgtgtatggagtgagccccatccatgacaagtgggagatggagaggacagacatcaccatgaagcacaagctgggcggcggccagtacggggaggtgtatgtgggcgtgtggaagaagtacagcctgactgtggccgtgaagaccctgaaggaggacaccatggaggtggaggagttcctgaaggaggccgctgtgatgaaggagatcaagcaccccaacctggtgcagctgctgggcgtgtgcaccctggagccccccttctacatcgtgacagagtacatgccctacggcaacctgctggactacctgcgggagtgcaaccgggaggaggtgacagctgtggtgctgctgtacatggccacccagatcagcagcgccatggagtacctggagaagaagaacttcatccaccgggacctggccgccaggaactgcctggtgggggagaaccacgtggtgaaggtggccgactttggcctgagccggctgatgaccggggacacctacacagcccacgccggggccaagttccccatcaagtggacagcccctgagagcctggcctacaacaccttcagcatcaagagtgatgtgtgggccttcggcgtgctgctgtgggagatcgccacctacggcatgagcccctacccaggcatcgacctgagccaggtgtatgacctgctggagaagggctacaggatggagcagcctgagggctgcccccccaaggtgtatgagctgatgagggcctgctggaagtggagccctgctgaccggcccagctttgctgagacccaccaggcctttgagaccatgtttcatgacagcagcatcagcgaggaggtggccgaggagctgggccgggccgccagcagcagctctgtggtgccctacctgccccggctgcccatcctgcccagcaagaccaggaccctgaagaagcaggtggagaacaaggaaaatattgaaggagcccaggatgccacagaaaattctgccagcagcctggcccctggcttcatccggggggcccaggccagcagcggcagccctgccctgcccaggaagcagagggacaagagccccagcagcctgctggaggatgccaaggagacctgcttcacccgggacaggaagggcggcttcttcagcagcttcatgaagaagagaaatgcccccaccccacccaagaggagcagcagcttccgggagatggagaaccagccccacaagaagtatgagctgactggaaacttcagctctgtggccagcctgcagcacgcagatggcttctccttcaccccagcccagcaggaggccaacctggtgccccccaagtgctatggaggcagctttgcccagaggaacctgtgcaatgatgatggcggcggcggcggcggcagcggcacagctgggggcggctggagcggcatcaccggcttcttcacccccaggctcatcaagaagaccctgggcctgcgggccggcaagcccacagccagtgatgacaccagcaagcccttccccaggagcaacagcaccagctccatgagcagcggcctgcctgagcaggacaggatggccatgaccctgcccaggaactgccagaggagcaagctgcagctggagaggacagtgtccaccagcagccagccagaagaaaatgtggaccgggccaatgacatgctgcccaagaagtctgaggagagcgctgcccccagccgggagcggcccaaggccaagctgctgcccaggggggccacagccctgcccctgcggaccccatctggggacctggccatcacagagaaggaccccccaggagtgggcgtggccggcgtggccgccgcccccaagggcaaggagaagaatggaggagcccggctgggcatggccggcgtgcctgaagatggagagcagcccggctggcccagccctgccaaggccgcccctgtgctgcccaccacccacaaccacaaggtgcctgtgctgatcagccccaccctgaagcacaccccagcagatgtgcagctgattggaacagacagccagggcaacaagttcaagctgctgtctgagcaccaggtgaccagcagcggggacaaggaccggcccaggagagtgaagcccaagtgtgcccctcctcctcctcctgtgatgaggctgctgcagcaccccagcatctgcagcgaccccacagaggagcccacagccctgacagctggccagagcaccagcgagacccaggagggcggcaagaaggccgccctgggcgctgtgcccatcagcggcaaggccggccggcctgtgatgcccccaccccaggtgcccctgcccaccagcagcatcagccctgccaagatggccaatggaacagctggcaccaaggtggccctgaggaagaccaagcaggccgctgagaagatctctgctgacaagatcagcaaggaggccctgctggagtgtgccgacctgctgagcagcgccctgacagagcctgtgcccaacagccagctggtggacaccggccaccagctgctggactactgcagcggctacgtggactgcatcccccagaccaggaacaagtttgccttccgggaggccgtgtccaagctggagctgagcctgcaggagctgcaggtgtcctctgctgctgctggggtgcccggcaccaaccctgtgctgaacaacctgctgagctgtgtgcaggagatcagtgatgtggtgcagaggtag

SEQ ID NO: 175655 - DNA, 3177 bp, synthetic construct
  misc_feature 1..3177: note = Description of Artificial Sequence: Synthetic coding sequence
  source 1..3177: mol_type = other DNA
atgggccagcaggtgggccgggtgggggaggcccctggcctgcagcagccccagccccggggcatccggggcagcagcgctgcccggcccagcggcagaagaagagatcctgctggccgcaccacagagaccggcttcaacatcttcacccagcacgaggccctgcaccggccctacggctgtgatgtggagccccaggccctgaatgaggccatccgctggagcagcaaggagaacctgctgggcgccacagaaagtgaccccaacctgtttgtggccctgtatgactttgtggccagcggggacaacaccctgagcatcaccaagggggagaagctgcgggtgctgggctacaaccagaatggagagtggagcgaggtgcgcagcaagaatggccagggctgggtgcccagcaactacatcacccctgtgaacagcctggagaagcacagctggtaccacggccctgtgagccgctctgctgctgagtacctgctgagcagcctcatcaatggcagcttcctggtgcgggagagcgagagcagccctggccagctgagcatcagcctgcgctatgagggccgggtgtaccactaccgcatcaacaccacagcagatggcaaggtgtatgtgacagctgagagccgcttcagcaccctggccgagctggtgcaccaccacagcacagtggctgatggcctggtgaccaccctgcactacccagcccccaagtgcaacaagcccaccgtgtatggagtgagccccatccatgacaagtgggagatggagaggacagacatcaccatgaagcacaagctgggcggcggccagtacggggaggtgtatgtgggcgtgtggaagaagtacagcctgactgtggccgtgaagaccctgaaggaggacaccatggaggtggaggagttcctgaaggaggccgctgtgatgaaggagatcaagcaccccaacctggtgcagctgctgggcgtgtgcaccctggagccccccttctacatcgtgacagagtacatgccctacggcaacctgctggactacctgcgggagtgcaaccgggaggaggtgacagctgtggtgctgctgtacatggccacccagatcagcagcgccatggagtacctggagaagaagaacttcatccaccgggacctggccgccaggaactgcctggtgggggagaaccacgtggtgaaggtggccgactttggcctgagccggctgatgaccggggacacctacacagcccacgccggggccaagttccccatcaagtggacagcccctgagagcctggcctacaacaccttcagcatcaagagtgatgtgtgggccttcggcgtgctgctgtgggagatcgccacctacggcatgagcccctacccaggcatcgacctgagccaggtgtatgacctgctggagaagggctacaggatggagcagcctgagggctgcccccccaaggtgtatgagctgatgagggcctgctggaagtggagccctgctgaccggcccagctttgctgagacccaccaggcctttgagaccatgtttcatgacagcagcatcagcgaggaggtggccgaggagctgggccgggccgccagcagcagctctgtggtgccctacctgccccggctgcccatcctgcccagcaagaccaggaccctgaagaagcaggtggagaacaaggaaaatattgaaggagcccaggatgccacagaaaattctgccagcagcctggcccctggcttcatccggggggcccaggccagcagcggcagccctgccctgcccaggaagcagagggacaagagccccagcagcctgctggaggatgccaaggagacctgcttcacccgggacaggaagggcggcttcttcagcagcttcatgaagaagagaaatgcccccaccccacccaagaggagcagcagcttccgggagatggagaaccagccccacaagaagtatgagctgaccggcctgcctgagcaggacaggatggccatgaccctgcccaggaactgccagaggagcaagctgcagctggagaggacagtgtccaccagcagccagcctgaggagaatgtggaccgggccaatgacatgctgcccaagaagtctgaggagagcgctgcccccagccgggagcggcccaaggccaagctgctgcccaggggggccacagccctgcccctgcggacccccagcggggacctggccatcacagagaaggaccccccaggagtgggcgtggccggcgtggccgccgcccccaagggcaaggagaagaatggaggagcccggctgggcatggccggcgtgcctgaagatggagagcagcccggctggcccagccctgccaaggccgcccctgtgctgcccaccacccacaaccacaaggtgcctgtgctgatcagccccaccctgaagcacaccccagcagatgtgcagctgattggaacagacagccagggcaacaagttcaagctgctgtctgagcaccaggtgaccagcagcggggacaaggaccggccccggcgggtgaagcccaagtgtgcccctcctcctcctcctgtgatgaggctgctgcagcaccccagcatctgcagcgaccccacagaggagcccacagccctgacagctggccagagcaccagcgagacccaggagggcggcaagaaggccgccctgggcgctgtgcccatcagcggcaaggccggccggcctgtgatgcccccaccccaggtgcccctgcccaccagcagcatcagccctgccaagatggccaacggcacagctggcaccaaggtggccctgaggaagaccaagcaggccgctgagaagatctctgctgacaagatcagcaaggaggccctgctggagtgtgccgacctgctgagcagcgccctgacagagcctgtgcccaacagccagctggtggacaccggccaccagctgctggactactgcagcggctacgtggactgcatcccccagaccaggaacaagtttgccttccgggaggccgtgtccaagctggagctgagcctgcaggagctgcaggtgagcagcgctgctgctggggtgcccggcaccaaccctgtgctgaacaacctgctgagctgtgtgcaggagatcagtgatgtggtgcagaggtag

SEQ ID NO: 175656 - DNA, 3240 bp, synthetic construct
  misc_feature 1..3240: note = Description of Artificial Sequence: Synthetic coding sequence
  source 1..3240: mol_type = other DNA
atgggccagcaggtgggccgggtgggggaggcccctggcctgcagcagccccagccccggggcatccggggcagcagcgctgcccggcccagcggcagaagaagagatcctgctggccgcaccacagagaccggcttcaacatcttcacccagcacgaccactttgccagctgtgtggaggatggctttgaaggagacaagacaggaggcagcagccctgaggccctgcaccggccctacggctgtgatgtggagccccaggccctgaatgaggccatccgctggagcagcaaagaaaacctgctgggcgccacagaaagtgaccccaacctgtttgtggccctgtatgactttgtggccagcggggacaacaccctgagcatcaccaagggggagaagctgcgggtgctgggctacaaccagaatggagagtggagcgaggtgcgcagcaagaatggccagggctgggtgcccagcaactacatcacccctgtgaacagcctggagaagcacagctggtaccacggccctgtgagccgctctgctgctgagtacctgctgagcagcctcatcaatggcagcttcctggtgcgggagagcgagagcagccctggccagctgagcatcagcctgcgctatgagggccgggtgtaccactaccgcatcaacaccacagcagatggcaaggtgtatgtgacagctgagagccgcttcagcaccctggccgagctggtgcaccaccacagcacagtggctgatggcctggtgaccaccctgcactacccagcccccaagtgcaacaagcccaccgtgtatggagtgagccccatccatgacaagtgggagatggagaggacagacatcaccatgaagcacaagctgggcggcggccagtatggagaggtgtatgtgggcgtgtggaagaagtacagcctgactgtggccgtgaagaccctgaaggaggacaccatggaggtggaggagttcctgaaggaggccgctgtgatgaaggagatcaagcaccccaacctggtgcagctgctgggcgtgtgcaccctggagccccccttctacatcgtgacagagtacatgccctacggcaacctgctggactacctgcgggagtgcaaccgggaggaggtgacagctgtggtgctgctgtacatggccacccagatcagcagcgccatggagtacctggagaagaagaacttcatccaccgggacctggccgccaggaactgcctggtgggagaaaatcatgtggtgaaggtggccgactttggcctgagccggctgatgactggagacacctacacagcccatgctggggccaagttccccatcaagtggacagcccctgagagcctggcctacaacaccttcagcatcaagagtgatgtgtgggcctttggagtgctgctgtgggagatcgccacctacggcatgagcccctacccaggcatcgacctgagccaggtgtatgacctgctggagaagggctacaggatggagcagcctgagggctgcccccccaaggtgtatgagctgatgagggcctgctggaagtggagccctgctgaccggcccagctttgctgagacccaccaggcctttgagaccatgtttcatgacagcagcatcagcgaggaggtggccgaggagctgggccgggccgccagcagcagctctgtggtgccctacctgccccggctgcccatcctgcccagcaagaccaggaccctgaagaagcaggtggagaacaaggagaacatcgagggcgcccaggatgccacagagaacagcgccagcagcctggcccctggcttcatccggggggcccaggccagcagcggcagccctgccctgcccaggaagcagagggacaagagccccagcagcctgctggaggatgccaaggagacctgcttcacccgggacagaaaaggaggcttcttcagcagcttcatgaagaagagaaatgcccccaccccacccaagaggagcagcagcttccgggagatggagaaccagccccacaagaagtatgagctgaccggcctgcctgagcaggacaggatggccatgaccctgcccaggaactgccagaggagcaagctgcagctggagaggacagtgtccaccagcagccagccagaagaaaatgtggaccgggccaatgacatgctgcccaagaagtctgaggagagcgctgcccccagccgggagcggcccaaggccaagctgctgcccaggggggccacagccctgcccctgcggaccccatctggggacctggccatcacagagaaggaccccccaggagtgggcgtggccggcgtggccgccgcccccaagggcaaggagaagaatggaggagcccggctgggcatggccggcgtgcctgaagatggagagcagcccggctggcccagccctgccaaggccgcccctgtgctgcccaccacccacaaccacaaggtgcctgtgctgatcagccccaccctgaagcacaccccagcagatgtgcagctgattggaacagacagccagggcaacaagttcaagctgctgtctgagcaccaggtgaccagcagcggggacaaggaccggcccaggagagtgaagcccaagtgtgcccctcctcctcctcctgtgatgaggctgctgcagcaccccagcatctgcagcgaccccacagaggagcccacagccctgacagctggccagagcaccagcgagacccaggagggcggcaagaaggccgccctgggcgctgtgcccatcagcggcaaggccggccggcctgtgatgcccccaccccaggtgcccctgcccaccagcagcatcagccctgccaagatggccaatggaacagctggcaccaaggtggccctgaggaagaccaagcaggccgctgagaagatctctgctgacaagatcagcaaggaggccctgctggagtgtgccgacctgctgagcagcgccctgacagagcctgtgcccaacagccagctggtggacaccggccaccagctgctggactactgcagcggctacgtggactgcatcccccagaccaggaacaagtttgccttccgggaggccgtgtccaagctggagctgagcctgcaggagctgcaggtgtcctctgctgctgctggggtgcccggcaccaaccctgtgctgaacaacctgctgagctgtgtgcaggagatcagtgatgtggtgcagaggtag

SEQ ID NO: 175657 - DNA, 2349 bp, synthetic construct
  misc_feature 1..2349: note = Description of Artificial Sequence: Synthetic coding sequence
  source 1..2349: mol_type = other DNA
atgaaccctgagaaggactttgcccccctgacccccaacatcgtgcgggccctgaatgacaagctgtatgagaagaggaaggtggccgccctggagattgagaagctggtgcgggagtttgtggcccagaacaacacagtgcagatcaagcacgtgatccagaccctgagccaggagtttgccctgagccagcacccccacagcaggaagggcggcctcatcggcctggccgcctgcagcatcgccctgggcaaggacagcggcctgtacctgaaggagctgattgagcctgtgctgacctgcttcaatgatgctgacagccggctgcgctactatgcctgtgaggccctgtacaacatcgtgaaggtggcccggggagctgtgctgccccacttcaacgtgctgtttgatggcctgagcaagctggccgctgaccctgaccccaacgtgaagagcggcagcgagctgctggaccggctgctgaaggacatcgtgacagagagcaacaagtttgacctggtgtccttcatccccctgctgcgggagcgcatctacagcaacaaccagtatgcccggcagttcatcatctcctggatcctggtgctggagagcgtgcctgacatcaacctgctggactacctgcctgagatcctggatggcctcttccagatcctgggggacaacgggaaggagatcaggaagatgtgtgaggtggtgctgggggagttcctgaaggagatcaagaagaaccccagctctgtgaagtttgctgagatggccaacatcctggtgatccactgccagaccacagatgacctgatccagctgacagccatgtgctggatgagggagttcatccagctggccggccgggtgatgctgccctacagcagcggcatcctgacagctgtgctgccctgcctggcctatgatgacaggaagaagagcatcaaggaggtggccaacgtgtgcaaccagagcctgatgaagctggtgaccccagaagatgatgagctggatgagctgcggcccggccagaggcaggccgagcccaccccagatgatgccctgcccaagcaggagggcacagccagcggcggcccagatggcagctgtgacagcagcttcagcagcggcatctctgtgttcaccgctgccagcacagagcgggcccctgtgaccctgcacctggatggcatcgtgcaggtgctgaactgccacctgagtgacacagccatcggcatgatgaccagaattgctgtgctgaagtggctgtaccacctgtacatcaagacccccaggaagatgttccgccacacagacagcctcttccccatcctgctgcagaccctgagtgatgaaagtgatgaggtgatcctgaaggacctggaggtgctggccgagatcgccagcagccctgctggccagacagatgaccccggccccctggatggccctgacctgcaggccagccacagcgagctgcaggtgcccaccccaggccgggccggcctgctgaacaccagcggcaccaagggcctggagtgcagccccagcacccccaccatgaacagctacttctacaagttcatgatcaacctgctgaagcgcttcagcagcgagaggaagctgctggaggtgcggggccccttcatcatccggcagctgtgcctgctgctgaatgctgagaacatcttccacagcatggctgacatcctgctgcgggaggaggacctgaagtttgccagcaccatggtgcacgccctgaacaccatcctgctgaccagcacagagctgttccagctgaggaaccagctgaaggacctgaagaccctggagagccagaacctcttctgctgcctgtaccgctcctggtgccacaaccctgtgaccaccgtgtccctgtgcttcctgacccagaactacagacatgcctatgacctgatccagaagtttggagacctggaggtgacagtggacttcctggccgaggtggacaagctggtgcagctgattgaatgtcccatcttcacctacctgcggctgcagctgctggatgtgaagaacaacccctacctgatcaaggccctgtatggcctgctgatgctgctgccccagagcagcgccttccagctgctgagccaccggctgcagtgtgtgcccaaccctgagctgctgcagacagaggacagcctgaaggccgcccccaagagccagaaggctgacagccccagcattgattatgcagagctgctgcagcactttgagaaggtgcagaacaagcacctggaggtgcgccaccagaggagcggccgcggggaccacctggaccggcgggtggtgctgtag

SEQ ID NO: 175658 - DNA, 645 bp, synthetic construct
  misc_feature 1..645: note = Description of Artificial Sequence: Synthetic coding sequence
  source 1..645: mol_type = other DNA
atggctgacatcctgctgcgggaggaggacctgaagtttgccagcaccatggtgcacgccctgaacaccatcctgctgaccagcacagagctgttccagctgaggaaccagctgaaggacctgaagaccctggagagccagaacctcttctgctgcctgtaccgctcctggtgccacaaccctgtgaccaccgtgtccctgtgcttcctgacccagaactacagacatgcctatgacctgatccagaagtttggagacctggaggtgacagtggacttcctggccgaggtggacaagctggtgcagctgattgaatgtcccatcttcacctacctgcggctgcagctgctggatgtgaagaacaacccctacctgatcaaggccctgtatggcctgctgatgctgctgccccagagcagcgccttccagctgctgagccaccggctgcagtgtgtgcccaaccctgagctgctgcagacagaggacagcctgaaggccgcccccaagagccagaaggctgacagccccagcattgattatgcagagctgctgcagcactttgagaaggtgcagaacaagcacctggaggtgcgccaccagaggagcggccgcggggaccacctggaccggcgggtggtgctgtag

SEQ ID NO: 175659 - DNA, 1062 bp, synthetic construct
  misc_feature 1..1062: note = Description of Artificial Sequence: Synthetic coding sequence
  source 1..1062: mol_type = other DNA
atggccagctcctggccacccctggagctgcagagcagcaaccagagccagctgttcccccagaatgccacagcctgtgacaatgcccctgaggcctgggacctgctgcaccgggtgctgcccaccttcatcatcagcatctgcttcttcggcctgctgggcaacctgtttgtgctgctggtgttcctgctgccccggcggcagctgaatgtggccgagatctacctggccaacctggccgccagtgacctggtgtttgtgctgggcctgcccttctgggccgagaacatctggaaccagttcaactggccctttggagccctgctgtgcagggtcatcaacggggtcatcaaggccaacctcttcatcagcatcttcctggtggtggccatcagccaggaccgctacagagtgctggtgcaccccatggccagccggcggcagcagaggcggcggcaggcccgggtgacctgtgtgctgatctgggtggtgggcggcctgctgagcatccccaccttcctgctgcggagcatccaggccgtgcctgacctgaacatcacagcctgcatcctgctgctgccccatgaggcctggcactttgccagaattgtggagctgaacatcctgggcttcctgctgcccctggccgccatcgtgttcttcaactaccacatcctggccagcctgcggacccgggaggaggtgtccaggacccgctgtggcggcaggaaggacagcaagaccacagccctgatcctgaccctggtggtggccttcctggtgtgctgggccccctaccacttctttgccttcctggagttcctgttccaggtgcaggccgtgcggggctgcttctgggaggacttcatcgacctgggcctgcagctggccaacttctttgccttcaccaacagcagcctgaaccctgtgatctacgtgtttgtgggccgcctcttccgcaccaaggtgtgggagctgtacaagcagtgcacccccaagagcctggcccccatcagcagcagccacaggaaggagatcttccagctgttctggaggaactag

SEQ ID NO: 175660 - DNA, 1527 bp, synthetic construct
  misc_feature 1..1527: note = Description of Artificial Sequence: Synthetic coding sequence
  source 1..1527: mol_type = other DNA
atgccacccaagagaaatgagaagtacaagctgcccatccccttccctgagggcaaggtgctggatgacatggagggcaaccagtgggtgctgggcaagaagattggcagcggcggcttcggcctcatctacctggccttccccaccaacaagccagagaaggatgcccggcacgtggtgaaggtggagtaccaggagaatggccccctcttcagcgagctgaagttctaccagagggtggccaagaaggactgcatcaagaagtggattgaaaggaagcagctggactacctgggcatccccctcttctacggcagcggcctgacagagttcaagggccgcagctaccgcttcatggtgatggagcggctgggcatcgacctgcagaagatcagcggccagaatggcaccttcaagaagagcacagtgctgcagctgggcatccgcatgctggatgtgctggagtacatccatgaaaatgaatatgtgcacggggacatcaaggccgccaacctgctgctgggctacaagaacccagaccaggtgtacctggccgactatggcctgagctaccgctactgccccaacggcaaccacaagcagtaccaggagaaccccaggaagggccacaacggcaccatcgagttcaccagcctggatgcccacaagggcgtggccctgagcagaagaagtgatgtggagatcctgggctactgcatgctgcgctggctgtgtgggaagctgccctgggagcagaacctgaaggaccctgtggccgtgcagacagccaagaccaacctgctggatgagctgccccagagcgtgctgaagtgggcccccagcggcagcagctgctgtgagatcgcccagttcctggtgtgtgcccacagcctggcctatgatgagaagcccaactaccaggccctgaagaagatcctgaacccccacggcatccccctgggccccctggacttcagcaccaagggccagagcatcaacgtgcacacccccaacagccagaaggtggacagccagaaggccgccaccaagcaggtgaacaaggcccacaacagactcatcgagaagaaggtgcacagcgagaggtctgctgagagctgtgccacctggaaggtgcagaaggaggagaagctgattggcctgatgaacaatgaggccgcccaggagagcacccggcggcggcagaagtaccaggagagccaggagcccctgaatgaggtgaacagcttcccccagaagatctcctacacccagttccccaacagcttctatgagccccaccaggacttcaccagcccagacatcttcaagaagagccgcagccccagctggtacaagtacaccagcacagtgtccacaggcatcacagacctggagagcagcacaggcctgtggcccaccatcagccagttcaccctgtctgaggagaccaatgctgatgtgtactactaccgcatcatcatccctgtgctgctgatgctggtgttcctggccctcttcttcctgtag

SEQ ID NO: 175661 - DNA, 1203 bp, synthetic construct
  misc_feature 1..1203: note = Description of Artificial Sequence: Synthetic coding sequence
  source 1..1203: mol_type = other DNA
atgccacccaagagaaatgagaagtacaagctgcccatccccttccctgagggcaaggtgctggatgacatggagggcaaccagtgggtgctgggcaagaagattggcagcggcggcttcggcctcatctacctggccttccccaccaacaagccagagaaggatgcccggcacgtggtgaaggtggagtaccaggagaatggccccctcttcagcgagctgaagttctaccagagggtggccaagaaggactgcatcaagaagtggattgaaaggaagcagctggactacctgggcatccccctcttctacggcagcggcctgacagagttcaagggccgcagctaccgcttcatggtgatggagcggctgggcatcgacctgcagaagatcagcggccagaatggcaccttcaagaagagcacagtgctgcagctgggcatccgcatgctggatgtgctggagtacatccatgaaaatgaatatgtgcacggggacatcaaggccgccaacctgctgctgggctacaagaacccagaccaggtgtacctggccgactatggcctgagctaccgctactgccccaacggcaaccacaagcagtaccaggagaaccccaggaagggccacaacggcaccatcgagttcaccagcctggatgcccacaagggcgtggccctgagcagaagaagtgatgtggagatcctgggctactgcatgctgcgctggctgtgtgggaagctgccctgggagcagaacctgaaggaccctgtggccgtgcagacagccaagaccaacctgctggatgagctgccccagagcgtgctgaagtgggcccccagcggcagcagctgctgtgagatcgcccagttcctggtgtgtgcccacagcctggcctatgatgagaagcccaactaccaggccctgaagaagatcctgaacccccacggcatccccctgggccccctggacttcagcaccaagggccagagcatcaacgtgcacacccccaacagccagaaggtggacagccagaaggccgccaccaagcaggtgaacaaggcccacaacagactcatcgagaagaaggtgcacagcgagaggtctgctgagagctgtgccacctggaaggtgcagaaggaggagaagctgattggcctgatgaacaatgaggccgcccagatccggcagctgggctactag

SEQ ID NO: 175662 - DNA, 1191 bp, synthetic construct
  misc_feature 1..1191: note = Description of Artificial Sequence: Synthetic coding sequence
  source 1..1191: mol_type = other DNA
atgccacccaagagaaatgagaagtacaagctgcccatccccttccctgagggcaaggtgctggatgacatggagggcaaccagtgggtgctgggcaagaagattggcagcggcggcttcggcctcatctacctggccttccccaccaacaagccagagaaggatgcccggcacgtggtgaaggtggagtaccaggagaatggccccctcttcagcgagctgaagttctaccagagggtggccaagaaggactgcatcaagaagtggattgaaaggaagcagctggactacctgggcatccccctcttctacggcagcggcctgacagagttcaagggccgcagctaccgcttcatggtgatggagcggctgggcatcgacctgcagaagatcagcggccagaatggcaccttcaagaagagcacagtgctgcagctgggcatccgcatgctggatgtgctggagtacatccatgaaaatgaatatgtgcacggggacatcaaggccgccaacctgctgctgggctacaagaacccagaccaggtgtacctggccgactatggcctgagctaccgctactgccccaacggcaaccacaagcagtaccaggagaaccccaggaagggccacaacggcaccatcgagttcaccagcctggatgcccacaagggcgtggccctgagcagaagaagtgatgtggagatcctgggctactgcatgctgcgctggctgtgtgggaagctgccctgggagcagaacctgaaggaccctgtggccgtgcagacagccaagaccaacctgctggatgagctgccccagagcgtgctgaagtgggcccccagcggcagcagctgctgtgagatcgcccagttcctggtgtgtgcccacagcctggcctatgatgagaagcccaactaccaggccctgaagaagatcctgaacccccacggcatccccctgggccccctggacttcagcaccaagggccagagcatcaacgtgcacacccccaacagccagaaggtggacagccagaaggccgccaccaagcaggtgaacaaggcccacaacagactcatcgagaagaaggtgcacagcgagaggtctgctgagagctgtgccacctggaaggtgcagaaggaggagaagctgattggcctgatgaacaatgaggccgcccagttcagatag

SEQ ID NO: 175663 - DNA, 876 bp, synthetic construct
  misc_feature 1..876: note = Description of Artificial Sequence: Synthetic coding sequence
  source 1..876: mol_type = other DNA
atgccacccaagagaaatgagaagtacaagctgcccatccccttccctgagggcaaggtgctggatgacatggagggcaaccagtgggtgctgggcaagaagattggcagcggcggcttcggcctcatctacctggccttccccaccaacaagccagagaaggatgcccggcacgtggtgaaggtggagtaccaggagaatggccccctcttcagcgagctgaagttctaccagagggtggccaagaaggactgcatcgtgtttgtggtgaagaagtggattgaaaggaagcagctggactacctgggcatccccctcttctacggcagcggcctgacagagttcaagggccgcagctaccgcttcatggtgatggagcggctgggcatcgacctgcagaagatcagcggccagaatggcaccttcaagaagagcacagtgctgcagctgggcatccgcatgctggatgtgctggagtacatccatgaaaatgaatatgtgcacggggacatcaaggccgccaacctgctgctgggctacaagaacccagaccaggtgtacctggccgactatggcctgagctaccgctactgccccaacggcaaccacaagcagtaccaggagaaccccaggaagggccacaacggcaccatcgagttcaccagcctggatgcccacaagggcgtggccctgagcagaagaagtgatgtggagatcctgggctactgcatgctgcgctggctgtgtgggaagctgccctgggagcagaacctgaaggaccctgtggccgtgcagacagccaagaccaagtacaagttcagcagcatcagcagctgcacagcccctggcctgaagggctacatcaagggcagctag

SEQ ID NO: 175664 - DNA, 1527 bp, synthetic construct; identical to SEQ ID NO: 175660
  misc_feature 1..1527: note = Description of Artificial Sequence: Synthetic coding sequence
  source 1..1527: mol_type = other DNA

SEQ ID NO: 175665 - DNA, 1458 bp, synthetic construct
  misc_feature 1..1458: note = Description of Artificial Sequence: Synthetic coding sequence
  source 1..1458: mol_type = other DNA
atggagggcaaccagtgggtgctgggcaagaagattggcagcggcggcttcggcctcatctacctggccttccccaccaacaagccagagaaggatgcccggcacgtggtgaaggtggagtaccaggagaatggccccctcttcagcgagctgaagttctaccagagggtggccaagaaggactgcatcaagaagtggattgaaaggaagcagctggactacctgggcatccccctcttctacggcagcggcctgacagagttcaagggccgcagctaccgcttcatggtgatggagcggctgggcatcgacctgcagaagatcagcggccagaatggcaccttcaagaagagcacagtgctgcagctgggcatccgcatgctggatgtgctggagtacatccatgaaaatgaatatgtgcatggagacatcaaggccgccaacctgctgctgggctacaagaacccagaccaggtgtacctggccgactatggcctgagctaccgctactgccccaatggaaaccacaagcagtaccaggagaaccccaggaagggccacaacggcaccatcgagttcaccagcctggatgcccacaagggcgtggccctgagccgccgcagtgatgtggagatcctgggctactgcatgctgcgctggctgtgtgggaagctgccctgggagcagaacctgaaggaccctgtggccgtgcagacagccaagaccaacctgctggatgagctgccccagagcgtgctgaagtgggcccccagcggcagcagctgctgtgaaattgcccagttcctggtgtgtgcccacagcctggcctatgatgagaagcccaactaccaggccctgaagaagatcctgaacccccacggcatccccctgggccccctggacttcagcaccaagggccagagcatcaacgtgcacacccccaacagccagaaggtggacagccagaaggccgccaccaagcaggtgaacaaggcccacaaccggctgattgagaagaaggtgcacagcgagaggtctgctgagagctgtgccacctggaaggtgcagaaggaggagaagctgattggcctgatgaacaatgaagctgcccaggagagcacccggcggcggcagaagtaccaggagagccaggagcccctgaatgaggtgaacagcttcccccagaagatctcctacacccagttccccaacagcttctatgagccccaccaggacttcaccagcccagacatcttcaagaagagccgcagccccagctggtacaagtacaccagcacagtgtccacaggcatcacagacctggagagcagcacaggcctgtggcccaccatcagccagttcaccctgtctgaggagaccaatgctgatgtgtactactaccgcatcatcatccctgtgctgctgatgctggtgttcctggccctcttcttcctgtag

SEQ ID NO: 175666 - DNA, 531 bp, synthetic construct
  misc_feature 1..531: note = Description of Artificial Sequence: Synthetic coding sequence
  source 1..531: mol_type = other DNA
atggccatgagctttgagtggccctggcagtaccgcttcccccccttcttcaccctgcagcccaacgtggacacccggcagaagcagctggccgcctggtgcagcctggtgctgtccttctgccgcctgcacaagcagagctccatgacagtgatggaggcccaggagagccccctcttcaacaacgtgaagctgcagaggaagctgcctgtggagagcatccagatcgtgctggaggagctgaggaagaagggcaacctggagtggctggacaagagcaagagcagcttcctgatcatgtggaggaggcctgaggagtggggcaagctgatctaccagtgggtgagccgcagcggccagaacaacagcgtcttcaccctgtatgagctgaccaacggggaggacacagaagatgaggagttccacggcctggatgaggccaccctgctgcgggccctgcaggccctgcagcaggagcacaaggccgagatcatcaccgtgtctgatggccggggcgtgaagttcttctag

SEQ ID NO: 175667 - DNA, 984 bp, synthetic construct
  misc_feature 1..984: note = Description of Artificial Sequence: Synthetic coding sequence
  source 1..984: mol_type = other DNA
atgtccttcctgggcggcttcttcggccccatctgtgaaattgacatcgtgctgaatgatggagagaccaggaagatggccgagatgaagacagaagatggcaaggtggagaagcactacctgttctatgatggagagagcgtgtctgggaaggtgaacctggccttcaagcagcccgggaagaggctggagcaccagggcatccgcatcgagtttgtgggccagatcgagctgttcaatgacaagagcaacacccatgaatttgtgaacctggtgaaggagctggccctgcccggggagctgacccagagccgctcctatgactttgagttcatgcaggtggagaagccctatgagagctacatcggggccaacgtgcggctgcgctacttcctgaaggtgaccatcgtgcggcggctgacagacctggtgaaggagtatgacctgattgtgcaccagctggccacctacccagatgtgaacaacagcatcaagatggaggtgggcatcgaggactgcctgcacatcgagtttgagtacaacaagagcaagtaccacctgaaggatgtgattgtgggcaagatctacttcctgctggtgcgcatcaagatccagcacatggagctgcagctgatcaagaaggagatcactggaattggccccagcaccaccacagaaacagagaccatcgccaagtatgagatcatggatggagcccctgtgaagggggagagcatccccatccgcctcttcctggccggctatgaccccacccccaccatgagagatgtgaacaagaagttctctgtgcgctacttcctgaacctggtgctggtggatgaggaggaccggcgctacttcaagcagcaggagatcatcctgtggaggaaggcccctgagaagctgaggaagcagaggaccaacttccaccagagatttgagagccctgagagccaggccagcgctgagcagcctgagatgtag

SEQ ID NO: 175668 - DNA, 984 bp, synthetic construct; identical to SEQ ID NO: 175667
  misc_feature 1..984: note = Description of Artificial Sequence: Synthetic coding sequence
  source 1..984: mol_type = other DNA

SEQ ID NO: 175669 - DNA, 756 bp, synthetic construct
  misc_feature 1..756: note = Description of Artificial Sequence: Synthetic coding sequence
  source 1..756: mol_type = other DNA
atgtccttcctgggcggcttcttcggccccatctgtgaaattgacatcgtgctgaatgatggagagaccaggaagatggccgagatgaagacagaagatggcaaggtggagaagcactacctgttctatgatggagagagcgtgtctgggaaggtgaacctggccttcaagcagcccgggaagaggctggagcaccagggcatccgcatcgagtttgtgggccagatcgagctgttcaatgacaagagcaacacccatgaatttgtgaacctggtgaaggagctggccctgcccggggagctgacccagagccgctcctatgactttgagttcatgcaggtggagaagccctatgagagctacatcggggccaacgtgcggctgcgctacttcctgaaggtgaccatcgtgcggcggctgacagacctggtgaaggagtatgacctgattgtgcaccagctggccacctacccagatgtgaacaacagcatcaagatggaggtgggcatcgaggactgcctgcacatcgagtttgagtacaacaagagcaagtaccacctgaaggatgtgattgtgggcaagatctacttcctgctggtgcgcatcaagatccagcacatggagctgcagctgatcaagaaggagatcactggaattggccccagcaccaccacagaaacagagaccatcgccaagtatgagatcatggatggagcccctgtgaagggggacaacttcatggagaagagcagctag

SEQ ID NO: 175670 - DNA, 651 bp, synthetic construct
  misc_feature 1..651: note = Description of Artificial Sequence: Synthetic coding sequence
  source 1..651: mol_type = other DNA
atgcaggtggagaagccctatgagagctacatcggggccaacgtgcggctgcgctacttcctgaaggtgaccatcgtgcggcggctgacagacctggtgaaggagtatgacctgattgtgcaccagctggccacctacccagatgtgaacaacagcatcaagatggaggtgggcatcgaggactgcctgcacattgaatttgagtacaacaagagcaagtaccacctgaaggatgtgattgtgggcaagatctacttcctgctggtgcgcatcaagatccagcacatggagctgcagctgatcaagaaggagatcaccggcatcggccccagcaccaccacagaaacagagaccatcgccaagtatgagatcatggatggagcccctgtgaagggggagagcatccccatccgcctcttcctggccggctatgaccccacccccaccatgagagatgtgaacaagaagttctctgtgcgctacttcctgaacctggtgctggtggatgaagaagatcggcgctacttcaagcagcaggagatcatcctgtggaggaaggcccctgagaagctgaggaagcagaggaccaacttccaccagagatttgagagccctgagagccaggccagcgctgagcagcctgagatgtag

SEQ ID NO: 175671 - DNA, 933 bp, synthetic construct
  misc_feature 1..933: note = Description of Artificial Sequence: Synthetic coding sequence
  source 1..933: mol_type = other DNA
atgacagagaaccccttccaggagcgctacagcgtggaggacctgagcaccttcggcatgtgcctgtgcatggtgcgctacgtgtatgatgccttctacaaggtgaacctggccttcaagcagcccgggaagaggctggagcaccagggcatcagaattgaatttgtgggccagatcgagctgttcaatgacaagagcaacacccatgaatttgtgaacctggtgaaggagctggccctgcctggagagctgacccagagccgctcctatgactttgagttcatgcaggtggagaagccctatgagagctacatcggggccaacgtgcggctgcgctacttcctgaaggtgaccatcgtgcggcggctgacagacctggtgaaggagtatgacctgattgtgcaccagctggccacctacccagatgtgaacaacagcatcaagatggaggtgggcatcgaggactgcctgcacattgaatttgagtacaacaagagcaagtaccacctgaaggatgtgattgtgggcaagatctacttcctgctggtgcgcatcaagatccagcacatggagctgcagctgatcaagaaggagatcaccggcatcggccccagcaccaccacagaaacagagaccatcgccaagtatgagatcatggatggagcccctgtgaagggggagagcatccccatccgcctcttcctggccggctatgaccccacccccaccatgagagatgtgaacaagaagttctctgtgcgctacttcctgaacctggtgctggtggatgaagaagatcggcgctacttcaagcagcaggagatcatcctgtggaggaaggcccctgagaagctgaggaagcagaggaccaacttccaccagagatttgagagccctgagagccaggccagcgctgagcagcctgagatgtag

SEQ ID NO: 175672 - DNA, 1011 bp, synthetic construct
  misc_feature 1..1011: note = Description of Artificial Sequence: Synthetic coding sequence
  source 1..1011: mol_type = other DNA
atgtccttcttcggcttcggccagagcgtggaggtggagatcctgctgaatgatgctgagagcaggaagagagctgagcacaagacagaagatggcaagaaggagaagtacttcctgttctatgatggagaaacagtgtctgggaaggtgtccctggccctgaagaaccccaacaagaggctggagcaccagggcatcaagattgagttcatcggccagatcgagctgtactatgaccggggcaaccaccacgagtttgtgtccctggtgaaggacctggcccggcctggagagatcacccagagccaggcctttgattttgagttcacccacgtggagaagccctatgagagctacacaggccagaatgtgaagctgcgctacttcctgcgggccaccatcagccggcggctgaatgatgtggtgaaggagatggacatcgtggtgcacaccctgagcacctacccagagctgaacagcagcatcaagatggaggtgggcatcgaggactgcctgcacatcgagtttgagtacaacaagagcaagtaccacctgaaggatgtgattgtgggcaagatctacttcctgctggtgcgcatcaagatcaagcacatggagattgacatcatcaagcgggagaccactggaacaggccccaacgtgtaccatgaaaatgacaccatcgccaagtatgagatcatggatggagcccctgtgcggggggagagcatccccatccgcctcttcctggccggctatgagctgacccccaccatgagggacatcaacaagaagttctctgtgcgctactacctgaacctggtgctgattgatgaggaggagcggcgctacttcaagcagcaggaggtggtgctgtggaggaaaggagacatcgtgaggaagtccatgagccaccaggccgccatcgccagccagagatttgagggcaccaccagcctgggggaggtgaggacccccagccagctgagtgacaacaactgccggcagtag

SEQ ID NO: 175673 - DNA, 666 bp, synthetic construct
  misc_feature 1..666: note = Description of Artificial Sequence: Synthetic coding sequence
  source 1..666: mol_type = other DNA
atgtttcatggcatcccagccaccccaggcattggagcccctggcaacaagccagagctgtatgaggaggtgaagctgtacaagaatgcccgggagcgggagaagtatgacaacatggccgagctgtttgctgtggtgaagaccatgcaggccctggagaaggcctacatcaaggactgtgtgagccccagcgagtacacagctgcctgcagccggctgctggtgcagtacaaggccgccttccggcaggtgcagggcagcgagatcagcagcattgatgagttctgcaggaagttccggctggactgccccctggccatggagcgcatcaaggaggaccggcccatcaccatcaaggatgacaagggcaacctgaaccgctgcatcgcagatgtggtgtccctcttcatcaccgtgatggacaagctgcggctggagatccgggccatggatgagatccagcctgacctgcgggagctgatggagaccatgcacaggatgagccacctgcccccagactttgagggccggcagacagtgtcccagtggctgcagaccctgagcggcatgtctgccagtgatgagctggatgacagccaggtgcggcagatgctgtttgacctggagagcgcctacaatgccttcaaccgcttcctgcacgcctag

SEQ ID NO: 175674 - DNA, 702 bp, synthetic construct
  misc_feature 1..702: note = Description of Artificial Sequence: Synthetic coding sequence
  source 1..702: mol_type = other DNA
atgtttcatggcatcccagccaccccaggcattggagcccctggcaacaagccagagctgtatgaggaggtgaagctgtacaagaatgcccgggagcgggagaagtatgacaacatggccgagctgtttgctgtggtgaagaccatgcaggccctggagaaggcctacatcaaggactgtgtgagccccagcgagtacacagctgcctgcagccggctgctggtgcagtacaaggccgccttccggcaggtgcagggcagcgagatcagcagcattgatgagttctgcaggaagttccggctggactgccccctggccatggagcgcatcaaggaggaccggcccatcaccatcaaggatgacaagggcaacctgaaccgctgcatcgcagatgtggtgtccctcttcatcaccgtgatggacaagctgcggctggagatccgggccatggatgagatccagcctgacctgcgggagctgatggagaccatgcacaggatgagccacctgcccccagactttgagggccggcagacagtgtcccagtggtgggtgtccctgcctgcccggcagagccctgctgtgcctgagaccctgcctgcccggcgcagccctgctgtgcccctgcggcccagcgcccccacctgccctgtgctgcacagccaggccgctgaccctgagagacatgtgggcgtgaggtag

SEQ ID NO: 175675 - DNA, 666 bp, synthetic construct; identical to SEQ ID NO: 175673
  misc_feature 1..666: note = Description of Artificial Sequence: Synthetic coding sequence
  source 1..666: mol_type = other DNA

SEQ ID NO: 175676 - DNA, 1791 bp, synthetic construct
  misc_feature 1..1791: note = Description of Artificial Sequence: Synthetic coding sequence
  source 1..1791: mol_type = other DNA
atggccgcccacctgtcctatggccgggtgaacctgaatgtgctgcgggaggccgtgcggcgggagctgcgggagttcctggacaagtgtgccggcagcaaggccatcgtgtgggatgagtacctgaccggccccttcggcctgattgcccagtacagcctgctgaaggagcacgaggtggagaagatgttcaccctgaagggcaaccggctgcctgctgctgatgtgaagaacatcatcttctttgtgcggccccggctggagctgatggacatcatcgcagaaaatgtgctgtctgaggaccggcggggccccacccgggacttccacatcctgtttgtgccccggcgcagcctgctgtgtgagcagaggctgaaggacctgggcgtgctgggcagcttcatccaccgggaggagtacagcctggacctgatcccctttgatggagacctgctgtccatggagagcgagggcgccttcaaggagtgctacctggagggggaccagaccagcctgtaccacgccgccaagggcctgatgaccctgcaggccctgtatggcaccatcccccagatctttggaaaaggagaatgtgcccggcaggtggccaacatgatgatccgcatgaagcgggagttcaccggcagccagaacagcatcttccctgtgtttgacaacctgctgctgctggacagaaatgtggacctgctgacccccctggccacccagctgacctatgagggcctgattgatgagatctacggcatccagaacagctatgtgaagctgcccccagagaagtttgcccccaagaagcagggagatggcggcaaggacctgcccacagaggccaagaagctgcagctgaacagcgctgaggagctgtatgcagagatccgggacaagaacttcaatgctgtgggctctgtgctgagcaagaaggccaagatcatctctgctgcctttgaggagcggcacaatgccaagacagtgggggagatcaagcagtttgtgtcccagctgccccacatgcaggccgcccggggcagcctggccaaccacaccagcattgctgagctgatcaaggatgtgaccaccagcgaggacttctttgacaagctgactgtggagcaggagttcatgagcggcatcgacacagacaaggtgaacaactacatcgaggactgcatcgcccagaagcacagcctcatcaaggtgctgcggctggtgtgcctgcagagcgtgtgcaacagcggcctgaagcagaaggtgctggactactacaagcgggagatcctgcagacctacggctatgagcacatcctgaccctgcacaacctggagaaggccggcctgctgaagccccagacaggaggcaggaacaactaccccaccatcaggaagaccctgcggctgtggatggatgatgtgaatgagcagaaccccacagacatctcctatgtgtacagcggctacgcccccctgtctgtgcggctggcccagctgctgagccggcccggctggaggagcattgaggaggtgctgcgcatcctgcccggcccccactttgaggagcggcagcccctgcccaccggcctgcagaagaagaggcagcctggagaaaatagagtgaccctcatcttcttcctgggcggcgtgacctttgctgagattgctgccctgcgcttcctgagccagctggaggatggcggcacagaatatgtgattgccaccaccaagctgatgaatggcacctcctggattgaggccctgatggagaagcccttctag

SEQ ID NO: 175677 - DNA, 1854 bp, synthetic construct
  misc_feature 1..1854: note = Description of Artificial Sequence: Synthetic coding sequence
  source 1..1854: mol_type = other DNA
atggccttcccccacaggccagatgcccctgagctgcctgacttctccatgctgaagaggctggcccgggaccagctgatctacctgctggagcagctgcccgggaagaaggacctcttcattgaagctgacctgatgagccccctggaccgcatcgccaacgtgtccatcctgaagcagcacgaggtggacaagctgtacaaggtggagaacaagccagccctgagcagcaatgagcagctgtgcttcctggtgcggccccgcatcaagaacatgagatacatcgccagcctggtgaatgctgacaagctggccggccgcaccaggaagtacaaggtgatcttcagcccccagaagttctacgcctgtgagatggtgctggaggaggagggcatctatggagatgtgtcctgtgatgagtgggccttcagcctgctgcccctggatgtggacctgctgtccatggagctgcctgagttcttccgggactacttcctggagggggaccagcgctggatcaacacagtggcccaggccctgcacctgctgagcaccctgtatggccccttccccaactgctacggcatcggccgctgtgccaagatggcctatgagctgtggaggaacctggaggaggaggaggatggagagaccaagggcagaagacctgagatcggccacatcttcctgctggacagagatgtggactttgtgacagccctgtgcagccaggtggtgtatgagggcctggtggatgacaccttccgcatcaagtgtggctctgtggactttggacctgaggtgaccagcagtgacaagagcctgaaggtgctgctgaatgctgaggacaaggtgttcaatgagatcagaaatgagcacttcagcaatgtgtttggcttcctgagccagaaggccaggaacctgcaggcccagtatgacagaagaagaggcatggacatcaagcagatgaagaactttgtgtcccaggagctgaagggcctgaagcaggagcaccggctgctgagcctgcacatcggggcctgtgagagcatcatgaagaagaagaccaagcaggacttccaggagctgatcaagacagagcacgccctgctggagggcttcaacatccgggagagcaccagctacatcgaggagcacatcgaccggcaggtgagccccatcgagagcctgcggctgatgtgcctgctgagcatcacagaaaatggcctcatccccaaggactaccgcagcctgaagacccagtacctgcagagctatggccctgagcacctgctgaccttcagcaacctgcggcgggccggcctgctgacagagcaggcccctggggacaccctgacagctgtggagagcaaggtgtccaagctggtgacagacaaggccgccggcaagatcacagatgccttcagcagcctggccaagaggagcaacttccgggccatcagcaagaagctgaacctgatcccccgggtggatggagaatatgacctgaaggtgccccgggacatggcctacgtgtttggaggagcctacgtgcccctgagctgccgcatcatcgagcaggtgctggagaggaggtcctggcagggcctggatgaggtggtgcggctgctgaactgcagcgactttgccttcacagacatgaccaaggaggacaaggccagcagcgagagcctgcggctcatcctggtggtgttcctgggcggctgcaccttcagcgagatcagcgccctgcgcttcctgggccgggagaagggctaccgcttcatcttcctgaccacagctgtgaccaacagcgcccggctgatggaggccatgtctgaggtgaaggcctag

SEQ ID NO: 175678 - DNA, 1719 bp, synthetic construct
  misc_feature 1..1719: note = Description of Artificial Sequence: Synthetic coding sequence
  source 1..1719: mol_type = other DNA
atgagccccctggacagaattgccaacgtgtccatcctgaagcagcacgaggtggacaagctgtacaaggtggagaacaagccagccctgagcagcaatgagcagctgtgcttcctggtgcggccccgcatcaagaacatgagatacatcgccagcctggtgaatgctgacaagctggccggccgcaccaggaagtacaaggtgatcttcagcccccagaagttctacgcctgtgagatggtgctggaggaggagggcatctatggagatgtgtcctgtgatgagtgggccttcagcctgctgcccctggatgtggacctgctgtccatggagctgcctgagttcttccgggactacttcctggagggggaccagcgctggatcaacacagtggcccaggccctgcacctgctgagcaccctgtatggccccttccccaactgctatggaattggccgctgtgccaagatggcctatgagctgtggaggaacctggaggaggaggaggatggagagaccaagggccggcggcctgagatcggccacatcttcctgctggacagagatgtggactttgtgacagccctgtgcagccaggtggtgtatgagggcctggtggatgacaccttccgcatcaagtgtggctctgtggactttggacctgaggtgaccagcagtgacaagagcctgaaggtgctgctgaatgctgaggacaaggtgttcaatgagatcagaaatgagcacttcagcaatgtgtttggcttcctgagccagaaggccaggaacctgcaggcccagtatgacagaagaagaggcatggacatcaagcagatgaagaactttgtgtcccaggagctgaagggcctgaagcaggagcaccggctgctgagcctgcacatcggggcctgtgagagcatcatgaagaagaagaccaagcaggacttccaggagctgatcaagacagaacatgccctgctggagggcttcaacatccgggagagcaccagctacatcgaggagcacatcgaccggcaggtgagccccatcgagagcctgcggctgatgtgcctgctgagcatcacagaaaatggcctcatccccaaggactaccgcagcctgaagacccagtacctgcagagctatggccctgagcacctgctgaccttcagcaacctgcggcgggccggcctgctgacagagcaggcccctggggacaccctgacagctgtggagagcaaggtgtccaagctggtgacagacaaggctgctgggaagatcacagatgccttcagcagcctggccaagaggagcaacttccgggccatcagcaagaagctgaacctgatcccccgggtggatggagaatatgacctgaaggtgccccgggacatggcctacgtgtttggaggagcctacgtgcccctgagctgccgcatcatcgagcaggtgctggagcggcgctcctggcagggcctggatgaggtggtgcggctgctgaactgcagcgactttgccttcacagacatgaccaaggaggacaaggccagcagcgagagcctgcggctcatcctggtggtgttcctgggcggctgcaccttcagcgagatcagcgccctgcgcttcctgggccgggagaagggctaccgcttcatcttcctgaccacagctgtgaccaacagcgcccggctgatggaggccatgtctgaggtgaaggcctag

SEQ ID NO: 175679 - DNA, 2391 bp, synthetic construct
  misc_feature 1..2391: note = Description of Artificial Sequence: Synthetic coding sequence
  source 1..2391: mol_type = other DNA
atgcccaccacccagcagagcccccaggatgagcaggagaagctgctggatgaggccatccaggccgtgaaggtgcagagcttccagatgaagcgctgcctggacaagaacaagctgatggatgccctgaagcacgccagcaacatgctgggggagctgcggacctccatgctgagccccaagagctactatgagctgtacatggccatcagtgatgagctgcactacctggaggtgtacctgacagatgaatttgccaagggcaggaaggtggccgacctgtatgagctggtgcagtatgccggcaacatcatcccccggctgtacctgctgatcaccgtgggcgtggtgtatgtgaagagcttcccccagagcaggaaggacatcctgaaggacctggtggagatgtgccggggcgtgcagcaccccctgcggggcctcttcctgaggaactacctgctgcagtgcaccaggaacatcctgcctgatgaaggagagcccacagatgaggagaccactggagacatcagtgacagcatggactttgtgctgctgaactttgctgagatgaacaagctgtgggtgaggatgcagcaccagggccacagccgggaccgggagaagcgggagcgggagcggcaggagctgcgcatcctggtgggcaccaacctggtgcggctgagccagctggagggcgtgaatgtggagcgctacaagcagatcgtgctgaccggcatcctggagcaggtggtgaactgcagagatgccctggcccaggagtacctgatggagtgcatcatccaggtgtttcctgatgagttccacctgcagaccctgaaccccttcctgcgggcctgtgccgagctgcaccagaatgtgaatgtgaagaacatcatcatcgccctgattgaccggctggccctgtttgcccacagagaagatggccctggcatcccagctgacatcaagctgtttgacatcttcagccagcaggtggccaccgtcatccagagccggcaggacatgcccagtgaagatgtggtgtccctgcaggtgtccctcatcaacctggccatgaagtgctacccagacagagtggactatgtggacaaggtgctggagaccaccgtggagatcttcaacaagctgaacctggagcacatcgccaccagcagcgctgtgtccaaggagctgacccggctgctgaagatccctgtggacacctacaacaacatcctgactgtgctgaagctgaagcacttccaccccctgtttgagtactttgattatgagagcaggaagtccatgagctgctacgtgctgagcaatgtgctggactacaacacagaaattgtgtcccaggaccaggtggacagcatcatgaacctggtgtccaccctcatccaggaccagcctgaccagcctgtggaggaccctgaccctgaggactttgctgatgagcagagcctggtgggccgcttcatccacctgctgcggagtgaagatcctgaccagcagtacctgatcctgaacacagccaggaagcactttggagctgggggcaaccagaggatccgcttcaccctgccccccctggtgtttgctgcctaccagctggccttccgctacaaggagaacagcaaggtggatgacaagtgggagaagaagtgccagaagatcttctcctttgcccaccagaccatcagcgccctgatcaaggccgagctggccgagctgcccctgcggctcttcctgcagggcgccctggccgccggggagatcggctttgaaaatcatgaaacagtggcctatgagttcatgagccaggccttcagcctgtatgaagatgagatcagtgacagcaaggcccagctggccgccatcaccctcatcatcggcacctttgagaggatgaagtgcttcagcgaggagaaccacgagcccctgcggacccagtgtgccctggccgccagcaagctgctgaagaagccagaccagggccgggctgtgtccacctgtgcccacctgttctggagcggcaggaacacagacaagaatggagaggagctgcatggaggcaagagggtgatggagtgcctgaagaaggccctgaagatcgccaaccagtgcatggaccccagcctgcaggtgcagctgttcatcgagatcctgaaccgctacatctacttctatgagaaggaaaatgatgctgtgaccatccaggtgctgaaccagctgatccagaagatccgggaggacctgcccaacctggagagcagcgaggagacagagcagatcaacaagcacttccacaacaccctggagcacctgcggctgcggcgggagagccctgagagcgagggccccatctatgagggcctcatcctgtag

SEQ ID NO: 175680 - DNA, 1989 bp, synthetic construct
  misc_feature 1..1989: note = Description of Artificial Sequence: Synthetic coding sequence
  source 1..1989: mol_type = other DNA
atgtgccggggcgtgcagcaccccctgcggggcctcttcctgaggaactacctgctgcagtgcaccaggaacatcctgcctgatgaaggagagcccacagatgaggagaccaccggggacatcagtgacagcatggactttgtgctgctgaactttgctgagatgaacaagctgtgggtgaggatgcagcaccagggccacagccgggaccgggagaagcgggagcgggagcggcaggagctgcgcatcctggtgggcaccaacctggtgcggctgagccagctggagggcgtgaatgtggagcgctacaagcagatcgtgctgaccggcatcctggagcaggtggtgaactgcagagatgccctggcccaggagtacctgatggagtgcatcatccaggtgtttcctgatgagttccacctgcagaccctgaaccccttcctgcgggcctgtgccgagctgcaccagaatgtgaatgtgaagaacatcatcatcgccctgattgaccggctggccctgtttgcccaccgggaggatggccctggcatcccagctgacatcaagctgtttgacatcttcagccagcaggtggccaccgtcatccagagccggcaggacatgcccagtgaagatgtggtgtccctgcaggtgtccctcatcaacctggccatgaagtgctacccagacagagtggactatgtggacaaggtgctggagaccaccgtggagatcttcaacaagctgaacctggagcacatcgccaccagcagcgctgtgtccaaggagctgacccggctgctgaagatccctgtggacacctacaacaacatcctgactgtgctgaagctgaagcacttccaccccctgtttgagtactttgattatgagagcaggaagtccatgagctgctacgtgctgagcaatgtgctggactacaacacagagatcgtgtcccaggaccaggtggacagcatcatgaacctggtgtccaccctcatccaggaccagcctgaccagcctgtggaggaccctgaccctgaagattttgctgatgagcagagcctggtgggccgcttcatccacctgctgcggtctgaggaccctgaccagcagtacctgatcctgaacacagccaggaagcactttggagctgggggcaaccagaggatccgcttcaccctgccccccctggtgtttgctgcctaccagctggccttccgctacaaggagaacagcaaggtggatgacaagtgggagaagaagtgccagaagatcttctcctttgcccaccagaccatcagcgccctgatcaaggccgagctggccgagctgcccctgcggctcttcctgcagggcgccctggccgccggggagattggatttgagaaccacgagaccgtggcctatgagttcatgagccaggccttcagcctgtatgaagatgagatcagtgacagcaaggcccagctggccgccatcaccctcatcatcggcacctttgagaggatgaagtgcttctctgaagaaaatcatgagcccctgcggacccagtgtgccctggccgccagcaagctgctgaagaagccagaccagggccgggctgtgtccacctgtgcccacctgttctggagcggcaggaacacagacaagaatggagaggagctgcacggcggcaagagggtgatggagtgcctgaagaaggccctgaagatcgccaaccagtgcatggaccccagcctgcaggtgcagctgttcatcgagatcctgaaccgctacatctacttctatgagaaggaaaatgatgccatcgtgaccatccaggtgctgaaccagctgatccagaagatccgggaggacctgcccaacctggagagcagcgaggagacagagcagatcaacaagcacttccacaacaccctggagcacctgcggctgcggcgggagagccctgagagcgagggccccatctatgagggcctcatcctgtag

SEQ ID NO: 175681 - DNA, 1161 bp, synthetic construct
  misc_feature 1..1161: note = Description of Artificial Sequence: Synthetic coding sequence
  source 1..1161: mol_type = other DNA
atggacagatttgtgtggaccagcggcctgctggagatcaatgagaccctggtgatccagcagaggggcgtgcgcatctatgatggagaggagaagatcaagtttgatgctggcaccctgctgctgagcacccacaggctcatctggagggaccagaagaaccacgagtgctgcatggccatcctgctgagccagatcgtgttcatcgaggagcaggccgccggcatcggcaagagcgccaagatcgtggtgcacctgcacccagccccacccaacaaggagcccggccccttccagagcagcaagaacagctacatcaagctgtccttcaaggagcacggccagatcgagttctaccgccgcctgtctgaggagatgacccagaggcgctgggagaacatgcctgtgtcccagagcctgcagaccaacagaggcccccagcccggccgcatccgggctgtgggcatcgtgggcattgaaaggaagctggaggagaagaggaaggagacagacaagaacatcagcgaggcctttgaggacctgagcaagctgatgatcaaggccaaggagatggtggagctgagcaagagcatcgccaacaagatcaaggacaagcagggcgacatcacagaagatgagaccatccgcttcaagagctacctgctgtccatgggcatcgccaaccctgtgacccgggagacctacggcagcggcacccagtaccacatgcagctggccaagcagctggccggcatcctgcaggtgcccctggaggagcggggcggcatcatgagcctgacagaggtgtactgcctggtgaacagagcccggggcatggagctgctgagccctgaggacctggtgaatgcctgcaagatgctggaggccctgaagctgcccctgcggctgcgggtgtttgacagcggcgtgatggtgattgagctgcagagccacaaggaggaggagatggtggccagcgccctggagaccgtgtctgagaagggcagcctgaccagcgaggagtttgccaagctggtgggcatgtctgtgctgctggccaaggagcggctgctgctggccgagaagatgggccacctgtgcagagatgattctgtggagggcctgcgcttctaccccaacctcttcatgacccagagctag

SEQ ID NO: 175682 - DNA, 558 bp, synthetic construct
  misc_feature 1..558: note = Description of Artificial Sequence: Synthetic coding sequence
  source 1..558: mol_type = other DNA
atgtcctggctgttccccctgaccaagagcgccagcagcagcgctgctggcagccctgggggcctgaccagcctgcagcagcagaagcagaggctgattgagagcctgaggaacagccacagcagcattgctgagatccagaaggatgtggagtaccgcctgcccttcaccatcaacaacctgaccatcaacatcaacatcctgctgcccccccagttcccccaggagaagcctgtgatctctgtgtacccacccatccgccaccacctgatggacaagcagggcgtgtatgtgaccagccccctggtgaacaacttcaccatgcacagcgacctgggcaagatcatccagagcctgctggatgagttctggaagaacccccctgtgctggcccccaccagcacagccttcccctaccagctggagatccgctggcaccacccccactgcctggagatcagcctggcccggagcagcaacagcctgggcttcagcatcagcagcagcatcagcagcaccaggagcaagcaggagtaccacttcttcatctgctgctag

SEQ ID NO: 175683 - DNA, 1194 bp, synthetic construct
  misc_feature 1..1194: note = Description of Artificial Sequence: Synthetic coding sequence
  source 1..1194: mol_type = other DNA
atgtcctggctgttccccctgaccaagagcgccagcagcagcgctgctggcagccctgggggcctgaccagcctgcagcagcagaagcagaggctgattgagagcctgaggaacagccacagcagcattgctgagatccagaaggatgtggagtaccgcctgcccttcaccatcaacaacctgaccatcaacatcaacatcctgctgcccccccagttcccccaggagaagcctgtgatctctgtgtacccacccatccgccaccacctgatggacaagcagggcgtgtatgtgaccagccccctggtgaacaacttcaccatgcacagcgacctgggcaagatcatccagagcctgctggatgagttctggaagaacccccctgtgctggcccccaccagcacagccttcccctacctgtacagcaaccccagcggcatgagcccctatgccagccagggcttccccttcctgcccccctacccaccccaggaggccaacagaagcatcaccagcctgtctgtggccgacacagtgagcagcagcaccaccagccacaccacagccaagccagctgcccccagctttggagtgctgagcaacctgcccctgcccatccccaccgtggatgccagcatccccaccagccagaatggcttcggctacaagatgccagatgtgcctgatgccttccctgagctgtctgagctgtctgtgtcccagctgacagacatgaatgagcaggaggaggtgctgctggagcagttcctgaccctgccccagctgaagcagatcatcacagacaaggatgacctggtgaagagcattgaggagctggccaggaagaacctgctgctggagcccagcctggaggccaagaggcagacagtgctggacaagtatgagctgctgacccagatgaagagcacctttgagaagaagatgcagaggcagcacgagctgtctgagagctgcagcgccagcgccctgcaggcccggctgaaggtggccgcccatgaagctgaggaggagagtgacaacattgctgaggacttcctggagggcaagatggagattgatgacttcctgagcagcttcatggagaagaggaccatctgccactgccggcgggccaaggaggagaagctgcagcaggccatcgccatgcacagccagttccacgcccccctgtag

SEQ ID NO: 175684 - DNA, 1119 bp, synthetic construct
  misc_feature 1..1119: note = Description of Artificial Sequence: Synthetic coding sequence
  source 1..1119: mol_type = other DNA
atgtcctggctgttccccctgaccaagagcgccagcagcagcgctgctggcagccctgggggcctgaccagcctgcagcagcagaagcagaggctgattgagagcctgaggaacagccacagccggctgctgcccccccagttcccccaggagaagcctgtgatctctgtgtacccacccatccgccaccacctgatggacaagcagggcgtgtatgtgaccagccccctggtgaacaacttcaccatgcacagcgacctgggcaagatcatccagagcctgctggatgagttctggaagaacccccctgtgctggcccccaccagcacagccttcccctacctgtacagcaaccccagcggcatgagcccctatgccagccagggcttccccttcctgcccccctacccaccccaggaggccaacagaagcatcaccagcctgtctgtggccgacacagtgagcagcagcaccaccagccacaccacagccaagccagctgcccccagctttggagtgctgagcaacctgcccctgcccatccccaccgtggatgccagcatccccaccagccagaatggatttggctacaagatgccagatgtgcctgatgccttccctgagctgtctgagctgtctgtgtcccagctgacagacatgaatgagcaggaggaggtgctgctggagcagttcctgaccctgccccagctgaagcagatcatcacagacaaggatgacctggtgaagagcattgaggagctggccaggaagaacctgctgctggagcccagcctggaggccaagaggcagacagtgctggacaagtatgagctgctgacccagatgaagagcacctttgagaagaagatgcagaggcagcacgagctgtctgagagctgcagcgccagcgccctgcaggcccggctgaaggtggccgcccacgaggccgaggaggagagtgacaacattgctgaggacttcctggagggcaagatggagattgatgacttcctgagcagcttcatggagaagaggaccatctgccactgcagaagagccaaggaggagaagctgcagcaggccatcgccatgcacagccagttccacgcccccctgtag

SEQ ID NO: 175685 - DNA, 858 bp, synthetic construct
  misc_feature 1..858: note = Description of Artificial Sequence: Synthetic coding sequence
  source 1..858: mol_type = other DNA
atggccggggccggcagcgaggccaggtttgctggcctgagcctggtgcagctgaatgagctgctggaggatgagggccagctgacagagatggtgcagaagatggaggagacccagaatgtgcagctgaacaaggagatgaccctggccagcaacagaagcctggccgagggcaacctgctgtaccagccccagctggacaccctgaaggcccggctgacccagaagtaccaggagctgcaggtgctgtttgaggcctaccagatcaagaagaccaagctggaccggcagagcagcagcgccagcctggagaccctgctggccctgctgcaggccgagggcgccaagattgaggaggacacagagaacatggccgagaagttcctggatggagagctgcccctggacagcttcattgatgtgtaccagagcaagaggaagctggcccacatgagaagagtgaagattgagaagctgcaggagatggtgctgaagggccagaggctgccccaggccctggcccccctgcccccccggctgcctgagctggcccccacagcccccctgccctacccagcccctgaggccagcggccccccagctgtggccccccggcgcatccccccacctcctcctcctgtgcctgctggccgcctggccacccccttcaccgctgccatgagcagcggccaggccgtgccctacccaggcctgcagtgcccccccctgcccccccgggtgggcctgcccacccagcagggcttcagcagccagtttgtgagcccctaccccccacccctgccccagaggcccccaccccggctgcccccccaccagcccggcttcatcctgcagtag

SEQ ID NO: 175686 - DNA, 1068 bp, synthetic construct
  misc_feature 1..1068: note = Description of Artificial Sequence: Synthetic coding sequence
  source 1..1068: mol_type = other DNA
atggagaccctgaaggacaagaccctgcaggagctggaggagctgcagaatgattctgaggccatcgaccagctggccctggagagccctgaggtgcaggacctgcagctggagcgggagatggccctggccaccaacagaagcctggccgagaggaacctggagttccagggccccctggagatcagccgcagcaacctgagtgaccgctaccaggagctgaggaagctggtggagcgctgccaggagcagaaggccaagctggagaagttcagcagcgccctgcagcccggcaccctgctggacctgctgcaggtggagggcatgaagattgaggaggagagcgaggccatggccgagaagttcctggagggggaggtgcccctggagaccttcctggagaacttcagctccatgaggatgctgagccacctgcggcgggtgcgggtggagaagctgcaggaggtggtgaggaagccccgggccagccaggagctggccggagatgcccccccacccaggcctcctcctcctgtgcggcctgtgccccagggcaccccacctgtggtggaggagcagccccagccccccctggccatgccaccctaccccctgccctacagccccagccccagcctgcctgtgggccccacagcccacggggccctgcccccagcccccttccctgtggtgtcccagcccagcttctacagcggccccctgggccccacctacccagctgcccagctgggccccagaggagctgctggctacagctggagcccccagaggtccatgccaccccggcccggctacccaggcacccccatgggcgccagcggccctggctaccccctgcggggcggccgggcccccagccctggctacccccagcagagcccctacccagccactggaggcaagccaccctaccccatccagccccagctgcccagcttccctggccagccccagcccagcgtgcccctgcagcccccctacccacctggccctgccccaccctacggcttccccccacctcctggccctgcctggccaggctactag

SEQ ID NO: 175687 - DNA, 447 bp, synthetic construct
  misc_feature 1..447: note = Description of Artificial Sequence: Synthetic coding sequence
  source 1..447: mol_type = other DNA
atggagaccctgaaggacaagaccctgcaggagctggaggagctgcagaatgattctgaggccatcgaccagctggccctggagagccctgaggtgcaggacctgcagctggagcgggagatggccctggccaccaacagaagcctggccgagaggaacctggagttccagggccccctggagatcagccgcagcaacctgagtgaccgctaccaggagctgaggaagctggtggagcgctgccaggagcagaaggccaagctggagaagttcagcagcgccctgcagcccggcaccctgctggacctgctgcaggtggagggcatgaagattgaggaggagagcgaggccatggccgagaagttcctggagggggaggtgcccctggagaccttcctggagaacttcagctccatgaggatgctgagccacctgcggcgggtgtag

SEQ ID NO: 175688 - DNA, 969 bp, synthetic construct
  misc_feature 1..969: note = Description of Artificial Sequence: Synthetic coding sequence
  source 1..969: mol_type = other DNA
atggagaccctgaaggacaagaccctgcaggagctggaggagctgcagaatgattctgaggccatcgaccagctggccctggagagccctgaggtgcaggacctgcagctggagcgggagatggccctggccaccaacagaagcctggccgagaggaacctggagttccagggccccctggagatcagccgcagcaacctgagtgaccgctaccaggagctgaggaagctggtggagcgctgccaggagcagaaggccaagctggagaagttcagcagcgccctgcagcccggcaccctgctggacctgctgcaggtggagggcatgaagattgaggaggagagcgaggccatggccgagaagttcctggagggggaggtgcccctggagaccttcctggagaacttcagctccatgaggatgctgagccacctgcggcgggtgcgggtggagaagctgcaggaggtggtgaggaagccccgggccagccaggagctggccggagatgcccccccacccaggcctcctcctcctgtgcggcctgtgccccagggcaccccacctgtggtggaggagcagccccagccccccctggccatgccaccctaccccctgccctacagccccagccccagcctgcctgtgggccccacagcccacggggccctgcccccagcccccttccctgtggtgtcccagcccagcttctacagcggccccctgggccccacctacccagctgcccagctgggccccagaggagctgctggctacagctggagcccccagaggtccatgccaccccggcccggctacccaggcacccccatgggcgccagcggccctggctaccccctgcggggcggccgggcccccagccctggctacccccagcagagcccctacccagccactggaggcaagccaccctaccccatccagccccagctgcccttcagcctgtgctag

SEQ ID NO: 175689 - DNA, 756 bp, synthetic construct
  misc_feature 1..756: note = Description of Artificial Sequence: Synthetic coding sequence
  source 1..756: mol_type = other DNA
atgtaccgggcccgggccgcccgggccggccctgagcccggcagccctggccgcttcggcatcctgagcacaggccagctgcgggacctgctgcaggatgagcccaagctggaccgcatcgtgcggctgagcaggaagttccagggcctgcagctggagcgggaggcctgcctggccagcaactatgccctggccaaggagaacctggccctgcggccccggctggagatgggccgggccgccctggccatcaagtaccaggagctgcgggaggtggccgagaactgtgccgacaagctgcagaggctggaggagagcatgcaccgctggagcccccactgtgccctgggctggctgcaggccgagctggaggaggccgagcaggaggccgaggagcagatggagcagctgctgctgggggagcagagcctggaggccttcctgcctgccttccagaggggccgggccctggcccacctgcggaggacccaggccgagaagctgcaggagctgctgcggcggcgggagaggtctgcccagcctgcccccaccagcgctgctgacccccccaagagcttccctgctgctgctgtgctgcccactggagctgcccggggccccccagctgtgcccaggagcctgccccccctggacagcaggcctgtgccccccctgaagggcagccctggctgccccctgggccctgcccccctgctgagcccccggcccagccagcctgagcccccccacaggtag

SEQ ID NO: 175690 - DNA, 2628 bp, synthetic construct
  misc_feature 1..2628: note = Description of Artificial Sequence: Synthetic coding sequence
  source 1..2628: mol_type = other DNA
atgcatgatgcctttgagcctgtgcccatcctggagaagctgcccctgcagattgactgcctggccgcctgggaggagtggctgctggtgggcaccaagcagggccacctgctgctgtaccgcatcaggaaggatgtgggctgcaacagatttgaggtgaccctggagaagagcaacaagaacttcagcaagaagatccagcagatccacgtggtgtcccagttcaagatcctggtgtccctgctggagaacaacatctacgtgcatgacctgctgaccttccagcagatcaccaccgtgtccaaggccaagggggccagcctcttcacctgtgacctgcagcacacagagaccggggaggaggtgctgaggatgtgtgtggccgtgaagaagaagctgcagctgtacttctggaaggaccgggagttccacgagctgcagggcgacttctctgtgcctgatgtgcccaagtccatggcctggtgtgaaaattccatctgtgtgggcttcaagagggactactacctgatccgggtggatggcaagggcagcatcaaggagctgttccccaccgggaagcagctggagcccctggtggcccccctggctgatggcaaggtggccgtgggccaggatgacctgactgtggtgctgaatgaggagggcatctgcacccagaagtgtgccctgaactggacagacatccctgtggccatggagcaccagcccccctacatcatcgctgtgctgcccaggtatgtggagatccgcacctttgagccccggctgctggtgcagagcattgagctgcagaggccccgcttcatcaccagcggcggcagcaacatcatctacgtggccagcaaccactttgtgtggaggctcatccctgtgcccatggccacccagatccagcagctgctgcaggacaagcagtttgagctggccctgcagctggccgagatgaaggatgacagcgacagcgagaagcagcagcagatccaccacatcaagaacctgtatgccttcaacctcttctgccagaagagatttgatgagagcatgcaggtgtttgccaagctgggcacagaccccacccacgtgatgggcctgtacccagacctgctgcccacagactacaggaagcagctgcagtaccccaaccccctgcctgtgctgagcggggctgagctggagaaggcccacctggccctgattgactacctgacccagaagaggagccagctggtgaagaagctgaatgacagcgaccaccagagcagcaccagccccctgatggagggcacccccaccatcaagagcaagaagaagctgctgcagatcatcgacaccaccctgctgaagtgctacctgcacaccaacgtggccctggtggcccccctgctgcggctggagaacaaccactgccacatcgaggagagcgagcacgtgctgaagaaggcccacaagtacagcgagctgatcatcctgtatgagaagaagggcctgcacgagaaggccctgcaggtgctggtggaccagagcaagaaggccaacagccccctgaagggccacgagaggacagtgcagtacctgcagcacctgggcacagagaacctgcacctgatcttctcctacagcgtgtgggtgctgcgggacttcccagaagatggcctgaagatcttcacagaggacctgcctgaggtggagagcctgccccgggacagagtgctgggcttcctgattgagaacttcaagggcctggccatcccctacctggagcacatcatccacgtgtgggaggagaccggcagccgcttccacaactgcctgatccagctgtactgtgagaaggtgcagggcctgatgaaggagtacctgctgtccttccctgctgggaagacccctgtgcctgctggggaggaggagggggagctgggggagtaccggcagaagctgctgatgttcctggagatcagcagctactatgaccccggccgcctcatctgtgacttcccctttgatggcctgctggaggagcgggccctgctgctgggccgcatgggcaagcatgagcaggccctcttcatctacgtgcacatcctgaaggacaccaggatggccgaggagtactgccacaagcactatgacaggaacaaggatggcaacaaggatgtgtacctgagcctgctgaggatgtacctgagccccccatccatccactgcctgggccccatcaagctggagctgctggagcccaaggccaacctgcaggccgccctgcaggtgctggagctgcaccacagcaagctggacaccaccaaggccctgaacctgctgcctgccaacacccagatcaatgacatccgcatcttcctggagaaggtgctggaggagaatgcccagaagaagcgcttcaaccaggtgctgaagaacctgctgcacgccgagttcctgcgggtgcaggaggagcgcatcctgcaccagcaggtgaagtgcatcatcacagaggagaaggtgtgcatggtgtgcaagaagaagattggcaacagcgcctttgcccgctaccccaacggggtggtggtgcactacttctgcagcaaggaggtgaacccagctgacacctag

SEQ ID NO: 175691 - DNA, 2661 bp, synthetic construct
  misc_feature 1..2661: note = Description of Artificial Sequence: Synthetic coding sequence
  source 1..2661: mol_type = other DNA
atgcatgatgcctttgagcctgtgcccatcctggagaagctgcccctgcagattgactgcctggccgcctgggaggagtggctgctggtgggcaccaagcagggccacctgctgctgtaccgcatcaggaaggatgtggtgcctgcagatgtggccagccctgagagcggcagctgcaacagatttgaggtgaccctggagaagagcaacaagaacttcagcaagaagatccagcagatccacgtggtgtcccagttcaagatcctggtgtccctgctggagaacaacatctacgtgcatgacctgctgaccttccagcagatcaccaccgtgtccaaggccaagggggccagcctcttcacctgtgacctgcagcacacagaaacaggagaggaggtgctgaggatgtgtgtggccgtgaagaagaagctgcagctgtacttctggaaggaccgggagttccacgagctgcagggcgacttctctgtgcctgatgtgcccaagtccatggcctggtgtgagaacagcatctgtgtgggcttcaagagggactactacctgatccgggtggatggcaagggcagcatcaaggagctgttccccaccgggaagcagctggagcccctggtggcccccctggctgatggcaaggtggccgtgggccaggatgacctgactgtggtgctgaatgaggagggcatctgcacccagaagtgtgccctgaactggacagacatccctgtggccatggagcaccagcccccctacatcatcgctgtgctgccccgctacgtggagatccgcacctttgagccccggctgctggtgcagagcattgagctgcagaggccccgcttcatcaccagcggcggcagcaacatcatctacgtggccagcaaccactttgtgtggaggctcatccctgtgcccatggccacccagatccagcagctgctgcaggacaagcagtttgagctggccctgcagctggccgagatgaaggatgacagcgacagcgagaagcagcagcagatccaccacatcaagaacctgtatgccttcaacctcttctgccagaagagatttgatgagagcatgcaggtgtttgccaagctgggcacagaccccacccacgtgatgggcctgtacccagacctgctgcccacagactacaggaagcagctgcagtaccccaaccccctgcctgtgctgtctggagctgagctggagaaggcccacctggccctgattgactacctgacccagaagaggagccagctggtgaagaagctgaatgacagcgaccaccagagcagcaccagccccctgatggagggcacccccaccatcaagagcaagaagaagctgctgcagatcatcgacaccaccctgctgaagtgctacctgcacaccaacgtggccctggtggcccccctgctgcggctggagaacaaccactgccacatcgaggagagcgagcacgtgctgaagaaggcccacaagtacagcgagctgatcatcctgtatgagaagaagggcctgcacgagaaggccctgcaggtgctggtggaccagagcaagaaggccaacagccccctgaagggccacgagaggacagtgcagtacctgcagcacctgggcacagagaacctgcacctgatcttctcctacagcgtgtgggtgctgcgggacttcccagaagatggcctgaagatcttcacagaggacctgcctgaggtggagagcctgccccgggacagagtgctgggcttcctgattgagaacttcaagggcctggccatcccctacctggagcacatcatccacgtgtgggaggagaccggcagccgcttccacaactgcctgatccagctgtactgtgagaaggtgcagggcctgatgaaggagtacctgctgtccttccctgctgggaagacccctgtgcctgctggggaggaggagggggagctgggggagtaccggcagaagctgctgatgttcctggagatcagcagctactatgaccccggccgcctcatctgtgacttcccctttgatggcctgctggaggagcgggccctgctgctgggccgcatgggcaagcatgagcaggccctcttcatctacgtgcacatcctgaaggacaccaggatggccgaggagtactgccacaagcactatgacaggaacaaggatggcaacaaggatgtgtacctgagcctgctgaggatgtacctgagcccccccagcatccactgcctgggccccatcaagctggagctgctggagcccaaggccaacctgcaggccgccctgcaggtgctggagctgcaccacagcaagctggacaccaccaaggccctgaacctgctgcctgccaacacccagatcaatgacatccgcatcttcctggagaaggtgctggaggagaatgcccagaagaagcgcttcaaccaggtgctgaagaacctgctgcatgctgagttcctgcgggtgcaggaggagcgcatcctgcaccagcaggtgaagtgcatcatcacagaggagaaggtgtgcatggtgtgcaagaagaagattggcaacagcgcctttgcccgctacccaaatggagtggtggtgcactacttctgcagcaaggaggtgaacccagctgacacctag

SEQ ID NO: 175692 - DNA, 1314 bp, synthetic construct
  misc_feature 1..1314: note = Description of Artificial Sequence: Synthetic coding sequence
  source 1..1314: mol_type = other DNA
atgaccaccagcaccctgcagaaggccatcgacctggtgaccaaggccacagaggaggacaaggccaagaactatgaggaggccctgcggctgtaccagcacgctgtggagtacttcctgcacgccatcaagtatgaggcccacagcgacaaggccaaggagagcatccgggccaagtgtgtgcagtacctggacagagctgagaagctgaaggactacctgcggagcaaggagaagcacggcaagaagcctgtgaaggagaaccagagcgagggcaaaggaagtgacagcgacagcgagggggacaaccctgagaagaagaagctgcaggagcagctgatgggcgctgtggtgatggagaagcccaacatccgctggaatgatgtggccggcctggagggcgccaaggaggccctgaaggaggccgtcatcctgcccatcaagttcccccacctgttcaccgggaagaggaccccctggaggggcatcctgctgtttggccccccaggcaccgggaagagctacctggccaaggctgtggccacagaggccaacaacagcaccttcttctctgtgagcagcagtgacctgatgagcaagtggctgggggagagcgagaagctggtgaagaacctgtttgagctggcccggcagcacaagcccagcatcatcttcattgatgaggtggacagcctgtgtggcagcagaaatgaaaatgaaagtgaagctgcccggcgcatcaagacagagttcctggtgcagatgcagggcgtgggcaacaacaatgatggcaccctggtgctgggcgccaccaacatcccctgggtgctggacagcgccatcagaagaagatttgagaagaggatctacatccccctgcctgaggaggccgcccgggcccagatgttccggctgcacctgggcagcaccccccacaacctgacagatgccaacatccacgagctggccaggaagacagagggctacagcggggctgacatcagcatcatcgtgcgggacagcctgatgcagcctgtgaggaaggtgcagagcgccacccacttcaagaaggtgtgtggccccagcaggaccaaccccagcatgatgattgatgacctgctgaccccctgcagccctggggaccccggggccatggagatgacctggatggatgtgcctggggacaagctgctggagcctgtggtgtgcatgtctgacatgctgcggagcctggccaccacccggcccaccgtgaatgctgatgacctgctgaaggtgaagaagttctctgaagattttggccaggagagctag

SEQ ID NO: 175693 - DNA, 1335 bp, synthetic construct
  misc_feature 1..1335: note = Description of Artificial Sequence: Synthetic coding sequence
  source 1..1335: mol_type = other DNA
atgagcagcaccagccccaacctgcagaaggccatcgacctggccagcaaggccgcccaggaggacaaggccggcaactatgaggaggccctgcagctgtaccagcacgctgtgcagtacttcctgcacgtggtgaagtatgaggcccagggcgacaaggccaagcagagcatccgggccaagtgcacagagtacctggacagagctgagaagctgaaggagtacctgaagaacaaggagaagaaggcccagaagcctgtgaaggagggccagcccagccctgcagatgagaagggaaatgacagtgatggagagggggagagtgatgatcctgagaagaagaagctgcagaaccagctgcagggcgccatcgtcatcgagcggcccaacgtgaagtggagcgatgtggccggcctggagggcgccaaggaggccctgaaggaggccgtcatcctgcccatcaagttcccccacctgttcaccgggaagaggaccccctggaggggcatcctgctgtttggacctcctggcaccgggaagagctacctggccaaggctgtggccacagaggccaacaacagcaccttcttcagcatcagcagcagtgacctggtgtccaagtggctgggggagagcgagaagctggtgaagaacctcttccagctggcccgggagaacaagcccagcatcatcttcattgatgaaattgacagcctgtgtggcagccgctcagaaaatgaaagtgaggccgcccggcgcatcaagacagagttcctggtgcagatgcagggcgtgggcgtggacaatgatggcatcctggtgctgggcgccaccaacatcccctgggtgctggacagcgccatcagaagaagatttgagaagaggatctacatccccctgcctgagccccacgcccgggccgccatgttcaagctgcacctgggcaccacccagaacagcctgacagaggccgacttccgggagctgggcaggaagacagatggctacagcggggctgacatcagcatcatcgtgagagatgccctgatgcagcctgtgaggaaggtgcagagcgccacccacttcaagaaggtgcggggccccagcagagctgaccccaaccacctggtggatgacctgctgaccccctgcagccctggggaccccggggccatcgagatgacctggatggatgtgcctggggacaagctgctggagcctgtggtgtccatgtctgacatgctgcggagcctgagcaacaccaagcccaccgtgaatgaacatgacctgctgaagctgaagaagttcacagaggactttggccaggagggctag

SEQ ID NO: 175694 - DNA, 630 bp, synthetic construct
  misc_feature 1..630: note = Description of Artificial Sequence: Synthetic coding sequence
  source 1..630: mol_type = other DNA
atggccgaggccgaggagcaggagaccggcagcctggaggagagcacagatgaaagtgaggaggaggagagcgaggaggagcccaagctgaagtatgaaaggctgagcaatggagtgacagagatcctgcagaaggatgctgccagctgcatgacagtgcatgacaagttcctggccctgggcacccactacggcaaggtgtacctgctggatgtgcagggcaacatcacccagaagtttgatgtgtcccctgtgaagatcaaccagatcagcctggatgaaagtggagagcacatgggcgtgtgcagtgaagatggcaaggtgcaggtgtttggcctgtacagcggggaggagttccacgagacctttgactgccccatcaagatcatcgctgtgcacccccactttgtgcgcagcagctgcaagcagtttgtgactggaggcaagaagctgctgctgtttgagaggtcctggatgaaccgctggaagtctgctgtgctgcacgagggggagggcaacatccgctctgtgaagtggaggggccacctgattgcctgggccaacaacatgagcaagaagccagaggcctggagggtggccaagaagatgaagagctacctgaacaactag

SEQ ID NO: 175695 - DNA, 2565 bp, synthetic construct
  misc_feature 1..2565: note = Description of Artificial Sequence: Synthetic coding sequence
  source 1..2565: mol_type = other DNA
atggccgaggccgaggagcaggagaccggcagcctggaggagagcacagatgaaagtgaggaggaggagagcgaggaggagcccaagctgaagtatgaaaggctgagcaatggagtgacagagatcctgcagaaggatgctgccagctgcatgacagtgcatgacaagttcctggccctgggcacccactacggcaaggtgtacctgctggatgtgcagggcaacatcacccagaagtttgatgtgtcccctgtgaagatcaaccagatcagcctggatgaaagtggagagcacatgggcgtgtgcagtgaagatggcaaggtgcaggtgtttggcctgtacagcggggaggagttccacgagacctttgactgccccatcaagatcatcgctgtgcacccccactttgtgcgcagcagctgcaagcagtttgtgactggaggcaagaagctgctgctgtttgagaggtcctggatgaaccgctggaagtctgctgtgctgcacgagggggagggcaacatccgctctgtgaagtggaggggccacctgattgcctgggccaacaacatgggcgtgaagatctttgacatcatcagcaagcagaggatcaccaacgtgcccagagatgacatcagcctgcggccagacatgtacccctgcagcctgtgctggaaggacaacgtgaccctcatcatcggctggggcacctctgtgaaggtgtgcagcgtgaaggagagacatgccagcgagatgagggacctgcccagccgctacgtggagatcgtgtcccagtttgaaacagagttctacatcagcggcctggcccccctgtgtgaccagctggtggtgctgtcctatgtgaaggagatcagcgagaagacagagcgggagtactgtgcccggccccggctggacatcatccagcccctgtctgagacctgtgaggagatcagcagtgatgccctgactgtgcggggcttccaggagaatgaatgtcgggactaccacctggagtacagcgagggggagagcctcttctacatcgtgagccccagagatgtggtggtggccaaggagcgggaccaggatgaccacatcgactggctgctggagaagaagaagtatgaggaggccctgatggctgctgagatcagccagaagaacatcaagaggcacaagatcctggacatcggcctggcctacatcaaccacctggtggagcggggggactatgacattgctgccaggaagtgccagaagatcctgggcaagaatgctgccctgtgggagtatgaggtgtacaagttcaaggagatcggccagctgaaggccatcagcccctacctgcccaggggggaccctgtgctgaagcccctcatctatgagatgatcctgcacgagttcctggagagtgactatgagggctttgccaccctcatccgggagtggccaggggacctgtacaacaacagcgtgattgtgcaggccgtgcgggaccacctgaagaaggacagccagaacaagaccctgctgaagaccctggccgagctgtacacctatgacaagaactatggaaatgccctggagatctacctgaccctgcggcacaaggatgtgttccagctgatccacaagcacaacctcttcagcagcatcaaggacaagatcgtgctgctgatggactttgacagcgagaaggctgtggacatgctgctggacaatgaagacaagatcagcatcaagaaggtggtggaggagctggaggacaggcctgagctgcagcacgtgtacctgcacaagctgttcaagagggaccaccacaagggccagcgctaccacgagaagcagatcagcctgtatgcagaatatgaccggcccaacctgctgcccttcctgcgggacagcacccactgccccctggagaaggccctggagatctgccagcagaggaactttgtggaggagaccgtgtacctgctgagcaggatgggcaacagccgcagcgccctgaagatgatcatggaggagctgcatgatgtggacaaggccatcgagtttgccaaggagcaggatgatggagagctgtgggaggacctgatcctgtacagcattgacaagccacccttcatcaccggcctgctgaacaacatcggcacccacgtggaccccatcctgctgatccaccgcatcaaggagggcatggagatccccaacctgcgggacagcctggtgaagatcctgcaggactacaacctgcagatcctgctgcgggagggctgcaagaagatcctggtggccgacagcctgagcctgctgaagaagatgcacaggacccagatgaagggcgtgctggtggatgaggagaacatctgtgagagctgcctgagccccatcctgcccagtgatgctgccaagcccttctctgtggtggtgttccactgccgccacatgttccacaaggaatgtctgcccatgcccagcatgaacagcgctgcccagttctgcaacatctgcagcgccaagaacagaggccctggcagcgccatcctggagatgaagaagtag

SEQ ID NO: 175696 - DNA, 2490 bp, synthetic construct
  misc_feature 1..2490: note = Description of Artificial Sequence: Synthetic coding sequence
  source 1..2490: mol_type = other DNA
atggccgaggccgaggagcaggagaccggcagcctggaggagagcacagatgaaagtgaggaggaggagagcgaggaggagcccaagctgaagtatgaaaggctgagcaatggagtgacagagatcctgcagaaggatgctgccagctgcatgacagtgcatgacaagttcctggccctgggcacccactacggcaaggtgtacctgctggatgtgcagggcaacatcacccagaagtttgatgtggtgcaggtgtttggcctgtacagcggggaggagttccacgagacctttgactgccccatcaagatcatcgctgtgcacccccactttgtgcgcagcagctgcaagcagtttgtgactggaggcaagaagctgctgctgtttgagaggtcctggatgaaccgctggaagtctgctgtgctgcatgaaggagagggcaacatccgctctgtgaagtggaggggccacctgattgcctgggccaacaacatgggcgtgaagatctttgacatcatcagcaagcagaggatcaccaacgtgcccagagatgacatcagcctgcggccagacatgtacccctgcagcctgtgctggaaggacaacgtgaccctcatcatcggctggggcacctctgtgaaggtgtgcagcgtgaaggagagacatgccagcgagatgagggacctgcccagccgctacgtggagatcgtgtcccagtttgaaacagagttctacatcagcggcctggcccccctgtgtgaccagctggtggtgctgtcctatgtgaaggagatcagcgagaagacagagcgggagtactgtgcccggccccggctggacatcatccagcccctgtctgagacctgtgaggagatcagcagtgatgccctgactgtgcggggcttccaggagaatgaatgtcgggactaccacctggagtacagcgagggggagagcctcttctacatcgtgagccccagagatgtggtggtggccaaggagcgggaccaggatgaccacatcgactggctgctggagaagaagaagtatgaggaggccctgatggctgctgagatcagccagaagaacatcaagaggcacaagatcctggacatcggcctggcctacatcaaccacctggtggagcggggggactatgacattgctgccaggaagtgccagaagatcctgggcaagaatgctgccctgtgggagtatgaggtgtacaagttcaaggagatcggccagctgaaggccatcagcccctacctgcccaggggggaccctgtgctgaagcccctcatctatgagatgatcctgcacgagttcctggagagtgactatgagggctttgccaccctcatccgggagtggccaggggacctgtacaacaacagcgtcatcgtgcaggccgtgcgggaccacctgaagaaggacagccagaacaagaccctgctgaagaccctggccgagctgtacacctatgacaagaactatggaaatgccctggagatctacctgaccctgcggcacaaggatgtgttccagctgatccacaagcacaacctcttcagcagcatcaaggacaagatcgtgctgctgatggactttgattctgagaaggctgtggacatgctgctggacaatgaagacaagatcagcatcaagaaggtggtggaggagctggaggacaggcctgagctgcagcacgtgtacctgcacaagctgttcaagagggaccaccacaagggccagcgctaccacgagaagcagatcagcctgtatgcagaatatgaccggcccaacctgctgcccttcctgcgggacagcacccactgccccctggagaaggccctggagatctgccagcagaggaactttgtggaggagaccgtgtacctgctgagcaggatgggcaacagccgcagcgccctgaagatgatcatggaggagctgcatgatgtggacaaggccattgaatttgccaaggagcaggatgatggagagctgtgggaggacctgatcctgtacagcattgacaagccacccttcatcaccggcctgctgaacaacatcggcacccacgtggaccccatcctgctgatccaccgcatcaaggagggcatggagatccccaacctgcgggacagcctggtgaagatcctgcaggactacaacctgcagatcctgctgcgggagggctgcaagaagatcctggtggccgacagcctgagcctgctgaagaagatgcacaggacccagatgaagggcgtgctggtggatgaggagaacatctgtgagagctgcctgagccccatcctgcccagtgatgctgccaagcccttctctgtggtggtgttccactgccgccacatgttccacaaggagtgcctgcccatgcccagcatgaacagcgctgcccagttctgcaacatctgcagcgccaagaacagaggccctggcagcgccatcctggagatgaagaagtag

SEQ ID NO: 175697 - DNA, 1617 bp, synthetic construct
  misc_feature 1..1617: note = Description of Artificial Sequence: Synthetic coding sequence
  source 1..1617: mol_type = other DNA
atggtgtacacccagagcgagatcctgcagaaggaggtgtacctgtttgaaagaattgacagccagaaccgggagatcatgaagcacctgaaggccatctgcttcctgcggcccaccaaggaaaatgtggactacatcatccaggagctgcggcggcccaagtacaccatctacttcatctacttcagcaatgtcatcagcaagagtgatgtgaagagcctggccgaggctgatgagcaggaggtggtggccgaggtgcagcaggtgatcaccaaggagtatgagctgtttgagttccggaggacagaggtgccccccctgctgctgatcctggacagatgtgatgatgccatcacccccctgctgaaccagtggacctaccaggccatggtgcatgagctgctgggcatcaacaacaacagaattgacctgagccgggtgcccggcatcagcaaggacctgcgggaggtggtgctgtctgcagaaaatgatgagttctacgccaacaacatgtacctgaactttgctgagatcggcagcaacatcaagaacctgatggaggacttccagaagaagaagcccaaggagcagcagaagctggagagcattgctgacatgaaggcctttgtggagaactacccccagttcaagaagatgagcggcaccgtgtccaagcacgtgacagtggtgggggagctgagccggctggtgtctgagaggaacctgctggaggtgtctgaggtggagcaggagctggcctgccagaatgaccacagcagcgccctgcagaacatcaagaggctgctgcagaaccccaaggtgacagaatttgatgctgcccggctggtgatgctgtatgccctgcactatgaaagacacagcagcaacagcctgcccggcctgatgatggacctgaggaacaagggcgtgtctgagaagtacaggaagctggtgtctgctgtggtggagtatggaggcaagagggtgcggggcagtgacctcttcagccccaaggatgctgtggccatcaccaagcagttcctgaagggcctgaagggcgtggagaatgtgtacacccagcaccagcccttcctgcacgagaccctggaccacctgatcaagggccgcctgaaggaaaatctctacccctacctgggccccagcaccctgcgggaccggccccaggacatcatcgtgtttgtgattggaggagccacctatgaggaggccctgactgtgtacaacctgaacagaaccaccccaggagtgagaattgtgctgggcggcaccaccgtgcacaacaccaagagagatggagtgtccctgtgcagccctgcctggttccgcaccccaggcctgaagaggagcacccggctgagcctgcccaagtgctgggactacagcttcccccggggcagcagcggcttctggacagcccagcccaagcagggcgagctgagcagccacatcaaggtgtctgagcagaagatgaagcgctggctgggggagggccacagcttcctgagctgcccccactaccgcttcagcctgctgaacaagggcgtgggggagcagctgtgggtgctgtgctggctgctggagctgatcagcaggtag

SEQ ID NO: 175698 - DNA, 1713 bp, synthetic construct
  misc_feature 1..1713: note = Description of Artificial Sequence: Synthetic coding sequence
  source 1..1713: mol_type = other DNA
atgaatgtggtgtttgctgtgaagcagtacatcagcaagatgattgaggacagcggccctggcatgaaggtgctgctgatggacaaggagaccaccggcatcgtgtccatggtgtacacccagagcgagatcctgcagaaggaggtgtacctgtttgaaagaattgacagccagaaccgggagatcatgaagcacctgaaggccatctgcttcctgcggcccaccaaggaaaatgtggactacatcatccaggagctgcggcggcccaagtacaccatctacttcatctacttcagcaatgtcatcagcaagagtgatgtgaagagcctggccgaggctgatgagcaggaggtggtggccgaggtgcaggagttctacggggactacatcgctgtgaacccccacctgttcagcctgaacatcctgggctgctgccagggcaggaactgggaccctgcccagctgagcaggaccacccagggcctgacagccctgctgctgagcctgaagaagtgccccatgatccgctaccagctgagcagcgaggccgccaagaggctggctgaatgtgtgaagcaggtgatcaccaaggagtatgagctgtttgagttcagaagaacagaggtgccccccctgctgctgatcctggacagatgtgatgatgccatcacccccctgctgaaccagtggacctaccaggccatggtgcatgagctgctgggcatcaacaacaacagaattgacctgagccgggtgcccggcatcagcaaggacctgcgggaggtggtgctgtctgcagaaaatgatgagttctacgccaacaacatgtacctgaactttgctgagatcggcagcaacatcaagaacctgatggaggacttccagaagaagaagcccaaggagcagcagaagctggagagcattgctgacatgaaggcctttgtggagaactacccccagttcaagaagatgtctggaacagtgtccaagcacgtgacagtggtgggggagctgagccggctggtgtctgaaagaaacctgctggaggtgtctgaggtggagcaggagctggcctgccagaatgaccacagcagcgccctgcagaacatcaagaggctgctgcagaaccccaaggtgacagaatttgatgctgcccggctggtgatgctgtatgccctgcactatgagcggcacagcagcaacagcctgcccggcctgatgatggacctgagaaataaaggagtgtctgagaagtacaggaagctggtgtctgctgtggtggagtatggaggcaagagggtgcggggcagtgacctcttcagccccaaggatgctgtggccatcaccaagcagttcctgaagggcctgaagggcgtggagaatgtgtacacccagcaccagcccttcctgcacgagaccctggaccacctgatcaagggccgcctgaaggagaacctgtacccctacctgggccccagcaccctgcgggaccggccccaggacatcatcgtgtttgtgattggaggagccacctatgaggaggccctgactgtgtacaacctgaacagaaccaccccaggagtgcgcatcgtgctgggcggcaccaccgtgcacaacaccaagagcttcctggaggaggtgctggccagcggcctgcacagccgcagcaaggagagcagccaggtgaccagccgcagcgccagcagaagatag

SEQ ID NO: 175699 - DNA, 951 bp, synthetic construct
  misc_feature 1..951: note = Description of Artificial Sequence: Synthetic coding sequence
  source 1..951: mol_type = other DNA
atgaatgtggtgtttgctgtgaagcagtacatcagcaagatgattgaggacagcggccctggcatgaaggtgctgctgatggacaaggagaccaccggcatcgtgtccatggtgtacacccagagcgagatcctgcagaaggaggtgtacctgtttgaaagaattgacagccagaaccgggagatcatgaagcacctgaaggccatctgcttcctgcggcccaccaaggaaaatgtggactacatcatccaggagctgcggcggcccaagtacaccatctacttcatctacttcagcaatgtcatcagcaagagtgatgtgaagagcctggccgaggctgatgagcaggaggtggtggccgaggtgcagcaggtgatcaccaaggagtatgagctgtttgagttccggaggacagaggtgccccccctgctgctgatcctggacagatgtgatgatgccatcacccccctgctgaaccagtggacctaccaggccatggtgcatgagctgctgggcatcaacaacaacagaattgacctgagccgggtgcccggcatcagcaaggacctgcgggaggtggtgctgtctgcagaaaatgatgagttctacgccaacaacatgtacctgaactttgctgagatcggcagcaacatcaagaacctgatggaggacttccagaagaagaagcccaaggagcagcagaagctggagagcattgctgacatgaaggcctttgtggagaactacccccagttcaagaagatgagcggcaccgtgtccaagcacgtgacagtggtgggggagctgagccggctggtgtctgagaggaacctgctggaggtgtctgaggtggagcaggagctggcctgccagaatgaccacagcagcgccctgcagaacatcaagaggctgctgcagaaccccaaggtgacagaatttgatgctgcctag

SEQ ID NO: 175700 - DNA, 1305 bp, synthetic construct
  misc_feature 1..1305: note = Description of Artificial Sequence: Synthetic coding sequence
  source 1..1305: mol_type = other DNA
atgaatgtggtgtttgctgtgaagcagtacatcagcaagatgattgaggacagcggccctggcatgaaggtgctgctgatggacaaggagaccaccggcatcgtgtccatggtgtacacccagagcgagatcctgcagaaggaggtgtacctgtttgaaagaattgacagccagaaccgggagatcatgaagcacctgaaggccatctgcttcctgcggcccaccaaggaaaatgtggactacatcatccaggagctgcggcggcccaagtacaccatctacttcatctacttcagcaatgtcatcagcaagagtgatgtgaagagcctggccgaggctgatgagcaggaggtggtggccgaggtgcagcaggtgatcaccaaggagtatgagctgtttgagttccggaggacagaggtgccccccctgctgctgatcctggacagatgtgatgatgccatcacccccctgctgaaccagtggacctaccaggccatggtgcatgagctgctgggcatcaacaacaacagaattgacctgagccgggtgcccggcatcagcaaggacctgcgggaggtggtgctgtctgcagaaaatgatgagttctacgccaacaacatgtacctgaactttgctgagatcggcagcaacatcaagaacctgatggaggacttccagaagaagaagcccaaggagcagcagaagctggagagcattgctgacatgaaggcctttgtggagaactacccccagttcaagaagatgagcggcaccgtgtccaagcacgtgacagtggtgggggagctgagccggctggtgtctgagaggaacctgctggaggtgtctgaggtggagcaggagctggcctgccagaatgaccacagcagcgccctgcagaacatcaagaggctgctgcagaaccccaaggtgacagaatttgatgctgcccggctggtgatgctgtatgccctgcactatgaaagacacagcagcaacagcctgcccggcctgatgatggacctgaggaacaagggcgtgtctgagaagtacaggaagctggtgtctgctgtggtggagtatggaggcaagagggtgcggggcagtgacctcttcagccccaaggatgctgtggccatcaccaagcagttcctgaagggcctgaagggcgtggagaatgtgtacacccagcaccagcccttcctgcacgagaccctggaccacctgatcaagggccgcctgaaggaaaatctctacccctacctgggccccagcaccctgcgggaccgcatcgccagctgcctgtag

SEQ ID NO: 175701 - DNA, 1338 bp, synthetic construct
  misc_feature 1..1338: note = Description of Artificial Sequence: Synthetic coding sequence
  source 1..1338: mol_type = other DNA
atgaatgtggtgtttgctgtgaacccccacctgttcagcctgaacatcctgggctgctgccagggcaggaactgggaccctgcccagctgagcaggaccacccagggcctgacagccctgctgctgagcctgaagaagtgccccatgatccgctaccagctgagcagcgaggccgccaagaggctggccgagtgtgtgaagcaggtgatcaccaaggagtatgagctgtttgagttccggaggacagaggtgccccccctgctgctgatcctggacagatgtgatgatgccatcacccccctgctgaaccagtggacctaccaggccatggtgcatgagctgctgggcatcaacaacaacagaattgacctgagccgggtgcccggcatcagcaaggacctgcgggaggtggtgctgtctgcagaaaatgatgagttctacgccaacaacatgtacctgaactttgctgagatcggcagcaacatcaagaacctgatggaggacttccagaagaagaagcccaaggagcagcagaagctggagagcattgctgacatgaaggcctttgtggagaactacccccagttcaagaagatgagcggcaccgtgtccaagcacgtgacagtggtgggggagctgagccggctggtgtctgagaggaacctgctggaggtgtctgaggtggagcaggagctggcctgccagaatgaccacagcagcgccctgcagaacatcaagaggctgctgcagaaccccaaggtgacagaatttgatgctgcccggctggtgatgctgtatgccctgcactatgaaagacacagcagcaacagcctgcccggcctgatgatggacctgaggaacaagggcgtgtctgagaagtacaggaagctggtgtctgctgtggtggagtatggaggcaagagggtgcggggcagtgacctcttcagccccaaggatgctgtggccatcaccaagcagttcctgaagggcctgaagggcgtggagaatgtgtacacccagcaccagcccttcctgcacgagaccctggaccacctgatcaagggccgcctgaaggaaaatctctacccctacctgggccccagcaccctgcgggaccggccccaggacatcatcgtgtttgtgattggaggagccacctatgaggaggccctgactgtgtacaacctgaacagaaccaccccaggagtgagaattgtgctgggcggcaccaccgtgcacaacaccaagagcttcctggaggaggtgctggccagcggcctgcacagccgcagcaaggagagcagccaggtgaccagccgcagcgccagcagaagatag

SEQ ID NO: 175702 - DNA, 1128 bp, synthetic construct
  misc_feature 1..1128: note = Description of Artificial Sequence: Synthetic coding sequence
  source 1..1128: mol_type = other DNA
atgagcctggccggcggccgggcccccaggaagacagctggcaaccggctgagcggcctgctggaggccgaggaggaggatgagttctaccagaccacctacggcggcttcacagaggagagcggagatgatgagtaccagggcgaccagagcgacacagaagatgaggtggacagcgactttgatattgatgaaggagatgagcccagcagtgatggagaggccgaggagcccaggaggaagagaagagtggtgaccaaggcctacaaggagcccctgaagagcctgcggcccaggaaggtgaacaccccagctggcagcagccagaaggcccgggaggagaaggccctgctgcccctggagctgcaggatgatggcagtgacagcaggaagtccatgaggcagagcacagctgagcacacccggcagaccttcctgcgggtgcaggagcggcagggccagagcagaagaaggaagggcccccactgtgagcggcccctgacccaggaggagctgctgcgggaggccaagatcacagaggagctgaacctgcggagcctggagacctatgaaaggctggaggccgacaagaagaagcaggtgcacaagaagaggaagtgccccggccccatcatcacctaccacagcgtgacagtgcccctggtgggggagcccggccccaaggaggagaatgtggacatcgagggcagcctgtgcttcagcctgagctttgtgctgcggctggaccctgcccccagcgtgtctgccctgacccctcatgctggcactggacctgtgaaccccccagcccgctgcagcaggaccttcatcaccttcagtgatgatgccacctttgaggagtggttcccccagggccggccccccaaggtgcctgtgcgggaggtgtgccctgtgacccacaggcctgccctgtacagagatcctgtgacagacatcccctatgccacagcccgggccttcaagatcatccgggaggcctacaagaagtacatcacagcccacggcctgcccccaacagccagcgccctgggccctggccccccacctcctgagcccctgcccggcagcggcccccgggccctgcggcagaagatcgtcatcaagtag

SEQ ID NO: 175703 - DNA, 1095 bp, synthetic construct
  misc_feature 1..1095: note = Description of Artificial Sequence: Synthetic coding sequence
  source 1..1095: mol_type = other DNA
atgagcctggccggcggccgggcccccaggaagacagctggcaaccggctgagcggcctgctggaggccgaggaggaggatgagttctaccagaccacctacggcggcttcacagaggagagcggagatgatgagtaccagggcgaccagagcgacacagaagatgaggtggacagcgactttgatattgatgaaggagatgagcccagcagtgatggagaggccgaggagcccaggaggaagagaagagtggtgaccaaggcctacaaggagcccctgaagagcctgcggcccaggaaggtgaacaccccagctggcagcagccagaaggcccgggaggagaaggccctgctgcccctggagctgcaggatgatggcagtgacagcaggaagtccatgaggcagagcacagctgagcacacccggcagaccttcctgcgggtgcaggagcggcagggccagagcagaagaaggaagggcccccactgtgagcggcccctgacccaggaggagctgctgcgggaggccaagatcacagaggagctgaacctgcggagcctggagacctatgaaaggctggaggccgacaagaagaagcaggtgcacaagaagaggaagtgccccggccccatcatcacctaccacagcgtgacagtgcccctggtgggggagcccggccccaaggaggagaatgtggacatcgagggcctggaccctgcccccagcgtgtctgccctgacccctcatgctggcaccggccctgtgaaccccccagcccgctgcagcaggaccttcatcaccttcagtgatgatgccacctttgaggagtggttcccccagggccggccccccaaggtgcctgtgcgggaggtgtgccctgtgacccacaggcctgccctgtacagagatcctgtgacagacatcccctatgccacagcccgggccttcaagatcatccgggaggcctacaagaagtacatcacagcccacggcctgcccccaacagccagcgccctgggccctggccccccacctcctgagcccctgcccggcagcggcccccgggccctgcggcagaagatcgtcatcaagtag

SEQ ID NO: 175704 - DNA, 1221 bp, synthetic construct
  misc_feature 1..1221: note = Description of Artificial Sequence: Synthetic coding sequence
  source 1..1221: mol_type = other DNA
atggctgaaaatggcaagaactgtgaccagaggagagtggccatgaacaaggagcaccacaatggaaacttcacagaccccagctctgtgaatgagaagaagagaagagagcgggaggagcggcagaacatcgtgctgtggaggcagcccctcatcaccctgcagtacttcagcctggagatcctggtgatcctgaaggagtggaccagcaagctgtggcaccggcagagcatcgtggtgtccttcctgctgctgctggccgtgctgattgccacctactacgtggagggcgtgcaccagcagtatgtgcagagaattgagaagcagttcctgctgtatgcctactggattggcctgggcatcctgagctctgtgggcctgggcaccggcctgcacaccttcctgctgtacctgggcccccacatcgcctctgtgaccctggccgcctatgagtgcaacagcgtgaacttccctgagcccccctacccagaccagatcatctgcccagatgaggagggcacagagggcaccatcagcctgtggagcatcatcagcaaggtgagaattgaggcctgcatgtggggcatcggcacagccatcggggagctgcccccctacttcatggcccgggccgcccggctgtctggagctgagccagatgatgaggagtaccaggagtttgaggagatgctggagcacgccgagagcgcccaggactttgccagccgggccaagctggccgtgcagaagctggtgcagaaggtgggcttcttcggcatcctggcctgtgccagcatccccaaccccctgtttgacctggccggcatcacctgtggccacttcctggtgcccttctggaccttctttggagccaccctcatcggcaaggccatcatcaagatgcacatccagaagatctttgtgatcatcaccttcagcaagcacatcgtggagcagatggtggccttcatcggggctgtgcccggcatcggccccagcctgcagaagcccttccaggagtacctggaggcccagaggcagaagctgcaccacaagtctgagatgggcaccccccagggcgagaactggctgtcctggatgtttgagaagctggtggtggtgatggtgtgctacttcatcctgagcatcatcaacagcatggcccagagctatgccaagaggatccagcagaggctgaacagcgaggagaagaccaagtag

SEQ ID NO: 175705 - DNA, 930 bp, synthetic construct
  misc_feature 1..930: note = Description of Artificial Sequence: Synthetic coding sequence
  source 1..930: mol_type = other DNA
atggacctgaagtatgtgcagagaattgagaagcagttcctgctgtatgcctactggattggcctgggcatcctgagctctgtgggcctgggcaccggcctgcacaccttcctgctgtacctgggcccccacatcgcctctgtgaccctggccgcctatgagtgcaacagcgtgaacttccctgagcccccctacccagaccagatcatctgcccagatgaggagggcacagagggcaccatcagcctgtggagcatcatcagcaaggtgcgcatcgaggcctgcatgtggggcattggaacagccatcggggagctgcccccctacttcatggcccgggccgcccggctgagcggggctgagccagatgatgaggagtaccaggagtttgaggagatgctggagcacgccgagagcgcccaggactttgccagccgggccaagctggccgtgcagaagctggtgcagaaggtgggcttcttcggcatcctggcctgtgccagcatccccaaccccctgtttgacctggccggcatcacctgtggccacttcctggtgcccttctggaccttcttcggggccaccctgattggcaaggccatcatcaagatgcacatccagaagatcttcgtcatcatcaccttcagcaagcacatcgtggagcagatggtggccttcatcggggctgtgcccggcatcggccccagcctgcagaagcccttccaggagtacctggaggcccagaggcagaagctgcaccacaagtctgagatgggcaccccccagggcgagaactggctgtcctggatgtttgagaagctggtggtggtgatggtgtgctacttcatcctgagcatcatcaacagcatggcccagagctatgccaagaggatccagcagaggctgaacagcgaggagaagaccaagtag

SEQ ID NO: 175706 - DNA, 819 bp, synthetic construct
  misc_feature 1..819: note = Description of Artificial Sequence: Synthetic coding sequence
  source 1..819: mol_type = other DNA
atggacctgaagggcccccacatcgcctctgtgaccctggccgcctatgagtgcaacagcgtgaacttccctgagcccccctacccagaccagatcatctgcccagatgaggagggcacagagggcaccatcagcctgtggagcatcatcagcaaggtgagaattgaggcctgcatgtggggcatcggcacagccatcggggagctgcccccctacttcatggcccgggccgcccggctgtctggagctgagccagatgatgaggagtaccaggagtttgaggagatgctggagcacgccgagagcgcccaggactttgccagccgggccaagctggccgtgcagaagctggtgcagaaggtgggcttcttcggcatcctggcctgtgccagcatccccaaccccctgtttgacctggccggcatcacctgtggccacttcctggtgcccttctggaccttctttggagccaccctcatcggcaaggccatcatcaagatgcacatccagaagatctttgtgatcatcaccttcagcaagcacatcgtggagcagatggtggccttcatcggggctgtgcccggcatcggccccagcctgcagaagcccttccaggagtacctggaggcccagaggcagaagctgcaccacaagtctgagatgggcaccccccagggcgagaactggctgtcctggatgtttgagaagctggtggtggtgatggtgtgctacttcatcctgagcatcatcaacagcatggcccagagctatgccaagaggatccagcagaggctgaacagcgaggagaagaccaagtag

SEQ ID NO: 175707 - DNA, 645 bp, synthetic construct
  misc_feature 1..645: note = Description of Artificial Sequence: Synthetic coding sequence
  source 1..645: mol_type = other DNA
atgtggggcatcggcacagccatcggggagctgcccccctacttcatggcccgggccgcccggctgtctggagctgagccagatgatgaggagtaccaggagtttgaggagatgctggagcacgccgagagcgcccaggactttgccagccgggccaagctggccgtgcagaagctggtgcagaaggtgggcttcttcggcatcctggcctgtgccagcatccccaaccccctgtttgacctggccggcatcacctgtggccacttcctggtgcccttctggaccttctttggagccaccctcatcggcaaggccatcatcaagatgcacatccagaagatctttgtgatcatcaccttcagcaagcacatcgtggagcagatggtggccttcatcggggctgtgcccggcatcggccccagcctgcagaagcccttccaggagtacctggaggcccagaggcagaagctgcaccacaagtctgagatgggcaccccccagggcgagaactggctgtcctggatgtttgagaagctggtggtggtgatggtgtgctacttcatcctgagcatcatcaacagcatggcccagagctatgccaagaggatccagcagaggctgaacagcgaggagaagaccaagtag

SEQ ID NO: 175708 - DNA, 1053 bp, synthetic construct
  misc_feature 1..1053: note = Description of Artificial Sequence: Synthetic coding sequence
  source 1..1053: mol_type = other DNA
atggctgaaaatggcaagaactgtgaccagaggagagtggccatgaacaaggagcaccacaatggaaacttcacagaccccagctctgtgaatgagaagaagagaagagagcgggaggagcggcagaacatcgtgctgtggaggcagcccctcatcaccctgcagtacttcagcctggagatcctggtgatcctgaaggagtggaccagcaagctgtggcaccggcagagcatcgtggtgtccttcctgctgctgctggccgtgctgattgccacctactacgtggagggcgtgcaccagcagtatgtgcagagaattgagaagcagttcctgctgtatgcctactggattggcctgggcatcctgagctctgtgggcctgggcaccggcctgcacaccttcctgctgtacctgggcatcggcacagccatcggggagctgcccccctacttcatggcccgggccgcccggctgtctggagctgagccagatgatgaggagtaccaggagtttgaggagatgctggagcacgccgagagcgcccaggactttgccagccgggccaagctggccgtgcagaagctggtgcagaaggtgggcttcttcggcatcctggcctgtgccagcatccccaaccccctgtttgacctggccggcatcacctgtggccacttcctggtgcccttctggaccttctttggagccaccctcatcggcaaggccatcatcaagatgcacatccagaagatctttgtgatcatcaccttcagcaagcacatcgtggagcagatggtggccttcatcggggctgtgcccggcatcggccccagcctgcagaagcccttccaggagtacctggaggcccagaggcagaagctgcaccacaagtctgagatgggcaccccccagggcgagaactggctgtcctggatgtttgagaagctggtggtggtgatggtgtgctacttcatcctgagcatcatcaacagcatggcccagagctatgccaagaggatccagcagaggctgaacagcgaggagaagaccaagtag

SEQ ID NO: 175709 - DNA, 1443 bp, synthetic construct
  misc_feature 1..1443: note = Description of Artificial Sequence: Synthetic coding sequence
  source 1..1443: mol_type = other DNA
atgtctgatgtggccatcgtgaaggagggctggctgcacaagagaggagagtacatcaagacctggaggccccgctacttcctgctgaagaatgatggcaccttcatcggctacaaggagcggccccaggatgtggaccagcgggaggcccccctgaacaacttctctgtggcccagtgccagctgatgaagacagagcggccccggcccaacaccttcatcatccgctgcctgcagtggaccaccgtcatcgagaggaccttccacgtggagaccccagaggagcgggaggagtggaccacagccatccagacagtggctgatggcctgaagaagcaggaggaggaggagatggacttccgcagcggcagccccagcgacaacagcggggctgaggagatggaggtgtccctggccaagcccaagcaccgggtgaccatgaatgaatttgagtacctgaagctgctgggcaagggcaccttcggcaaggtgatcctggtgaaggagaaggccaccggccgctactatgccatgaagatcctgaagaaggaggtgattgtggccaaggatgaggtggcccacaccctgacagagaacagagtgctgcagaacagccgccaccccttcctgacagccctgaagtacagcttccagacccatgaccggctgtgctttgtgatggagtatgccaatggaggagagctgttcttccacctgagccgggagagggtcttctctgaagatcgggcccgcttctatggagctgagatcgtgtctgccctggactacctgcacagcgagaagaatgtggtgtacagagacctgaagctggagaacctgatgctggacaaggatggccacatcaagatcacagactttggcctgtgcaaggagggcatcaaggatggagccaccatgaagaccttctgtggcaccccagagtacctggcccctgaggtgctggaggacaatgactatggccgggctgtggactggtggggcctgggcgtggtgatgtatgagatgatgtgtggccgcctgcccttctacaaccaggaccacgagaagctgtttgagctgatcctgatggaggagatccgcttccccaggaccctgggccctgaggccaagagcctgctgagcggcctgctgaagaaggaccccaagcagaggctgggcggcggctctgaagatgccaaggagatcatgcagcaccgcttctttgctggcatcgtgtggcagcacgtgtatgagaagaagctgagcccccccttcaagccccaggtgaccagcgagacagacacccgctactttgatgaggagttcaccgcccagatgatcaccatcaccccaccagaccaggatgacagcatggagtgtgtggacagcgagcggcggccccacttcccccagttctcctacagcgccagcggcacagcctag

SEQ ID NO: 175710 - DNA, 1443 bp, synthetic construct; identical to SEQ ID NO: 175709
  misc_feature 1..1443: note = Description of Artificial Sequence: Synthetic coding sequence
  source 1..1443: mol_type = other DNA

SEQ ID NO: 175711 - DNA, 1257 bp, synthetic construct
  misc_feature 1..1257: note = Description of Artificial Sequence: Synthetic coding sequence
  source 1..1257: mol_type = other DNA
atgaagacagagcggccccggcccaacaccttcatcatccgctgcctgcagtggaccaccgtcatcgagaggaccttccacgtggagaccccagaggagcgggaggagtggaccacagccatccagacagtggctgatggcctgaagaagcaggaggaggaggagatggacttccgcagcggcagccccagcgacaacagcggggctgaggagatggaggtgtccctggccaagcccaagcaccgggtgaccatgaatgaatttgagtacctgaagctgctgggcaagggcaccttcggcaaggtgatcctggtgaaggagaaggccaccggccgctactatgccatgaagatcctgaagaaggaggtgattgtggccaaggatgaggtggcccacaccctgacagagaacagagtgctgcagaacagccgccaccccttcctgacagccctgaagtacagcttccagacccatgaccggctgtgctttgtgatggagtatgccaatggaggagagctgttcttccacctgagccgggagagggtcttctctgaagatcgggcccgcttctatggagctgagatcgtgtctgccctggactacctgcacagcgagaagaatgtggtgtacagagacctgaagctggagaacctgatgctggacaaggatggccacatcaagatcacagactttggcctgtgcaaggagggcatcaaggatggagccaccatgaagaccttctgtggcaccccagagtacctggcccctgaggtgctggaggacaatgactatggccgggctgtggactggtggggcctgggcgtggtgatgtatgagatgatgtgtggccgcctgcccttctacaaccaggaccacgagaagctgtttgagctgatcctgatggaggagatccgcttccccaggaccctgggccctgaggccaagagcctgctgagcggcctgctgaagaaggaccccaagcagaggctgggcggcggctctgaagatgccaaggagatcatgcagcaccgcttctttgctggcatcgtgtggcagcacgtgtatgagaagaagctgagcccccccttcaagccccaggtgaccagcgagacagacacccgctactttgatgaggagttcaccgcccagatgatcaccatcaccccaccagaccaggatgacagcatggagtgtgtggacagcgagcggcggccccacttcccccagttctcctacagcgccagcggcacagcctag

SEQ ID NO: 175712 - DNA, 1443 bp, synthetic construct; identical to SEQ ID NO: 175709
  misc_feature 1..1443: note = Description of Artificial Sequence: Synthetic coding sequence
  source 1..1443: mol_type = other DNA

SEQ ID NO: 175713 - DNA, 1443 bp, synthetic construct; identical to SEQ ID NO: 175709
  misc_feature 1..1443: note = Description of Artificial Sequence: Synthetic coding sequence
  source 1..1443: mol_type = other DNA

SEQ ID NO: 175714 - DNA, 1443 bp, synthetic construct; identical to SEQ ID NO: 175709
  misc_feature 1..1443: note = Description of Artificial Sequence: Synthetic coding sequence
  source 1..1443: mol_type = other DNA

SEQ ID NO: 175715 - DNA, 279 bp, synthetic construct
  misc_feature 1..279: note = Description of Artificial Sequence: Synthetic coding sequence
  source 1..279: mol_type = other DNA
atgtctgatgtggccatcgtgaaggagggctggctgcacaagagaggagagtacatcaagacctggaggccccgctacttcctgctgaagaatgatggcaccttcatcggctacaaggagcggccccaggatgtggaccagcgggaggcccccctgaacaacttctctgtggcccagtgccagctgatgaagacagagcggccccggcccaacaccttcatcatccgctgcctgcagtggaccaccgtcatcgagaggaccttccacgtggagacctag

SEQ ID NO: 175716 - DNA, 2421 bp, synthetic construct
  misc_feature 1..2421: note = Description of Artificial Sequence: Synthetic coding sequence
  source 1..2421: mol_type = other DNA
atggccagcggggctgacagcaaaggagatgacctgagcacagccatcctgaagcagaagaaccggcccaaccggctgattgtggatgaggccatcaatgaagacaacagcgtggtgtccctgagccagcccaagatggatgagctgcagctgttccggggggacacagtgctgctgaagggcaagaagaggcgggaggccgtgtgcatcgtgctgagtgatgacacctgcagtgatgagaagatccgcatgaacagagtggtgaggaacaacctgcgggtgcggctgggagatgtgatcagcatccagccctgcccagatgtgaagtatggcaagagaattcatgtgctgcccattgatgacacagtggagggcatcactggaaacctgtttgaggtgtacctgaagccctacttcctggaggcctaccggcccatcaggaagggggacatcttcctggtgcggggcggcatgagagctgtggagttcaaggtggtggagacagaccccagcccctactgcatcgtggccccagacaccgtcatccactgtgagggggagcccatcaagcgggaggatgaggaggagagcctgaatgaggtgggctatgatgacatcggcggctgcaggaagcagctggcccagatcaaggagatggtggagctgcccctgcggcacccagccctcttcaaggccatcggcgtgaagccaccccggggcatcctgctgtatggccccccaggcaccgggaagaccctcatcgcccgggctgtggccaatgagaccggggccttcttcttcctgatcaatggacctgagatcatgagcaagctggccggggagagcgagagcaacctgaggaaggcctttgaggaggccgagaagaatgccccagccatcatcttcattgatgagctggatgccatcgcccccaagcgggagaagacccatggagaggtggagcggcgcatcgtgtcccagctgctgaccctgatggatggcctgaagcagagggcccacgtgattgtgatggccgccaccaaccggcccaacagcattgatcctgccctgcggcgcttcggccgctttgaccgggaggtggacatcggcatcccagatgccaccggccgcctggagatcctgcagatccacaccaagaacatgaagctggctgatgatgtggacctggagcaggtggccaatgagacccacggccacgtgggcgctgacctggccgccctgtgcagcgaggccgccctgcaggccatcaggaagaagatggacctgattgacctggaggatgagaccattgatgctgaggtgatgaacagcctggccgtgaccatggatgacttccgctgggccctgagccagagcaaccccagcgccctgcgggagaccgtggtggaggtgccccaggtgacctgggaggacattggaggcctggaggatgtgaagcgggagctgcaggagctggtgcagtaccctgtggagcacccagacaagttcctgaagtttggcatgacccccagcaagggcgtgctcttctacggccccccaggctgtgggaagaccctgctggccaaggccatcgccaatgaatgccaggccaacttcatcagcatcaagggccctgagctgctgaccatgtggtttggagagagcgaggccaacgtgcgggagatctttgacaaggcccggcaggccgccccctgtgtgctcttctttgatgagctggacagcatcgccaaggcccggggcggcaacattggagatggcggcggcgctgctgacagagtcatcaaccagatcctgacagagatggatggcatgagcaccaagaagaatgtgttcatcatcggggccaccaacagaccagacatcattgatcctgccatcctgcggcccggccgcctggaccagctgatctacatccccctgcctgatgagaagagccgggtggccatcctgaaggccaacctgaggaagagccctgtggccaaggatgtggacctggagttcctggccaagatgaccaacggcttctctggagctgacctgacagagatctgccagagggcctgcaagctggccatccgggagagcattgaaagtgagatccggcgggagcgggagcggcagaccaaccccagcgccatggaggtggaggaggatgatcctgtgcctgagatccggcgggaccactttgaggaggccatgagatttgcccggcgctctgtgtctgacaatgacatcagaaaatatgagatgtttgcccagaccctgcagcagagccggggcttcggcagcttccgcttccccagcggcaaccagggcggggccggccccagccagggcagcggcggcggcactggaggctctgtgtacacagaggacaatgatgatgacctgtatggatag

SEQ ID NO: 175717 - DNA, 3669 bp, synthetic construct
  misc_feature 1..3669: note = Description of Artificial Sequence: Synthetic coding sequence
  source 1..3669: mol_type = other DNA
atgagccagcccccacctcctcctccacccctgcccccacctcctcctcctcctgaggccccccagacccccagcagcctggccagcgctgctgccagcggcggcctgctgaagagaagagaccggcgcatcctgagcggcagctgcccagaccccaagtgccaggcccggctcttcttccctgccagcggctctgtgtccattgaatgtacagaatgtggccagagacatgagcagcagcagctgctgggcgtggaggaggtgacagatcctgatgtggtgctgcacaacctgctgagaaatgccctgctgggcgtgactggagcccccaagaagaacacagagctggtgaaggtgatgggcctgagcaactaccactgcaagctgctgagccccatcctggcccgctatggcatggacaagcagacaggccgggccaagctgctgcgggacatgaaccagggcgagctgtttgactgtgccctgctgggggaccgggccttcctgattgagcctgagcacgtgaacacagtgggctacggcaaggacagaagtggcagcctgctgtacctgcatgacaccctggaggacatcaagagggccaacaagagccaggagtgcctgatccctgtgcacgtggatggagatggccactgcctggtgcatgctgtgtcccgggccctggtgggccgggagctgttctggcacgccctgcgggagaacctgaagcagcacttccagcagcacctggcccgctaccaggccctcttccatgacttcattgatgctgctgagtgggaggacatcatcaatgaatgtgaccccctgtttgtgcccccagagggcgtgcccctgggcctgaggaacatccacatcttcggcctggccaacgtgctgcaccggcccatcatcctgctggacagcctgagcggcatgaggagcagcggggactacagcgccaccttcctgcccggcctcatcccagctgagaagtgcaccgggaaggatggccacctgaacaagcccatctgcatcgcctggagcagcagcggcaggaaccactacatccccctggtgggcatcaagggggccgccctgcccaagctgcccatgaacctgctgcccaaggcctggggcgtgccccaggacctgatcaagaagtacatcaagctggaggaggatggcggctgtgtgattggaggagacaggagcctgcaggacaagtacctgctgcggctggtggccgccatggaggaggtgttcatggacaagcacggcatccaccccagcctggtggctgatgtgcaccagtacttctacagaagaactggagtcatcggcgtgcagcctgaggaggtgacagctgctgccaagaaggctgtgatggacaaccggctgcacaagtgcctgctgtgtggggccctgtctgagctgcacgtgcccccagagtggctggcccctgggggcaagctgtacaacctggccaagagcacccacggccagctgaggacagacaagaactacagcttccccctgaacaacctggtgtgcagctatgattctgtgaaggatgtgctggtgcctgactatggcatgagcaacctgacagcctgcaactggtgccacggcacctctgtgaggaaggtgagaggagatggcagcatcgtgtacctggatggagacaggaccaacagccgcagcactggaggaaaatgtggctgcggcttcaagcacttctgggatggcaaggagtatgacaacctgcctgaggccttccccatcaccctggagtggggcggccgggtggtgcgggagaccgtgtactggttccagtatgaaagtgacagcagcctgaacagcaatgtgtatgatgtggccatgaagctggtgaccaagcacttccctggagaatttggcagcgagatcctggtgcagaaggtggtgcacaccatcctgcaccagacagccaagaagaacccagatgactacacccctgtgaacattgatggagcccacgcccagagggtgggagatgtgcagggccaggagagcgagagccagctgcccaccaagatcatcctgaccggccagaagaccaagaccctgcacaaggaggagctgaacatgagcaagacagagaggaccatccagcagaacatcacagagcaggcctctgtgatgcagaagaggaagacagagaagctgaagcaggagcagaagggccagcccaggacagtgagccccagcaccatcagagatggccccagcagcgccccagccacccccaccaaggccccctacagccccaccaccagcaaggagaagaagatccgcatcaccaccaatgatggccggcagagcatggtgaccctgaagagcagcaccaccttctttgagctgcaggagagcatcgcccgggagttcaacatccccccctacctgcagtgcatccgctatggcttcccccccaaggagctgatgccaccccaggccggcatggagaaggagcctgtgcccctgcagcacggggaccgcatcaccatcgagatcctgaagagcaaggccgagggcggccagagcgctgctgcccacagcgcccacacagtgaagcaggaggacattgctgtgacaggcaagctgagcagcaaggagctgcaggagcaggccgagaaggagatgtacagcctgtgcctgctggccaccctgatgggagaagatgtgtggagctatgccaagggcctgccccacatgttccagcagggcggcgtcttctacagcatcatgaagaagaccatgggcatggctgatggcaagcactgcaccttcccccacctgcccgggaagacctttgtgtacaatgccagcgaggaccggctggagctgtgtgtggatgctgctggccacttccccatcggcccagatgtggaggacctggtgaaggaggccgtgtcccaggtgcgggcagaggccaccaccaggagccgggagagcagccccagccacggcctgctgaagctgggcagcggcggcgtggtgaagaagaagtctgagcagctgcacaacgtgacagccttccagggcaagggccacagcctgggcacagccagcggcaacccccacctggacccccgggcccgggagacctctgtggtgaggaagcacaacacaggaacagacttcagcaacagcagcaccaagacagagcccagcgtcttcaccgccagcagcagcaacagcgagctgatccgcatcgcccctggggtggtgaccatgagagatggccggcagctggaccctgacctggtggaggcccagaggaagaagctgcaggagatggtgagcagcatccaggcctccatggacagacacctgcgggaccagagcacagagcagagccccagcgacctgccccagaggaagacagaggtggtgagcagcagcgccaagagcggcagcctgcagacaggcctgcctgagagcttccccctgaccggcggcacagagaacctgaacacagagaccacagatggctgtgtggctgatgccctgggcgccgcctttgccaccaggagcaaggcccagaggggcaacagcgtggaggagctggaggagatggacagccaggatgctgagatgaccaacaccacagagcccatggaccacagctag

SEQ ID NO: 175718 - DNA, 3381 bp, synthetic construct; identical to SEQ ID NO: 144903
  misc_feature 1..3381: note = Description of Artificial Sequence: Synthetic coding sequence
  source 1..3381: mol_type = other DNA

SEQ ID NO: 175719 - DNA, 3795 bp, synthetic construct
  misc_feature 1..3795: note = Description of Artificial Sequence: Synthetic coding sequence
  source 1..3795: mol_type = other DNA
atgagcaccctgtatgtgagcccccacccagatgccttccccagcctgcgggccctgattgctgcccgctacggggaggccggggagggccctggctggggcggggcccacccccgcatctgcctgcagcccccacccaccagcaggacccccttccccccaccccggctgcctgccctggagcagggccctgggggcctgtgggtgtggggcgccacagctgtggcccagctgctgtggccagctggcctgggcggccctgggggcagcagagctgctgtgctggtgcagcagtgggtgtcctatgctgacacagagctgatcccagctgcctgtggggccaccctgcctgccctgggcctgcggagcagcgcccaggacccccaggccgtgctgggcgccctgggccgggccctgagccccctggaggagtggctgcggctgcacacctacctggccggggaggcccccaccctggccgacctggccgctgtgacagccctgctgctgcccttccgctacgtgctggaccccccagcccggcgcatctggaacaacgtgacccgctggtttgtgacctgtgtgcggcagcctgagttccgggctgtgctgggggaggtggtgctgtacagcggggcccggcccctgagccaccagcccggccctgaggccccagccctgcccaagacagctgcccagctgaagaaggaggccaagaagcgggagaagctggagaagttccagcagaagcagaagatccagcagcagcagcccccacctggagagaagaagcccaagccagagaagcgggagaagagggaccccggggtcatcacctatgacctgcccaccccacctggagagaagaaggatgtgtctggccccatgccagacagctacagcccccgctacgtggaggccgcctggtacccctggtgggagcagcagggcttcttcaagccagaatatggccggcccaacgtgtctgctgccaacccccggggcgtcttcatgatgtgcatccccccaccaaatgtgacaggcagcctgcacctgggccacgccctgaccaatgccatccaggacagcctgacccgctggcacaggatgagaggagagaccaccctgtggaaccctggctgtgaccacgccggcatcgccacccaggtggtggtggagaagaagctgtggagggagcagggcctgagccgccaccagctgggccgggaggccttcctgcaggaggtgtggaagtggaaggaggagaagggggaccgcatctaccaccagctgaagaagctgggcagcagcctggactgggaccgggcctgcttcaccatggaccccaagctgtctgctgctgtgacagaggcctttgtgcggctgcacgaggagggcatcatctaccgcagcacccggctggtgaactggagctgcaccctgaacagcgccatcagtgacatcgaggtggacaagaaggagctgaccggccgcaccctgctgtctgtgcccggctacaaggagaaggtggagtttggagtgctggtgtcctttgcctacaaggtgcagggcagtgacagtgatgaggaggtggtggtggccaccacccgcatcgagaccatgctgggagatgtggccgtggccgtgcaccccaaggacacccgctaccagcacctgaagggcaagaatgtcatccaccccttcctgagccgcagcctgcccatcgtgtttgatgaatttgtggacatggactttggaactggagctgtgaagatcaccccagcccatgaccagaatgactatgaggtgggccagagacatggcctggaggccatcagcatcatggacagcagaggagccctgatcaacgtgcccccacccttcctgggcctgcccaggtttgaggccaggaaggctgtgctggtggccctgaaggagcggggcctcttccggggcatcgaggacaaccccatggtggtgcccctgtgcaacagaagcaaggatgtggtggagcccctgctgcggccccagtggtacgtgcgctgtggggagatggcccaggccgccagcgctgctgtgaccaggggggacctgcgcatcctgcctgaggcccaccagaggacctggcacgcctggatggacaacatccgggagtggtgcatcagccggcagctgtggtggggccaccgcatcccagcctactttgtgacagtgtctgaccctgctgtgcccccaggagaagatcctgatggccgctactgggtgtctggaagaaatgaagctgaggcccgggagaaggccgccaaggagtttggagtgtccccagacaagatcagcctgcagcaggatgaagatgtgctggacacctggttcagcagcggcctcttccccctgagcatcctgggctggcccaaccagagcgaggacctgtctgtgttctacccaggcaccctgctggagactggacatgacatcctcttcttctgggtggccaggatggtgatgctgggcctgaagctgaccggccgcctgcccttccgggaggtgtacctgcacgccatcgtgagagatgcccacggcaggaagatgagcaagagcctgggcaatgtgattgaccccctggatgtgatctacggcatcagcctgcagggcctgcacaaccagctgctgaacagcaacctggaccccagcgaggtggagaaggccaaggagggccagaaggctgacttccctgctggcatcccagaatgtggcacagatgccctgcgcttcggcctgtgtgcctacatgagccagggccgggacatcaacctggatgtgaaccgcatcctgggctaccgccacttctgcaacaagctgtggaatgccaccaagtttgccctgcggggcctgggcaagggctttgtgcccagccccaccagccagcccggcggccacgagagcctggtggaccgctggatccgcagccggctgacagaggccgtgcggctgagcaaccagggcttccaggcctatgacttccctgctgtgaccacagcccagtacagcttctggctgtatgagctgtgtgatgtgtacctggagtgcctgaagcctgtgctgaatggagtggaccaggtggccgcagaatgtgcccggcagaccctgtacacctgcctggatgtgggcctgcggctgctgagccccttcatgccctttgtgacagaggagctgttccagaggctgcccaggaggatgccccaggccccacccagcctgtgtgtgaccccctacccagagcccagcgagtgctcctggaaggaccctgaggccgaggccgccctggagctggccctgagcatcaccagggctgtgcgcagcctgcgggctgactacaacctgacccgcatccggccagactgcttcctggaggtggctgatgaggccactggagccctggccagcgctgtgtctggctacgtgcaggccctggccagcgctggggtggtggccgtgctggccctgggcgccccagccccccagggctgtgctgtggccctggccagtgaccgctgcagcatccacctgcagctgcagggcctggtggaccctgcccgggagctgggcaagctgcaggccaagagggtggaggcccagaggcaggcccagaggctgcgggagaggagagctgccagcggctaccctgtgaaggtgcccctggaggtgcaggaggctgatgaggccaagctgcagcagacagaggccgagctgaggaaggtggatgaggccatcgccctcttccagaagatgctgtag

SEQ ID NO: 175720 - DNA, 525 bp, synthetic construct
  misc_feature 1..525: note = Description of Artificial Sequence: Synthetic coding sequence
  source 1..525: mol_type = other DNA
atgagcaccctgtatgtgagcccccacccagatgccttccccagcctgcgggccctgattgctgcccgctacggggaggccggggagggccctggctggggcggggcccacccccgcatctgcctgcagcccccacccaccagcaggaccagcttccccccaccccggctgcctgccctggagcagggccctgggggcctgtgggtgtggggcgccacagctgtggcccagctgctgtggccagctggcctgggcggccctgggggcagcagagctgctgtgctggtgcagcagtgggtgtcctatgctgacacagagctgatcccagctgcctgtggggccaccctgcctgccctgggcctgcggagcagcgcccaggacccccaggccgtgctgggcgccctgggccgggccctgagccccctggaggagtggctgcggctgcacacctacctggccggggaggcccccaccctggccgacctggccgctgtgacagccctgctgctgcccttccgctactag

SEQ ID NO: 175721 - DNA, 525 bp, synthetic construct; identical to SEQ ID NO: 175720
  misc_feature 1..525: note = Description of Artificial Sequence: Synthetic coding sequence
  source 1..525: mol_type = other DNA

SEQ ID NO: 175722 - DNA, 867 bp, synthetic construct
  misc_feature 1..867: note = Description of Artificial Sequence: Synthetic coding sequence
  source 1..867: mol_type = other DNA
tgaaaggagcggggcctcttccggggcatcgaggacaaccccatggtggtgcccctgtgcaacagaagcaaggatgtggtggagcccctgctgcggccccagtgggagtggtgcatcagccggcagctgtggtggggccaccgcatcccagcctactttgtgacagtgtctgaccctgctgtgcccccaggagaagatcctgatggccgctactgggtgtctggaagaaatgaagctgaggcccgggagaaggccgccaaggagtttggagtgtccccagacaagatcagcctgcagcaggatgaagatgtgctggacacctggttcagcagcggcctcttccccctgagcatcctgggctggcccaaccagagcgaggacctgtctgtgttctacccaggcaccctgctggagactggacatgacatcctcttcttctgggtggccaggatggtgatgctgggcctgaagctgaccggccgcctgcccttccgggaggtgtacctgcacgccatcgtgagagatgcccacggcaggaagatgagcaagagcctgggcaatgtgattgaccccctggatgtgatctacggcatcagcctgcagggcctgcacaaccagctgctgaacagcaacctggaccccagcgaggtggagaaggccaaggagggccagaaggctgacttccctgctggcatcccagaatgtggcacagatgccctgcgcttcggcctgtgtgcctacatgagccagggccgggacatcaacctggatgtgaaccgcatcctgggctaccgccacttctgcaacaagctgtggaatgccaccaagtttgccctgcggggcctgggcaagggctttgtgccctag

SEQ ID NO: 175723 - DNA, 3795 bp, synthetic construct
  misc_feature 1..3795: note = Description of Artificial Sequence: Synthetic coding sequence
  source 1..3795: mol_type = other DNA
atgagcaccctgtatgtgagcccccacccagatgccttccccagcctgcgggccctgattgctgcccgctacggggaggccggggagggccctggctggggcggggcccacccccgcatctgcctgcagcccccacccaccagcaggaccagcttccccccaccccggctgcctgccctggagcagggccctgggggcctgtgggtgtggggcgccacagctgtggcccagctgctgtggccagctggcctgggcggccctgggggcagcagagctgctgtgctggtgcagcagtgggtgtcctatgctgacacagagctgatcccagctgcctgtggggccaccctgcctgccctgggcctgcggagcagcgcccaggacccccaggccgtgctgggcgccctgggccgggccctgagccccctggaggagtggctgcggctgcacacctacctggccggggaggcccccaccctggccgacctggccgctgtgacagccctgctgctgcccttccgctacgtgctggaccccccagcccggcgcatctggaacaacgtgacccgctggtttgtgacctgtgtgcggcagcctgagttccgggctgtgctgggggaggtggtgctgtacagcggggcccggcccctgagccaccagcccggccctgaggccccagccctgcccaagacagctgcccagctgaagaaggaggccaagaagcgggagaagctggagaagttccagcagaagcagaagatccagcagcagcagcccccacctggagagaagaagcccaagccagagaagcgggagaagagggaccccggggtcatcacctatgacctgcccaccccacctggagagaagaaggatgtgtctggccccatgccagacagctacagcccccgctacgtggaggccgcctggtacccctggtgggagcagcagggcttcttcaagccagaatatggccggcccaacgtgtctgctgccaacccccggggcgtcttcatgatgtgcatccccccaccaaatgtgacaggcagcctgcacctgggccacgccctgaccaatgccatccaggacagcctgacccgctggcacaggatgagaggagagaccaccctgtggaaccctggctgtgaccacgccggcatcgccacccaggtggtggtggagaagaagctgtggagggagcagggcctgagccgccaccagctgggccgggaggccttcctgcaggaggtgtggaagtggaaggaggagaagggggaccgcatctaccaccagctgaagaagctgggcagcagcctggactgggaccgggcctgcttcaccatggaccccaagctgtctgctgctgtgacagaggcctttgtgcggctgcacgaggagggcatcatctaccgcagcacccggctggtgaactggagctgcaccctgaacagcgccatcagtgacatcgaggtggacaagaaggagctgaccggccgcaccctgctgtctgtgcccggctacaaggagaaggtggagtttggagtgctggtgtcctttgcctacaaggtgcagggcagtgacagtgatgaggaggtggtggtggccaccacccgcatcgagaccatgctgggagatgtggccgtggccgtgcaccccaaggacacccgctaccagcacctgaagggcaagaatgtcatccaccccttcctgagccgcagcctgcccatcgtgtttgatgaatttgtggacatggactttggaactggagctgtgaagatcaccccagcccatgaccagaatgactatgaggtgggccagagacatggcctggaggccatcagcatcatggacagcagaggagccctgatcaacgtgcccccacccttcctgggcctgcccaggtttgaggccaggaaggctgtgctggtggccctgaaggagcggggcctcttccggggcatcgaggacaaccccatggtggtgcccctgtgcaacagaagcaaggatgtggtggagcccctgctgcggccccagtggtacgtgcgctgtggggagatggcccaggccgccagcgctgctgtgaccaggggggacctgcgcatcctgcctgaggcccaccagaggacctggcacgcctggatggacaacatccgggagtggtgcatcagccggcagctgtggtggggccaccgcatcccagcctactttgtgacagtgtctgaccctgctgtgcccccaggagaagatcctgatggccgctactgggtgtctggaagaaatgaagctgaggcccgggagaaggccgccaaggagtttggagtgtccccagacaagatcagcctgcagcaggatgaagatgtgctggacacctggttcagcagcggcctcttccccctgagcatcctgggctggcccaaccagagcgaggacctgtctgtgttctacccaggcaccctgctggagactggacatgacatcctcttcttctgggtggccaggatggtgatgctgggcctgaagctgaccggccgcctgcccttccgggaggtgtacctgcacgccatcgtgagagatgcccacggcaggaagatgagcaagagcctgggcaatgtgattgaccccctggatgtgatctacggcatcagcctgcagggcctgcacaaccagctgctgaacagcaacctggaccccagcgaggtggagaaggccaaggagggccagaaggctgacttccctgctggcatcccagaatgtggcacagatgccctgcgcttcggcctgtgtgcctacatgagccagggccgggacatcaacctggatgtgaaccgcatcctgggctaccgccacttctgcaacaagctgtggaatgccaccaagtttgccctgcggggcctgggcaagggctttgtgcccagccccaccagccagcccggcggccacgagagcctggtggaccgctggatccgcagccggctgacagaggccgtgcggctgagcaaccagggcttccaggcctatgacttccctgctgtgaccacagcccagtacagcttctggctgtatgagctgtgtgatgtgtacctggagtgcctgaagcctgtgctgaatggagtggaccaggtggccgcagaatgtgcccggcagaccctgtacacctgcctggatgtgggcctgcggctgctgagccccttcatgccctttgtgacagaggagctgttccagaggctgcccaggaggatgccccaggccccacccagcctgtgtgtgaccccctacccagagcccagcgagtgctcctggaaggaccctgaggccgaggccgccctggagctggccctgagcatcaccagggctgtgcgcagcctgcgggctgactacaacctgacccgcatccggccagactgcttcctggaggtggctgatgaggccactggagccctggccagcgctgtgtctggctacgtgcaggccctggccagcgctggggtggtggccgtgctggccctgggcgccccagccccccagggctgtgctgtggccctggccagtgaccgctgcagcatccacctgcagctgcagggcctggtggaccctgcccgggagctgggcaagctgcaggccaagagggtggaggcccagaggcaggcccagaggctgcgggagaggagagctgccagcggctaccctgtgaaggtgcccctggaggtgcaggaggctgatgaggccaagctgcagcagacagaggccgagctgaggaaggtggatgaggccatcgccctcttccagaagatgctgtag

SEQ ID NO: 175724 - DNA, 1101 bp, synthetic construct
  misc_feature 1..1101: note = Description of Artificial Sequence: Synthetic coding sequence
  source 1..1101: mol_type = other DNA
atgagcaccctgtatgtgagcccccacccagatgccttccccagcctgcgggccctgattgctgcccgctacggggaggccggggagggccctggctggggcggggcccacccccgcatctgcctgcagcccccacccaccagcaggacccccttccccccaccccggctgcctgccctggagcagggccctgggggcctgtgggtgtggggcgccacagctgtggcccagctgctgtggccagctggcctgggcggccctgggggcagcagagctgctgtgctggtgcagcagtgggtgtcctatgctgacacagagctgatcccagctgcctgtggggccaccctgcctgccctgggcctgcggagcagcgcccaggacccccaggccgtgctgggcgccctgggccgggccctgagccccctggaggagtggctgcggctgcacacctacctggccggggaggcccccaccctggccgacctggccgctgtgacagccctgctgctgcccttccgctacgtgctggaccccccagcccggcgcatctggaacaacgtgacccgctggtttgtgacctgtgtgcggcagcctgagttccgggctgtgctgggggaggtggtgctgtacagcggggcccggcccctgagccaccagcccggccctgaggccccagccctgcccaagacagctgcccagctgaagaaggaggccaagaagcgggagaagctggagaagttccagcagaagcagaagatccagcagcagcagcccccacctggagagaagaagcccaagccagagaagcgggagaagagggaccccggggtcatcacctatgacctgcccaccccacctggagagaagaaggatgtgtctggccccatgccagacagctacagcccccgctacgtggaggccgcctggtacccctggtgggagcagcagggcttcttcaagccagaatatggccggcccaacgtgtctgctgccaacccccggggcgtcttcatgatgtgcatccccccaccaaatgtgacaggcagcctgcacctgggccacgccctgaccaatgccatccaggacagcctgaccaggtag

SEQ ID NO: 175725 - DNA, 525 bp, synthetic construct
  misc_feature 1..525: note = Description of Artificial Sequence: Synthetic coding sequence
  source 1..525: mol_type = other DNA
atgagcaccctgtatgtgagcccccacccagatgccttccccagcctgcgggccctgattgctgcccgctacggggaggccggggagggccctggctggggcggggcccacccccgcatctgcctgcagcccccacccaccagcaggacccccttccccccaccccggctgcctgccctggagcagggccctgggggcctgtgggtgtggggcgccacagctgtggcccagctgctgtggccagctggcctgggcggccctgggggcagcagagctgctgtgctggtgcagcagtgggtgtcctatgctgacacagagctgatcccagctgcctgtggggccaccctgcctgccctgggcctgcggagcagcgcccaggacccccaggccgtgctgggcgccctgggccgggccctgagccccctggaggagtggctgcggctgcacacctacctggccggggaggcccccaccctggccgacctggccgctgtgacagccctgctgctgcccttccgctactag

SEQ ID NO: 175726 - DNA, 3552 bp, synthetic construct
  misc_feature 1..3552: note = Description of Artificial Sequence: Synthetic coding sequence
  source 1..3552: mol_type = other DNA
tgaggactgggcggccctgggggcagcagagctgctgtgctggtgcagcagtgggtgtcctatgctgacacagagctgatcccagctgcctgtggggccaccctgcctgccctgggcctgcggagcagcgcccaggacccccaggccgtgctgggcgccctgggccgggccctgagccccctggaggagtggctgcggctgcacacctacctggccggggaggcccccaccctggccgacctggccgctgtgacagccctgctgctgcccttccgctacgtgctggaccccccagcccggcgcatctggaacaacgtgacccgctggtttgtgacctgtgtgcggcagcctgagttccgggctgtgctgggggaggtggtgctgtacagcggggcccggcccctgagccaccagcccggccctgaggccccagccctgcccaagacagctgcccagctgaagaaggaggccaagaagcgggagaagctggagaagttccagcagaagcagaagatccagcagcagcagcccccacctggagagaagaagcccaagccagagaagcgggagaagagggaccccggggtcatcacctatgacctgcccaccccacctggagagaagaaggatgtgtctggccccatgccagacagctacagccccaggtatgtggaggccgcctggtacccctggtgggagcagcagggcttcttcaagccagaatatggccggcccaacgtgtctgctgccaacccccggggcgtcttcatgatgtgcatccccccacccaacgtgacaggcagcctgcacctgggccacgccctgaccaatgccatccaggacagcctgacccgctggcacaggatgagaggagagaccaccctgtggaaccctggctgtgaccatgctggcatcgccacccaggtggtggtggagaagaagctgtggagggagcagggcctgagccgccaccagctgggccgggaggccttcctgcaggaggtgtggaagtggaaggaggagaagggggaccgcatctaccaccagctgaagaagctgggcagcagcctggactgggaccgggcctgcttcaccatggaccccaagctgtctgctgctgtgacagaggcctttgtgcggctgcacgaggagggcatcatctaccgcagcacccggctggtgaactggagctgcaccctgaacagcgccatcagtgacatcgaggtggacaagaaggagctgactggaagaaccctgctgtctgtgcccggctacaaggagaaggtggagtttggagtgctggtgtcctttgcctacaaggtgcagggcagtgacagtgatgaggaggtggtggtggccaccaccagaattgagaccatgctgggagatgtggccgtggccgtgcaccccaaggacacccgctaccagcacctgaagggcaagaatgtcatccaccccttcctgagccgcagcctgcccatcgtgtttgatgaatttgtggacatggactttggcaccggggctgtgaagatcaccccagcccatgaccagaatgactatgaggtgggccagagacatggcctggaggccatcagcatcatggacagcagaggagccctgatcaacgtgcccccacccttcctgggcctgcccaggtttgaggccaggaaggctgtgctggtggccctgaaggagcggggcctcttccggggcatcgaggacaaccccatggtggtgcccctgtgcaacagaagcaaggatgtggtggagcccctgctgcggccccagtggtacgtgcgctgtggggagatggcccaggccgccagcgctgctgtgaccaggggggacctgcgcatcctgcctgaggcccaccagaggacctggcacgcctggatggacaacatccgggagtggtgcatcagccggcagctgtggtggggccaccgcatcccagcctactttgtgacagtgtctgaccctgctgtgcccccaggagaggaccctgatggccgctactgggtgtctggaagaaatgaggccgaggcccgggagaaggccgccaaggagtttggagtgtccccagacaagatcagcctgcagcaggatgaagatgtgctggacacctggttcagcagcggcctcttccccctgagcatcctgggctggcccaaccagagcgaggacctgagcgtcttctacccaggcaccctgctggagaccggccatgacatcctcttcttctgggtggccaggatggtgatgctgggcctgaagctgaccggccgcctgcccttccgggaggtgtacctgcacgccatcgtgagagatgcccacggcaggaagatgagcaagagcctgggcaatgtcatcgaccccctggatgtgatctacggcatcagcctgcagggcctgcacaaccagctgctgaacagcaacctggaccccagcgaggtggagaaggccaaggagggccagaaggctgacttccctgctggcatcccagaatgtggcacagatgccctgcgcttcggcctgtgtgcctacatgagccagggccgggacatcaacctggatgtgaaccgcatcctgggctaccgccacttctgcaacaagctgtggaatgccaccaagtttgccctgcggggcctgggcaaaggatttgtgcccagccccaccagccagcccggcggccacgagagcctggtggaccgctggatccgcagccggctgacagaagctgtgcggctgagcaaccagggcttccaggcctatgacttccctgctgtgaccacagcccagtacagcttctggctgtatgagctgtgtgatgtgtacctggagtgcctgaagcctgtgctgaatggagtggaccaggtggccgcagaatgtgcccggcagaccctgtacacctgcctggatgtgggcctgcggctgctgagccccttcatgccctttgtgacagaggagctgttccagaggctgcccaggaggatgccccaggccccacccagcctgtgtgtgaccccctacccagagcccagtgaatgttcctggaaggaccctgaggccgaggccgccctggagctggccctgagcatcaccagggctgtgcgcagcctgcgggctgactacaacctgacccgcatccggccagactgcttcctggaggtggctgatgaggccaccggggccctggccagcgctgtgtctggctacgtgcaggccctggccagcgctggggtggtggccgtgctggccctgggcgccccagccccccagggctgtgctgtggccctggccagtgaccgctgcagcatccacctgcagctgcagggcctggtggaccctgcccgggagctgggcaagctgcaggccaagagggtggaggcccagaggcaggcccagaggctgcgggagcggcgggccgccagcggctaccctgtgaaggtgcccctggaggtgcaggaggctgatgaggccaagctgcagcagacagaagctgagctgaggaaggtggatgaggccatcgccctcttccagaagatgctgtag

SEQ ID NO: 175727 - DNA, 525 bp, synthetic construct; identical to SEQ ID NO: 175725
  misc_feature 1..525: note = Description of Artificial Sequence: Synthetic coding sequence
  source 1..525: mol_type = other DNA

SEQ ID NO: 175728 - DNA, 867 bp, synthetic construct; identical to SEQ ID NO: 175722
  misc_feature 1..867: note = Description of Artificial Sequence: Synthetic coding sequence
  source 1..867: mol_type = other DNA

SEQ ID NO: 175729 - DNA, 525 bp, synthetic construct; identical to SEQ ID NO: 175725
  misc_feature 1..525: note = Description of Artificial Sequence: Synthetic coding sequence
  source 1..525: mol_type = other DNA

SEQ ID NO: 175730 - DNA, 867 bp, synthetic construct; identical to SEQ ID NO: 175722
  misc_feature 1..867: note = Description of Artificial Sequence: Synthetic coding sequence
  source 1..867: mol_type = other DNA

SEQ ID NO: 175731 - DNA, 867 bp, synthetic construct; identical to SEQ ID NO: 175722
  misc_feature 1..867: note = Description of Artificial Sequence: Synthetic coding sequence
  source 1..867: mol_type = other DNA

SEQ ID NO: 175732 - DNA, 3795 bp, synthetic construct; identical to SEQ ID NO: 175723
  misc_feature 1..3795: note = Description of Artificial Sequence: Synthetic coding sequence
  source 1..3795: mol_type = other DNA

SEQ ID NO: 175733 - DNA, 525 bp, synthetic construct; identical to SEQ ID NO: 175725
  misc_feature 1..525: note = Description of Artificial Sequence: Synthetic coding sequence
  source 1..525: mol_type = other DNA

SEQ ID NO: 175734 - DNA, 894 bp, synthetic construct
  misc_feature 1..894: note = Description of Artificial Sequence: Synthetic coding sequence
  source 1..894: mol_type = other DNA
atgccagacagctacagccccaggtatgtggaggccgcctggtacccctggtgggagcagcagggcttcttcaagccagaatatggccggcccaacgtgtctgctgccaacccccggggcgtcttcatgatgtgcatccccccacccaacgtgacaggcagcctgcacctgggccacgccctgaccaatgccatccaggacagcctgacccgctggcacaggatgagaggagagaccaccctgtggaaccctggctgtgaccatgctggcatcgccacccaggtggtggtggagaagaagctgtggagggagcagggcctgagccgccaccagctgggccgggaggccttcctgcaggaggtgtggaagtggaaggaggagaagggggaccgcatctaccaccagctgaagaagctgggcagcagcctggactgggaccgggcctgcttcaccatggaccccaagctgtctgctgctgtgacagaggcctttgtgcggctgcacgaggagggcatcatctaccgcagcacccggctggtgaactggagctgcaccctgaacagcgccatcagtgacatcgaggtggacaagaaggagctgactggaagaaccctgctgtctgtgcccggctacaaggagaaggtggagtttggagtgctggtgtcctttgcctacaaggtgcagggcagtgacagtgatgaggaggtggtggtggccaccaccagaattgagaccatgctgggagatgtggccgtggccgtgcaccccaaggacacccgctaccagcacctgaagggcaagaatgtcatccaccccttcctgagccgcagcctgcccatcgtgtttgatgaatttgtggacatggactttggcaccggccctgcccaggtgtag

SEQ ID NO: 175735 - DNA, 867 bp, synthetic construct; identical to SEQ ID NO: 175722
  misc_feature 1..867: note = Description of Artificial Sequence: Synthetic coding sequence
  source 1..867: mol_type = other DNA

SEQ ID NO: 175736 - DNA, 867 bp, synthetic construct; identical to SEQ ID NO: 175722
  misc_feature 1..867: note = Description of Artificial Sequence: Synthetic coding sequence
  source 1..867: mol_type = other DNA

SEQ ID NO: 175737 - DNA, 288 bp, synthetic construct
  misc_feature 1..288: note = Description of Artificial Sequence: Synthetic coding sequence
  source 1..288: mol_type = other DNA
tgaccagctggcctgggcggccctgggggcagcagagctgctgtgctggtgcagcagtgggtgtcctatgctgacacagagctgatcccagctgcctgtggggccaccctgcctgccctgggcctgcggagcagcgcccaggacccccaggccgtgctgggcgccctgggccgggccctgagccccctggaggagtggctgcggctgcacacctacctggccggggaggcccccaccctggccgacctggccgctgtgacagccctgctgctgcccttccgctactag

SEQ ID NO: 175738 - DNA, 3795 bp, synthetic construct; identical to SEQ ID NO: 175719
  misc_feature 1..3795: note = Description of Artificial Sequence: Synthetic coding sequence
  source 1..3795: mol_type = other DNA

SEQ ID NO: 175739 - DNA, 2031 bp, synthetic construct
  misc_feature 1..2031: note = Description of Artificial Sequence: Synthetic coding sequence
  source 1..2031: mol_type = other DNA
atgagcaccctgtatgtgagcccccacccagatgccttccccagcctgcgggccctgattgctgcccgctacggggaggccggggagggccctggctggggcggggcccacccccgcatctgccgcctgcccaggtttgaggccaggaaggctgtgctggtggccctgaaggagcggggcctcttccggggcatcgaggacaaccccatggtggtgcccctgtgcaacagaagcaaggatgtggtggagcccctgctgcggccccagtggtacgtgcgctgtggggagatggcccaggccgccagcgctgctgtgaccaggggggacctgcgcatcctgcctgaggcccaccagaggacctggcacgcctggatggacaacatccgggagtggtgcatcagccggcagctgtggtggggccaccgcatcccagcctactttgtgacagtgtctgaccctgctgtgcccccaggagaagatcctgatggccgctactgggtgtctggaagaaatgaagctgaggcccgggagaaggccgccaaggagtttggagtgtccccagacaagatcagcctgcagcaggatgaagatgtgctggacacctggttcagcagcggcctcttccccctgagcatcctgggctggcccaaccagagcgaggacctgtctgtgttctacccaggcaccctgctggagactggacatgacatcctcttcttctgggtggccaggatggtgatgctgggcctgaagctgaccggccgcctgcccttccgggaggtgtacctgcacgccatcgtgagagatgcccacggcaggaagatgagcaagagcctgggcaatgtgattgaccccctggatgtgatctacggcatcagcctgcagggcctgcacaaccagctgctgaacagcaacctggaccccagcgaggtggagaaggccaaggagggccagaaggctgacttccctgctggcatcccagaatgtggcacagatgccctgcgcttcggcctgtgtgcctacatgagccagggccgggacatcaacctggatgtgaaccgcatcctgggctaccgccacttctgcaacaagctgtggaatgccaccaagtttgccctgcggggcctgggcaagggctttgtgcccagccccaccagccagcccggcggccacgagagcctggtggaccgctggatccgcagccggctgacagaggccgtgcggctgagcaaccagggcttccaggcctatgacttccctgctgtgaccacagcccagtacagcttctggctgtatgagctgtgtgatgtgtacctggagtgcctgaagcctgtgctgaatggagtggaccaggtggccgcagaatgtgcccggcagaccctgtacacctgcctggatgtgggcctgcggctgctgagccccttcatgccctttgtgacagaggagctgttccagaggctgcccaggaggatgccccaggccccacccagcctgtgtgtgaccccctacccagagcccagcgagtgctcctggaaggaccctgaggccgaggccgccctggagctggccctgagcatcaccagggctgtgcgcagcctgcgggctgactacaacctgacccgcatccggccagactgcttcctggaggtggctgatgaggccactggagccctggccagcgctgtgtctggctacgtgcaggccctggccagcgctggggtggtggccgtgctggccctgggcgccccagccccccagggctgtgctgtggccctggccagtgaccgctgcagcatccacctgcagctgcagggcctggtggaccctgcccgggagctgggcaagctgcaggccaagagggtggaggcccagaggcaggcccagaggctgcgggagaggagagctgccagcggctaccctgtgaaggtgcccctggaggtgcaggaggctgatgaggccaagctgcagcagacagaggccgagctgaggaaggtggatgaggccatcgccctcttccagaagatgctgtag

SEQ ID NO: 175740 - DNA, 2031 bp, synthetic construct; identical to SEQ ID NO: 175739
  misc_feature 1..2031: note = Description of Artificial Sequence: Synthetic coding sequence
  source 1..2031: mol_type = other DNA

SEQ ID NO: 175741 - DNA, 894 bp, synthetic construct; identical to SEQ ID NO: 175734
  misc_feature 1..894: note = Description of Artificial Sequence: Synthetic coding sequence
  source 1..894: mol_type = other DNA

SEQ ID NO: 175742 - DNA, 894 bp, synthetic construct; identical to SEQ ID NO: 175734
  misc_feature 1..894: note = Description of Artificial Sequence: Synthetic coding sequence
  source 1..894: mol_type = other DNA

SEQ ID NO: 175743 - DNA, 894 bp, synthetic construct; identical to SEQ ID NO: 175734
  misc_feature 1..894: note = Description of Artificial Sequence: Synthetic coding sequence
  source 1..894: mol_type = other DNA

SEQ ID NO: 175744 - DNA, 2031 bp, synthetic construct; identical to SEQ ID NO: 175739
  misc_feature 1..2031: note = Description of Artificial Sequence: Synthetic coding sequence
  source 1..2031: mol_type = other DNA

SEQ ID NO: 175745 - DNA, 2031 bp, synthetic construct; identical to SEQ ID NO: 175739
  misc_feature 1..2031: note = Description of Artificial Sequence: Synthetic coding sequence
  source 1..2031: mol_type = other DNA

SEQ ID NO: 175746 - DNA, 894 bp, synthetic construct; identical to SEQ ID NO: 175734
  misc_feature 1..894: note = Description of Artificial Sequence: Synthetic coding sequence
  source 1..894: mol_type = other DNA

SEQ ID NO: 175747 - DNA, 3192 bp, synthetic construct
  misc_feature 1..3192: note = Description of Artificial Sequence: Synthetic coding sequence
  source 1..3192: mol_type = other DNA
atgccccacctgcccctggccagcttccggccccccttctggggcctgcggcacagccggggcctgccccgcttccacagcgtgtccacccagagcgagccccacggcagccccatcagcagaagaaaccgggaggccaagcagaagaggctgcgggagaagcaggccaccctggaggccgagattgctggggagagcaagagccctgctgagagcatcaaggcctggaggcccaaggagctggtgctgtatgagatccccaccaagccaggagagaagaaggatgtgtctggccccctgcccccagcctacagcccccgctacgtggaggccgcctggtacccctggtgggtgcgggagggcttcttcaagccagagtaccaggcccggctgccccaggccactggagagaccttctccatgtgcatccccccaccaaatgtgacaggcagcctgcacatcggccacgccctgactgtggccatccaggatgccctggtgcgctggcacaggatgagaggagaccaggtgctgtgggtgcccggcagtgaccacgccggcatcgccacccaggccgtggtggagaagcagctgtggaaggagcggggcgtgagaagacatgagctgagccgggaggccttcctgcgggaggtgtggcagtggaaggaggccaagggcggggagatctgtgagcagctgcgggccctgggcgccagcctggactgggaccgggagtgcttcaccatggatgtgggcagctctgtggccgtgacagaggcctttgtgcggctgtacaaggccggcctgctgtacagaaaccaccagctggtgaactggagctgtgccctgcggagcgccatcagtgacatcgaggtggagaaccggcccctgcccggccacacccagctgcggctgcccggctgccccacccctgtgtcctttggcctgctcttctctgtggccttccctgtggatggagagccagatgctgaggtggtggtgggcaccaccaggcctgagaccctgcctggagatgtggccgtggccgtgcacccagatgacagccgctacacccacctgcacggccggcagctgcggcaccccctgatgggccagcccctgcccctcatcacagattatgctgtgcagccccacgtgggcaccggggctgtgaaggtgaccccagcccacagccctgcagatgctgagatgggcgcccggcacggcctgagccccctgaatgtgattgctgaagatggcaccatgaccagcctgtgtggggactggctgcagggcctgcacagatttgtggcccgggagaagatcatgtctgtgctgtctgagtggggcctcttccggggcctgcagaaccaccccatggtgctgcccatctgcagccgctctggagatgtgattgagtacctgctgaagaaccagtggtttgtgcgctgccaggagatgggcgcccgggccgccaaggctgtggagagcggggccctggagctgagccccagcttccaccagaagaactggcagcactggttcagccacatcggggactggtgtgtgtcccggcagctgtggtggggccaccagatcccagcctacctggtggtggaggaccacgcccagggcgaggaggactgctgggtggtgggccgctctgaggccgaggcccgggaggtggccgctgagctgaccggccggcctggagctgagctgaccctggagcgggaccctgatgtgctggacacctggttcagcagcgccctcttccccttcagcgccctgggctggccccaggagaccccagacctggcccgcttctaccccctgagcctgctggagactggaagtgacctgctgctcttctgggtgggccgcatggtgatgctgggcacccagctgaccggccagctgcccttcagcaaggtgctgctgcaccccatggtgcgggaccggcagggcaggaagatgagcaagagcctgggcaatgtgctggacccccgggacatcatcagcggcgtggagatgcaggtgctgcaggagaagctgcggagcggcaacctggaccctgctgagctggccatcgtggccgccgcccagaagaaggacttcccccacggcatcccagaatgtggcacagatgccctgcgcttcaccctgtgcagccatggagtgcaggccggggacctgcacctgtctgtgtctgaggtgcagagctgccgccacttctgcaacaagatctggaatgccctgcgcttcatcctgaatgccctgggggagaagtttgtgccccagcctgctgaggagctgagccccagcagccccatggatgcctggatcctgagccggctggccctggccgcccaggagtgtgagcggggcttcctgacccgggagctgagcctggtgacccacgccctgcaccacttctggctgcacaacctgtgtgatgtgtacctggaggccgtgaagcctgtgctgtggcacagcccccggcccctgggccccccccaggtgctcttcagctgtgccgacctgggcctgcggctgctggcccccctgatgcccttcctggccgaggagctgtggcagaggctgcccccccggcccggctgccccccagcccccagcatctctgtggccccctaccccagcgcctgcagcctggagcactggaggcagcctgagctggagcggcgcttcagccgggtgcaggaggtggtgcaggtgctgcgggccctgcgggccacctaccagctgaccaaggcccggccccgggtgctgctgcagagcagcgagcccggggaccagggcctgtttgaggccttcctggagcccctgggcaccctgggctactgtggggctgtgggcctgctgcccccaggagctgctgcccccagcggctgggcccaggcccccctgagtgacacagcccaggtgtacatggagctgcagggcctggtggacccccagatccagctgcccctgctggccgcccggcgctacaagctgcagaagcagctggacagcctgacagcccggaccccatctgagggggaggccggcacccagaggcagcagaagctgagcagcctgcagctggagctgagcaagctggacaaggccgccagccacctgcggcagctgatggatgagcccccagcccctggcagccctgagctgtag

SEQ ID NO: 175748 - DNA, 774 bp, synthetic construct
  misc_feature 1..774: note = Description of Artificial Sequence: Synthetic coding sequence
  source 1..774: mol_type = other DNA
atgccccacctgcccctggccagcttccggccccccttctggggcctgcggcacagccggggcctgccccgcttccacagcgtgtccacccagagcgagccccacggcagccccatcagcagaagaaaccgggaggccaagcagaagaggctgcgggagaagcaggccaccctggaggccgagattgctggggagagcaagagccctgctgagagcatcaaggcctggaggcccaaggagctggtgctgtatgagatccccaccaagccaggagagaagaaggatgtgtctggccccctgcccccagcctacagcccccgctacgtggaggccgcctggtacccctggtgggtgcgggagggcttcttcaagccagagtaccaggcccggctgccccaggccactggagagaccttctccatgtgcatccccccaccaaatgtgacaggcagcctgcacatcggccacgccctgactgtggccatccaggatgccctggtgcgctggcacaggatgagaggagaccaggtgctgtgggtgcccggcagtgaccacgccggcatcgccacccaggccgtggtggagaagcagctgtggaaggagcggggcgtgagaagacatgagctgagccgggaggccttcctgcgggaggtgtggcagtggaaggaggccaagggcggggagatctgtgagcagctgcgggccctgggcgccagcctggactgggacagagtcttctaccacggctgctggctgctgagcggctgtgactag

SEQ ID NO: 175749 - DNA, 3192 bp, synthetic construct; identical to SEQ ID NO: 175747
  misc_feature 1..3192: note = Description of Artificial Sequence: Synthetic coding sequence
  source 1..3192: mol_type = other DNA

SEQ ID NO: 175750 - DNA, 348 bp, synthetic construct
  misc_feature 1..348: note = Description of Artificial Sequence: Synthetic coding sequence
  source 1..348: mol_type = other DNA
atgccccacctgcccctggccagcttccggccccccttctggggcctgcggcacagccggggcctgccccgcttccacagcgtgtccacccagagcgagccccacggcagccccatcagcagaagaaaccgggaggccaagcagaagaggctgcgggagaagcaggccaccctggaggccgagattgctggggagagcaagagccctgctgagagcatcaaggcctggaggcccaaggagctggtgctgtatgagatccccaccaagccaggagagaagaaggatgtgtctggccccctgcccccagcctacagcccccgctacgtggaggccgcctggtacccctag

SEQ ID NO: 175751 - DNA, 981 bp, synthetic construct
  misc_feature 1..981: note = Description of Artificial Sequence: Synthetic coding sequence
  source 1..981: mol_type = other DNA
atgccccacctgcccctggccagcttccggccccccttctggggcctgcggcacagccggggcctgccccgcttccacagcgtgtccacccagagcgagccccacggcagccccatcagcagaagaaaccgggaggccaagcagaagaggctgcgggagaagcaggccaccctggaggccgagattgctggggagagcaagagccctgctgagagcatcaaggcctggaggcccaaggagctggtgctgtatgagatccccaccaagccaggagagaagaaggatgtgtctggccccctgcccccagcctacagcccccgctacgtggaggccgcctggtacccctggtgggtgcgggagggcttcttcaagccagagtaccaggcccggctgccccaggccactggagagaccttctccatgtgcatccccccaccaaatgtgacaggcagcctgcacatcggccacgccctgactgtggccatccaggatgccctggtgcgctggcacaggatgagaggagaccaggtgctgtgggtgcccggcagtgaccacgccggcatcgccacccaggccgtggtggagaagcagctgtggaaggagcggggcgtgagaagacatgagctgagccgggaggccttcctgcgggaggtgtggcagtggaaggaggccaagggcggggagatctgtgagcagctgcgggccctgggcgccagcctggactgggaccgggagtgcttcaccatggatgtgggcagctctgtggccgtgacagaggcctttgtgcggctgtacaaggccggcctgctgtacagaaaccaccagctggtgaactggagctgtgccctgcggagcgccatcagtgacatcgaggtggagaaccggcccctgcccggccacacccagctgcggctgcccggctgccccacccctgtgtcctttggcctgctcttctctgtggccttccctgtggatggatag

SEQ ID NO: 175752 - DNA, 3282 bp, synthetic construct
  misc_feature 1..3282: note = Description of Artificial Sequence: Synthetic coding sequence
  source 1..3282: mol_type = other DNA
atgggcggcaaggcctggccccggcgggctgtgggcacagctgggggcccctgtgccgagcagatcagcgcccccttccagaccctgctgatgccccacctgcccctggccagcttccggccccccttctggggcctgcggcacagccggggcctgccccgcttccacagcgtgtccacccagagcgagccccacggcagccccatcagcagaagaaaccgggaggccaagcagaagaggctgcgggagaagcaggccaccctggaggccgagattgctggggagagcaagagccctgctgagagcatcaaggcctggaggcccaaggagctggtgctgtatgagatccccaccaagccaggagagaagaaggatgtgtctggccccctgcccccagcctacagcccccgctacgtggaggccgcctggtacccctggtgggtgcgggagggcttcttcaagccagagtaccaggcccggctgccccaggccactggagagaccttctccatgtgcatccccccaccaaatgtgacaggcagcctgcacatcggccacgccctgactgtggccatccaggatgccctggtgcgctggcacaggatgagaggagaccaggtgctgtgggtgcccggcagtgaccacgccggcatcgccacccaggccgtggtggagaagcagctgtggaaggagcggggcgtgagaagacatgagctgagccgggaggccttcctgcgggaggtgtggcagtggaaggaggccaagggcggggagatctgtgagcagctgcgggccctgggcgccagcctggactgggaccgggagtgcttcaccatggatgtgggcagctctgtggccgtgacagaggcctttgtgcggctgtacaaggccggcctgctgtacagaaaccaccagctggtgaactggagctgtgccctgcggagcgccatcagtgacatcgaggtggagaaccggcccctgcccggccacacccagctgcggctgcccggctgccccacccctgtgtcctttggcctgctcttctctgtggccttccctgtggatggagagccagatgctgaggtggtggtgggcaccaccaggcctgagaccctgcctggagatgtggccgtggccgtgcacccagatgacagccgctacacccacctgcacggccggcagctgcggcaccccctgatgggccagcccctgcccctcatcacagattatgctgtgcagccccacgtgggcaccggggctgtgaaggtgaccccagcccacagccctgcagatgctgagatgggcgcccggcacggcctgagccccctgaatgtgattgctgaagatggcaccatgaccagcctgtgtggggactggctgcagggcctgcacagatttgtggcccgggagaagatcatgtctgtgctgtctgagtggggcctcttccggggcctgcagaaccaccccatggtgctgcccatctgcagccgctctggagatgtgattgagtacctgctgaagaaccagtggtttgtgcgctgccaggagatgggcgcccgggccgccaaggctgtggagagcggggccctggagctgagccccagcttccaccagaagaactggcagcactggttcagccacatcggggactggtgtgtgtcccggcagctgtggtggggccaccagatcccagcctacctggtggtggaggaccacgcccagggcgaggaggactgctgggtggtgggccgctctgaggccgaggcccgggaggtggccgctgagctgaccggccggcctggagctgagctgaccctggagcgggaccctgatgtgctggacacctggttcagcagcgccctcttccccttcagcgccctgggctggccccaggagaccccagacctggcccgcttctaccccctgagcctgctggagactggaagtgacctgctgctcttctgggtgggccgcatggtgatgctgggcacccagctgaccggccagctgcccttcagcaaggtgctgctgcaccccatggtgcgggaccggcagggcaggaagatgagcaagagcctgggcaatgtgctggacccccgggacatcatcagcggcgtggagatgcaggtgctgcaggagaagctgcggagcggcaacctggaccctgctgagctggccatcgtggccgccgcccagaagaaggacttcccccacggcatcccagaatgtggcacagatgccctgcgcttcaccctgtgcagccatggagtgcaggccggggacctgcacctgtctgtgtctgaggtgcagagctgccgccacttctgcaacaagatctggaatgccctgcgcttcatcctgaatgccctgggggagaagtttgtgccccagcctgctgaggagctgagccccagcagccccatggatgcctggatcctgagccggctggccctggccgcccaggagtgtgagcggggcttcctgacccgggagctgagcctggtgacccacgccctgcaccacttctggctgcacaacctgtgtgatgtgtacctggaggccgtgaagcctgtgctgtggcacagcccccggcccctgggccccccccaggtgctcttcagctgtgccgacctgggcctgcggctgctggcccccctgatgcccttcctggccgaggagctgtggcagaggctgcccccccggcccggctgccccccagcccccagcatctctgtggccccctaccccagcgcctgcagcctggagcactggaggcagcctgagctggagcggcgcttcagccgggtgcaggaggtggtgcaggtgctgcgggccctgcgggccacctaccagctgaccaaggcccggccccgggtgctgctgcagagcagcgagcccggggaccagggcctgtttgaggccttcctggagcccctgggcaccctgggctactgtggggctgtgggcctgctgcccccaggagctgctgcccccagcggctgggcccaggcccccctgagtgacacagcccaggtgtacatggagctgcagggcctggtggacccccagatccagctgcccctgctggccgcccggcgctacaagctgcagaagcagctggacagcctgacagcccggaccccatctgagggggaggccggcacccagaggcagcagaagctgagcagcctgcagctggagctgagcaagctggacaaggccgccagccacctgcggcagctgatggatgagcccccagcccctggcagccctgagctgtag

SEQ ID NO: 175753 - DNA, 2772 bp, synthetic construct
  misc_feature 1..2772: note = Description of Artificial Sequence: Synthetic coding sequence
  source 1..2772: mol_type = other DNA
atgtgcatccccccaccaaatgtgacaggcagcctgcacatcggccacgccctgactgtggccatccaggatgccctggtgcgctggcacaggatgagaggagaccaggtgctgtgggtgcccggcagtgaccacgccggcatcgccacccaggccgtggtggagaagcagctgtggaaggagcggggcgtgagaagacatgagctgagccgggaggccttcctgcgggaggtgtggcagtggaaggaggccaagggcggggagatctgtgagcagctgcgggccctgggcgccagcctggactgggaccgggagtgcttcaccatggatgtgggcagctctgtggccgtgacagaggcctttgtgcggctgtacaaggccggcctgctgtacagaaaccaccagctggtgaactggagctgtgccctgcggagcgccatcagtgacatcgaggtggagaaccggcccctgcccggccacacccagctgcggctgcccggctgccccacccctgtgtcctttggcctgctcttctctgtggccttccctgtggatggagagccagatgctgaggtggtggtgggcaccaccaggcctgagaccctgcctggagatgtggccgtggccgtgcacccagatgacagccgctacacccacctgcacggccggcagctgcggcaccccctgatgggccagcccctgcccctcatcacagattatgctgtgcagccccacgtgggcaccggggctgtgaaggtgaccccagcccacagccctgcagatgctgagatgggcgcccggcacggcctgagccccctgaatgtgattgctgaagatggcaccatgaccagcctgtgtggggactggctgcagggcctgcacagatttgtggcccgggagaagatcatgtctgtgctgtctgagtggggcctcttccggggcctgcagaaccaccccatggtgctgcccatctgcagccgctctggagatgtgattgagtacctgctgaagaaccagtggtttgtgcgctgccaggagatgggcgcccgggccgccaaggctgtggagagcggggccctggagctgagccccagcttccaccagaagaactggcagcactggttcagccacatcggggactggtgtgtgtcccggcagctgtggtggggccaccagatcccagcctacctggtggtggaggaccacgcccagggcgaggaggactgctgggtggtgggccgctctgaggccgaggcccgggaggtggccgctgagctgaccggccggcctggagctgagctgaccctggagcgggaccctgatgtgctggacacctggttcagcagcgccctcttccccttcagcgccctgggctggccccaggagaccccagacctggcccgcttctaccccctgagcctgctggagactggaagtgacctgctgctcttctgggtgggccgcatggtgatgctgggcacccagctgaccggccagctgcccttcagcaaggtgctgctgcaccccatggtgcgggaccggcagggcaggaagatgagcaagagcctgggcaatgtgctggacccccgggacatcatcagcggcgtggagatgcaggtgctgcaggagaagctgcggagcggcaacctggaccctgctgagctggccatcgtggccgccgcccagaagaaggacttcccccacggcatcccagaatgtggcacagatgccctgcgcttcaccctgtgcagccatggagtgcaggccggggacctgcacctgtctgtgtctgaggtgcagagctgccgccacttctgcaacaagatctggaatgccctgcgcttcatcctgaatgccctgggggagaagtttgtgccccagcctgctgaggagctgagccccagcagccccatggatgcctggatcctgagccggctggccctggccgcccaggagtgtgagcggggcttcctgacccgggagctgagcctggtgacccacgccctgcaccacttctggctgcacaacctgtgtgatgtgtacctggaggccgtgaagcctgtgctgtggcacagcccccggcccctgggccccccccaggtgctcttcagctgtgccgacctgggcctgcggctgctggcccccctgatgcccttcctggccgaggagctgtggcagaggctgcccccccggcccggctgccccccagcccccagcatctctgtggccccctaccccagcgcctgcagcctggagcactggaggcagcctgagctggagcggcgcttcagccgggtgcaggaggtggtgcaggtgctgcgggccctgcgggccacctaccagctgaccaaggcccggccccgggtgctgctgcagagcagcgagcccggggaccagggcctgtttgaggccttcctggagcccctgggcaccctgggctactgtggggctgtgggcctgctgcccccaggagctgctgcccccagcggctgggcccaggcccccctgagtgacacagcccaggtgtacatggagctgcagggcctggtggacccccagatccagctgcccctgctggccgcccggcgctacaagctgcagaagcagctggacagcctgacagcccggaccccatctgagggggaggccggcacccagaggcagcagaagctgagcagcctgcagctggagctgagcaagctggacaaggccgccagccacctgcggcagctgatggatgagcccccagcccctggcagccctgagctgtag

SEQ ID NO: 175754 - DNA, 885 bp, synthetic construct
  misc_feature 1..885: note = Description of Artificial Sequence: Synthetic coding sequence
  source 1..885: mol_type = other DNA
atggccagcgccagcggggccatggccaagcatgagcagatcctggtgctggaccccccaacagacctgaagttcaagggccccttcacagatgtggtgaccaccaacctgaagctgaggaaccccagcgacaggaaggtgtgcttcaaggtgaagaccacagccccccggcgctactgtgtgcggcccaacagcggcatcatcgaccccggcagcacagtgacagtgtctgtgatgctgcagccctttgattatgaccccaatgagaagagcaagcacaagttcatggtgcagaccatctttgccccacccaacaccagtgacatggaggccgtgtggaaggaggccaagccagatgagctgatggacagcaagctgcgctgtgtgtttgagatgcccaatgaaaatgacaagctgggcatcaccccacctggaaatgcccccaccgtgacctccatgagcagcatcaacaacacagtggccaccccagccagctaccacaccaaggatgacccccggggcctgtctgtgctgaagcaggagaagcagaagaatgacatggagcccagcaaggctgtgcccctgaatgccagcaagcaggacggccccatgcccaagccccacagcgtgtccctgaatgacacagagaccaggaagctgatggaggagtgcaagaggctgcagggcgagatgatgaagctgtctgaagaaaatagacacctgagagatgagggcctgcggctgaggaaggtggcccacagcgacaagccaggcagcaccagcacagccagcttccgggacaacgtgaccagccccctgcccagcctgctggtggtgattgctgccatcttcatcggcttcttcctgggcaagttcatcctgtag

SEQ ID NO: 175755 - DNA, 750 bp, synthetic construct
  misc_feature 1..750: note = Description of Artificial Sequence: Synthetic coding sequence
  source 1..750: mol_type = other DNA
atggccagcgccagcggggccatggccaagcatgagcagatcctggtgctggaccccccaacagacctgaagttcaagggccccttcacagatgtggtgaccaccaacctgaagctgaggaaccccagcgacaggaaggtgtgcttcaaggtgaagaccacagccccccggcgctactgtgtgcggcccaacagcggcatcatcgaccccggcagcacagtgacagtgtctgtgatgctgcagccctttgattatgaccccaatgagaagagcaagcacaagttcatggtgcagaccatctttgccccacccaacaccagtgacatggaggccgtgtggaaggaggccaagccagatgagctgatggacagcaagctgcgctgtgtgtttgagatgcccaatgaaaatgacaagctgaatgacatggagcccagcaaggctgtgcccctgaatgccagcaagcaggacggccccatgcccaagccccacagcgtgtccctgaatgacacagagaccaggaagctgatggaggagtgcaagaggctgcagggcgagatgatgaagctgtctgaggagaacagacacctgagagatgagggcctgcggctgaggaaggtggcccacagcgacaagccaggcagcaccagcacagccagcttccgggacaacgtgaccagccccctgcccagcctgctggtggtgattgctgccatcttcatcggcttcttcctgggcaagttcatcctgtag

SEQ ID NO: 175756 - DNA, 300 bp, synthetic construct
  misc_feature 1..300: note = Description of Artificial Sequence: Synthetic coding sequence
  source 1..300: mol_type = other DNA
atggccaaggtggagcaggtgctgagcctggagccccagcacgagctgaagttccggggccccttcacagatgtggtgaccaccaacctgaagctgggcaaccccacagacagaaatgtgtgcttcaaggtgaagaccacagccccccggcgctactgtgtgcggcccaacagcggcatcattgatgctggggccagcatcaacgtgtctggccgccgctggacagcagatgaagaagattctgctgagcagcagccccacttcagcatcagccccaactgggagggcagaagaccctag

SEQ ID NO: 175757 - DNA, 732 bp, synthetic construct
  misc_feature 1..732: note = Description of Artificial Sequence: Synthetic coding sequence
  source 1..732: mol_type = other DNA
atggccaaggtggagcaggtgctgagcctggagccccagcacgagctgaagttccggggccccttcacagatgtggtgaccaccaacctgaagctgggcaaccccacagacagaaatgtgtgcttcaaggtgaagaccacagccccccggcgctactgtgtgcggcccaacagcggcatcattgatgctggggccagcatcaacgtgtctgtgatgctgcagccctttgattatgaccccaatgagaagagcaagcacaagttcatggtgcagagcatgtttgcccccacagacaccagtgacatggaggccgtgtggaaggaggccaagccagaggacctgatggacagcaagctgcgctgtgtgtttgagctgcctgcagaaaatgacaagccccatgatgtggagatcaacaagatcatcagcaccacagccagcaagacagagacccccatcgtgtccaagagcctgagcagcagcctggatgacacagaggtgaagaaggtgatggaggagtgcaagaggctgcagggcgaggtgcagaggctgcgggaggagaacaagcagttcaaggaggaggatggcctgaggatgaggaagacagtgcagagcaacagccccatcagcgccctggcccccaccgggaaggaggagggcctgagcacccggctgctggccctggtggtgctcttcttcatcgtgggcgtcatcatcggcaagatcgccctgtag

SEQ ID NO: 175758 - DNA, 1575 bp, synthetic construct
  misc_feature 1..1575: note = Description of Artificial Sequence: Synthetic coding sequence
  source 1..1575: mol_type = other DNA
atggacacagagagcacctacagcggctacagctactacagcagccacagcaagaagagccaccggcagggcgagaggacccgggagcggcacaagagccccaggaacaaggatggccggggcagcgagaagtctgtgaccatccagccccccaccggggagcccctgctgggcaatgacagcaccaggacagaggaggtgcaggatgacaactggggcgagaccaccacagccatcaccggcaccagcgagcacagcatcagccaggaggacatcgcccgcatcagcaaggacatggaggacagcgtgggcctggactgcaagcgctacctgggcctgactgtggccagcttcctgggcctgctggtgttcctgacccccatcgccttcatcctgctgccccccatcctgtggagagatgagctggagccctgtggcaccatctgtgagggcctcttcatctccatggccttcaagctgctgatcctgctgattggcacctgggccctcttcttcaggaagagaagagctgacatgccccgggtgtttgtgttccgggccctgctgctggtgctgatcttcctgtttgtggtgtcctactggctgttctacggcgtgcgcatcctggacagccgggacaggaactaccagggcatcgtgcagtatgctgtgtccctggtggatgccctgctcttcatccactacctggccatcgtgctgctggagctgcggcagctgcagcccatgttcaccctgcaggtggtgcgcagcacagatggagagagccgcttctacagcctgggccacctgagcatccagagagctgccctggtggtgctggagaactactacaaggacttcaccatctacaaccccaacctgctgacagccagcaagttccgggccgccaagcacatggccggcctgaaggtgtacaacgtggatggccccagcaacaatgccaccggccagagccgggccatgattgctgctgctgccaggagaagagacagcagccacaatgagctgtactatgaggaggccgagcacgagcggcgggtgaagaagaggaaggcccggctggtggtggccgtggaggaggccttcatccacatccagaggctgcaggccgaggagcagcagaaggcccctggagaggtgatggacccccgggaggccgcccaggccatcttccccagcatggcccgggccctgcagaagtacctgcgcatcacccggcagcagaactaccacagcatggagagcatcctgcagcacctggccttctgcatcaccaacggcatgacccccaaggccttcctggagcgctacctgtctgctggccccaccctgcagtatgacaaggaccgctggctgagcacccagtggaggctggtgtctgatgaggccgtgaccaacggcctgagagatggcatcgtgtttgtgctgaagtgcctggacttcagcctggtggtgaatgtgaagaagatccccttcatcatcctgtctgaggagttcatcgaccccaagagccacaagtttgtgctgcggctgcagagcgagacctctgtgtag

SEQ ID NO: 175759 - DNA, 1575 bp, synthetic construct; identical to SEQ ID NO: 175758
  misc_feature 1..1575: note = Description of Artificial Sequence: Synthetic coding sequence
  source 1..1575: mol_type = other DNA

SEQ ID NO: 175760 - DNA, 1575 bp, synthetic construct; identical to SEQ ID NO: 175758
  misc_feature 1..1575: note = Description of Artificial Sequence: Synthetic coding sequence
  source 1..1575: mol_type = other DNA

SEQ ID NO: 175761 - DNA, 1569 bp, synthetic construct
  misc_feature 1..1569: note = Description of Artificial Sequence: Synthetic coding sequence
  source 1..1569: mol_type = other DNA
atggacacagagagcacctacagcggctacagctactacagcagccacagcaagaagagccaccggcagggcgagaggacccgggagcggcacaagagccccaggaacaaggatggccggggcagcgagaagtctgtgaccatccagccccccaccggggagcccctgctgggcaatgacagcaccaggacagaggaggatgacaactggggcgagaccaccacagccatcaccggcaccagcgagcacagcatcagccaggaggacatcgcccgcatcagcaaggacatggaggacagcgtgggcctggactgcaagcgctacctgggcctgactgtggccagcttcctgggcctgctggtgttcctgacccccatcgccttcatcctgctgccccccatcctgtggagagatgagctggagccctgtggcaccatctgtgagggcctcttcatctccatggccttcaagctgctgatcctgctgattggcacctgggccctcttcttcaggaagagaagagctgacatgccccgggtgtttgtgttccgggccctgctgctggtgctgatcttcctgtttgtggtgtcctactggctgttctacggcgtgcgcatcctggacagccgggacaggaactaccagggcatcgtgcagtatgctgtgtccctggtggatgccctgctcttcatccactacctggccatcgtgctgctggagctgcggcagctgcagcccatgttcaccctgcaggtggtgcgcagcacagatggagagagccgcttctacagcctgggccacctgagcatccagagagctgccctggtggtgctggagaactactacaaggacttcaccatctacaaccccaacctgctgacagccagcaagttccgggccgccaagcacatggccggcctgaaggtgtacaacgtggatggccccagcaacaatgccaccggccagagccgggccatgattgctgctgctgccaggagaagagacagcagccacaatgagctgtactatgaggaggccgagcacgagcggcgggtgaagaagaggaaggcccggctggtggtggccgtggaggaggccttcatccacatccagaggctgcaggccgaggagcagcagaaggcccctggagaggtgatggacccccgggaggccgcccaggccatcttccccagcatggcccgggccctgcagaagtacctgcgcatcacccggcagcagaactaccacagcatggagagcatcctgcagcacctggccttctgcatcaccaacggcatgacccccaaggccttcctggagcgctacctgtctgctggccccaccctgcagtatgacaaggaccgctggctgagcacccagtggaggctggtgtctgatgaggccgtgaccaacggcctgagagatggcatcgtgtttgtgctgaagtgcctggacttcagcctggtggtgaatgtgaagaagatccccttcatcatcctgtctgaggagttcatcgaccccaagagccacaagtttgtgctgcggctgcagagcgagacctctgtgtag

SEQ ID NO: 175762 - DNA, 1566 bp, synthetic construct
  misc_feature 1..1566: note = Description of Artificial Sequence: Synthetic coding sequence
  source 1..1566: mol_type = other DNA
atggacacagagagccagtacagcggctacagctacaagagcggccacagccgcagcagcaggaagcaccgggaccggcgggacagacacaggagcaagagcagagatggcggccgcggggacaagtctgtgaccatccaggcccctggagagcccctgctggacaatgaaagcaccagaggagatgaaagagatgacaactggggcgagaccaccaccgtggtgacaggcaccagcgagcacagcatcagccatgatgacctgaccagaattgccaaggacatggaggacagcgtgcccctggactgcagccgccacctgggcgtggccgccggggccaccctggccctgctgtccttcctgacccccctggccttcctgctgctgccccccctgctgtggagggaggagctggagccctgtggcacagcctgtgagggcctcttcatctctgtggccttcaagctgctgatcctgctgctgggctcctgggccctcttcttcagaagacccaaggccagcctgccccgggtgtttgtgctgcgggccctgctgatggtgctggtgttcctgctggtggtgtcctactggctgttctacggcgtgcgcatcctggatgcccgggagaggagctaccagggcgtggtgcagtttgctgtgtccctggtggatgccctgctgtttgtgcactacctggccgtggtgctgctggagctgcggcagctgcagccccagttcaccctgaaggtggtgcgcagcacagatggagccagccgcttctacaacgtgggccacctgagcatccagagggtggccgtgtggatcctggagaagtactaccatgacttccctgtgtacaacccagccctgctgaacctgcccaagtctgtgctggccaagaaggtgtctggcttcaaggtgtacagcctgggggaggagaacagcaccaacaacagcacaggccagagcagagctgtgattgctgctgctgccaggagaagagacaacagccacaatgagtactactatgaggaggccgagcacgagcggcgggtgaggaagagaagagcccggctggtggtggccgtggaggaggccttcacccacatcaagaggctgcaggaggaggagcagaagaacccccgggaggtgatggacccccgggaggccgcccaggccatctttgcctccatggcccgggccatgcagaagtacctgcggaccaccaagcagcagccctaccacaccatggagagcatcctgcagcacctggagttctgcatcacccatgacatgacccccaaggccttcctggagcgctacctggccgccggccccaccatccagtaccacaaggagcgctggctggccaagcagtggaccctggtgtctgaggagcctgtgaccaacggcctgaaggatggcatcgtgttcctgctgaagaggcaggacttcagcctggtggtgtccaccaagaaggtgcccttcttcaagctgtctgaggagtttgtggaccccaagagccacaagtttgtgatgaggctgcagagcgagacctctgtgtag

SEQ ID NO: 175763 - DNA, 1542 bp, synthetic construct
  misc_feature 1..1542: note = Description of Artificial Sequence: Synthetic coding sequence
  source 1..1542: mol_type = other DNA
atgaccacccagctgcctgcctacgtggccatcctgctcttctacgtgtcccgggccagctgccaggacaccttcaccgctgctgtgtatgagcacgccgccatcctgcccaatgccaccctgacccctgtgtcccgggaggaggccctggccctgatgaacagaaacctggacatcctggagggcgccatcaccagcgctgctgaccagggcgcccacatcatcgtgaccccagaagatgccatctacggctggaacttcaacagagacagcctgtacccctacctggaggacatcccagaccctgaggtgaactggatcccctgcaacaacagaaacagatttggccagacccctgtgcaggagcggctgagctgcctggccaagaacaacagcatctacgtggtggccaacattggagacaagaagccctgtgacaccagtgacccccagtgccccccagatggccgctaccagtacaacacagatgtggtgtttgacagccagggcaagctggtggcccgctaccacaagcagaacctcttcatgggagagaaccagttcaacgtgcccaaggagcctgagatcgtgaccttcaacaccaccttcggcagctttggcatcttcacctgctttgacatcctcttccatgaccctgctgtgaccctggtgaaggacttccacgtggacaccatcgtgttccccacagcctggatgaatgtgctgccccacctgtctgctgtggagttccacagcgcctgggccatgggcatgagggtgaacttcctggccagcaacatccactaccccagcaagaagatgactggaagtggcatctatgcccccaacagcagccgggccttccactatgacatgaagacagaggagggcaagctgctgctgagccagctggacagccaccccagccacagcgctgtggtgaactggaccagctatgccagcagcattgaggccctgagcagcggcaacaaggagttcaagggcaccgtcttctttgatgagttcacctttgtgaagctgactggagtggccggcaactacacagtgtgccagaaggacctgtgctgccacctgagctacaagatgtctgagaacatccccaatgaggtgtatgccctgggcgcctttgatggcctgcacacagtggagggccgctactacctgcagatctgcaccctgctgaagtgcaagaccaccaacctgaacacctgtggggacagcgctgagacagccagcaccaggtttgagatgttcagcctgagcggcaccttcggcacccagtatgtgtttcctgaggtgctgctgtctgagaaccagctggcccctggagagttccaggtgtccacagatggccgcctcttcagcctgaagcccaccagcggccctgtgctgactgtgaccctgtttggccgcctgtatgagaaggactgggccagcaatgccagcagcggcctgacagcccaggcccgcatcatcatgctgattgtcatcgcccccatcgtgtgcagcctgtcctggtag

SEQ ID NO: 175764 - DNA, 1563 bp, synthetic construct
  misc_feature 1..1563: note = Description of Artificial Sequence: Synthetic coding sequence
  source 1..1563: mol_type = other DNA
atggtgaccagcagcttccccatctctgtggccgtgtttgccctgatcaccctgcaggtgggcacccaggacagcttcatcgctgctgtgtatgaacatgctgtgatcctgcccaacaagacagagacccctgtgtcccaggaggatgccctgaacctgatgaatgaaaacatcgacatcctggagacagccatcaagcaggccgctgagcagggcgcccgcatcatcgtgaccccagaagatgccctgtatggctggaagttcacccgggagaccgtcttcccctacctggaggacatcccagacccccaggtgaactggatcccctgccaggacccccaccgcttcggccacacccctgtgcaggcccggctgagctgcctggccaaggacaacagcatctacgtgctggccaacctgggggacaagaagccctgcaacagccgggacagcacctgcccccccaacggctacttccagtacaacaccaacgtggtgtacaacacagagggcaagctggtggcccgctaccacaagtaccacctgtacagcgagccccagttcaacgtgcctgagaagccagagctggtgaccttcaacacagccttcggccgcttcggcatcttcacctgctttgacatcttcttctatgaccccggggtgaccctggtgaaggacttccacgtggacaccatcctcttccccacagcctggatgaatgtgctgcccctgctgacagccatcgagttccacagcgcctgggccatgggcatgggcgtgaacctgctggtggccaacacccaccacgtgtccctgaacatgactggaagtggcatctatgccccaaatggccccaaggtgtaccactatgacatgaagacagagctgggcaagctgctgctgtctgaggtggacagccaccccctgagcagcctggcctaccccacagctgtgaactggaatgcctatgccaccaccatcaagcccttccctgtgcagaagaacaccttccggggcttcatcagcagagatggcttcaacttcacagagctgtttgaaaatgccggcaacctgactgtgtgccagaaggagctgtgctgccacctgagctacaggatgctgcagaaggaggagaatgaggtgtatgtgctgggcgccttcaccggcctgcatggaagaagaagaagagagtactggcaggtgtgcaccctgctgaagtgcaagaccaccaacctgaccacctgtggccggcctgtggagacagccagcaccaggtttgagatgttcagcctgagcggcacctttggaacagaatatgtgtttcctgaggtgctgctgacagagatccacctgagccctgggaagtttgaggtgctgaaggatggccgcctggtgaacaagaatggcagcagcggccccatcctgactgtgtccctgtttggccgctggtacaccaaggacagcctgtacagcagctgtggcaccagcaacagcgccatcacctacctgctgatcttcatcctgctgatgatcatcgccctgcagaacatcgtgatgctgtag

SEQ ID NO: 175765 - DNA, 501 bp, synthetic construct
  misc_feature 1..501: note = Description of Artificial Sequence: Synthetic coding sequence
  source 1..501: mol_type = other DNA
atggtgaccagcagcttccccatctctgtggccgtgtttgccctgatcaccctgcaggtgggcacccaggacagcttcatcgctgctgtgtatgaacatgctgtgatcctgcccaacaagacagagacccctgtgtcccaggaggatgccctgaacctgatgaatgaaaacatcgacatcctggagacagccatcaagcaggccgctgagcagggcgcccgcatcatcgtgaccccagaagatgccctgtatggctggaagttcacccgggagaccgtcttcccctacctggaggacatcccagacccccaggtgaactggatcccctgccaggacccccaccgcttcggccacacccctgtgcaggcccggctgagctgcctggccaaggacaacagcatctacgtgctggccaacctgggggacaagaagccctgcaacagccgggacagcacctgcccccccaacggctacttccagtacaacaccaacgtggtgtag

SEQ ID NO: 175766 - DNA, 1404 bp, synthetic construct
  misc_feature 1..1404: note = Description of Artificial Sequence: Synthetic coding sequence
  source 1..1404: mol_type = other DNA
atgaatgaaaatattgacatcctggagacagccatcaagcaggccgctgagcagggcgcccgcatcatcgtgaccccagaagatgccctgtatggctggaagttcacccgggagaccgtcttcccctacctggaggacatcccagacccccaggtgaactggatcccctgccaggacccccacagatttggccacacccctgtgcaggcccggctgagctgcctggccaaggacaacagcatctacgtgctggccaacctgggggacaagaagccctgcaacagccgggacagcacctgccccccaaatggctacttccagtacaacaccaacgtggtgtacaacacagagggcaagctggtggcccgctaccacaagtaccacctgtacagcgagccccagttcaacgtgcctgagaagccagagctggtgaccttcaacacagccttcggccgcttcggcatcttcacctgctttgacatcttcttctatgaccccggggtgaccctggtgaaggacttccacgtggacaccatcctcttccccacagcctggatgaatgtgctgcccctgctgacagccatcgagttccacagcgcctgggccatgggcatgggcgtgaacctgctggtggccaacacccaccacgtgtccctgaacatgacaggcagcggcatctatgcccccaacggccccaaggtgtaccactatgacatgaagacagagctgggcaagctgctgctgtctgaggtggacagccaccccctgagcagcctggcctaccccacagctgtgaactggaatgcctatgccaccaccatcaagcccttccctgtgcagaagaacaccttccggggcttcatcagcagagatggcttcaacttcacagagctgtttgaaaatgccggcaacctgactgtgtgccagaaggagctgtgctgccacctgagctacaggatgctgcagaaggaggagaatgaggtgtatgtgctgggcgccttcaccggcctgcacggcagaagaagaagagagtactggcaggtgtgcaccctgctgaagtgcaagaccaccaacctgaccacctgtggccggcctgtggagacagccagcaccaggtttgagatgttcagcctgagcggcaccttcggcacagaatatgtgtttcctgaggtgctgctgacagagatccacctgagccctgggaagtttgaggtgctgaaggatggccgcctggtgaacaagaatggcagcagcggccccatcctgactgtgtccctgtttggccgctggtacaccaaggacagcctgtacagcagctgtggcaccagcaacagcgccatcacctacctgctgatcttcatcctgctgatgatcatcgccctgcagaacatcgtgatgctgtag

SEQ ID NO: 175767 - DNA, 309 bp, synthetic construct
  misc_feature 1..309: note = Description of Artificial Sequence: Synthetic coding sequence
  source 1..309: mol_type = other DNA
atgaatgaaaatattgacatcctggagacagccatcaagcaggccgctgagcagggcgcccgcatcatcgtgaccccagaagatgccctgtatggctggaagttcacccgggagaccgtcttcccctacctggaggacatcccagacccccaggtgaactggatcccctgccaggacccccacagatttggccacacccctgtgcaggcccggctgagctgcctggccaaggacaacagcatctacgtgctggccaacctgggggacaagaagccctgcaacagccgggacagcacctgccccccatag

SEQ ID NO: 175768 - DNA, 306 bp, synthetic construct
  misc_feature 1..306: note = Description of Artificial Sequence: Synthetic coding sequence
  source 1..306: mol_type = other DNA
atggtgaccagcagcttccccatctctgtggccgtgtttgccctgatcaccctgcaggtgggcacccaggacagcttcatcgctgctgtgtatgaacatgctgtgatcctgcccaacaagacagagacccctgtgtcccaggaggatgccctgaacctgatgaatgaaaacatcgacatcctggagacagccatcaagcaggccgctgagcagggcgcccgcatcatcgtgaccccagaagatgccctgtatggctggaagttcacccgggagaccgtcttcccctacctggaggacatcccctag

SEQ ID NO: 175769 - DNA, 2931 bp, synthetic construct
  misc_feature 1..2931: note = Description of Artificial Sequence: Synthetic coding sequence
  source 1..2931: mol_type = other DNA
atggaggagaggaagcatgagaccatgaacccagcccacgtgctgtttgacagatttgtgcaggccaccacctgcaagggcaccctgaaggccttccaggagctgtgtgaccacctggagctgaagcccaaggactaccgctccttctaccacaagctgaagagcaagctgaactactggaaggccaaggccctgtgggccaagctggacaagaggggcagccacaaggactacaagaagggcaaggcctgcaccaacaccaagtgcctgatcatcggggccggcccctgtggcctgaggacagccatcgacctgagcctgctgggcgccaaggtggtggtgattgagaagagagatgccttcagcagaaataatgtgctgcacctgtggcccttcaccatccatgacctgcggggcctgggcgccaagaagttctacggcaagttctgtgccggggccatcgaccacatcagcatccggcagctgcagctgatcctgctgaaggtggccctgatcctgggcatcgagatccacgtgaatgtggagttccagggcctcatccagcccccagaggaccaggagaatgaaagaattggctggagggccctggtgcaccccaagacccaccctgtgtctgaatatgaatttgaggtgatcattggaggagatggaagaagaaacaccctggagggcttccggaggaaggagttccggggcaagctggccatcgccatcacagccaacttcatcaacagaaacaccacagctgaggccaaggtggaggagatcagcggcgtggccttcatcttcaaccagaagttcttccaggagctgcgggaggccaccggcatcgacctggagaacatcgtgtactacaaggatgacacccactactttgtgatgacagccaagaagcagagcctgctggacaagggcgtcatcctgcatgactatgctgacacagagctgctgctgagccgggagaatgtggaccaggaggccctgctgtcctatgcccgggaggccgctgacttcagcacccagcagcagctgcccagcctggactttgccatcaaccactacggccagccagatgtggccatgtttgacttcacctgcatgtatgcctctgaaaatgctgccctggtgcgggagcagaatggccaccagctgctggtggccctggtgggggacagcctgctggagcccttctggcccatgggcactggaattgcccggggcttcctggccgccatggattctgcctggatggtgcgctcctggagcctgggcaccagccccctggaggtgctggccgagcgggagagcatctaccgcctgctgccccagaccaccccagaaaatgtgtccaagaacttcagccagtacagcattgatcctgtgacccgctaccccaacatcaacgtgaacttcctgcggcccagccaggtgcgccacctgtatgacaccggggagaccaaggacatccacctggagatggagagcctggtgaacagcaggaccacccccaagctgaccagaaatgaatctgtggcccggagcagcaagctgctgggctggtgccagaggcagacagatggctacgccggcgtgaatgtgacagacctgaccatgtcctggaagagcggcctggccctgtgtgccatcatccaccgctacagaccagacctgattgactttgacagcctggatgagcagaatgtggagaagaacaaccagctggcctttgatattgctgagaaggagctgggcatcagccccatcatgaccgggaaggagatggcctctgtgggggagccagacaagctgtccatggtgatgtacctgacccagttctatgagatgttcaaggacagcctgcccagcagtgacaccctggacctgaatgctgaggagaaggctgtgctgattgccagcaccaggagccccatctccttcctgagcaagctgggccagaccatcagcaggaagaggagccccaaggacaagaaggagaaggacctggatggagctgggaagaggaggaagaccagccagagcgaggaggaggaggccccccggggccacagaggagagcggcccaccctggtgtccaccctgacagacaggaggatggatgtggccgtgggcaaccagaacaaggtgaagtacatggccacccagctgctggccaagtttgaagaaaatgccccagcccagagcatcggcatccggcggcagctgacccaggagcggggggccagccagcccagctgctgcctgcccggccaggtgcggcctgcccccaccccccgctggaagcagggctccatgaagaaggagttcccccagaacctgggcggcagtgacacctgctacttctgccagaagagggtgtatgtgatggagcggctgtctgctgagggcaagttcttccacaggagctgcttcaagtgtgagtactgtgccaccaccctgcggctgagcgcctatgcctatgacattgaagatggcaagttctactgcaagccccactactgctaccgcctgagcggctacgcccagaggaagaggcctgctgtggcccccctgagcggcaaggaggccaagggccccctgcaggatggagccaccacagatgccaacggccgggccaatgctgtggccagcagcacagagaggaccccaggcagcggcgtgaatggcctggaggagcccagcatcgccaagaggctgcggggcaccccagagagaattgagctggagaactaccgcctgagcctgcggcaggccgaggccctgcaggaggtgcctgaggagacccaggccgagcacaacctgagctctgtgctggacacaggagcagaagaagatgtggccagccgcagcgccaggagagctgctggccggcccccagccacccggccctag

SEQ ID NO: 175770 - DNA, 825 bp, synthetic construct
  misc_feature 1..825: note = Description of Artificial Sequence: Synthetic coding sequence
  source 1..825: mol_type = other DNA
atgatcatcagccacttccccaagtgtgtggccgtgtttgccctgctggccctgtctgtgggcgccctggacaccttcatcgctgctgtgtatgaacatgctgtgatcctgcccaacagaacagagacccctgtgtccaaggaggaggccctgctgctgatgaacaagaacattgatgtgctggagaaggctgtgaagctggccgccaagcagggcgcccacatcatcgtgaccccagaagatggcatctacggctggatcttcacccgggagagcatctacccctacctggaggacatcccagaccccggggtgaactggatcccctgccgggacccctggaggtttggaaacacccctgtgcagcagaggctgagctgcctggccaaggacaacagcatctacgtggtggccaacatcggggacaagaagccctgcaatgccagtgacagccagtgccccccagatggccgctaccagtacaacacagatgtggtgtttgacagccagggcaagctgctggcccgctaccacaagtacaacctgtttgcccctgagatccagtttgacttccccaaggacagcgagctggtgacctttgacaccccatttgggaagtttggcatcttcacctgctttgacatcttcagccatgaccctgctgtggtggtggtggatgagttccagctgacagccttcagcaccccccagcacggcaccacccgctgccccagcagccgcctcttccccagcatccagcacggcccccggccctgggagagcatctacctgctgcagatccccaccaccccagcctgcacctag

SEQ ID NO: 175771 - DNA, 444 bp, synthetic construct
  misc_feature 1..444: note = Description of Artificial Sequence: Synthetic coding sequence
  source 1..444: mol_type = other DNA
atgatcatcagccacttccccaagtgtgtggccgtgtttgccctgctggccctgtctgtgggcgccctggacaccttcatcgctgctgtgtatgaacatgctgtgatcctgcccaacagaacagagacccctgtgtccaaggaggaggccctgctgctgatgaacaagaacattgatgtgctggagaaggctgtgaagctggccgccaagcagggcgcccacatcatcgtgaccccagaagatggcatctacggctggatcttcacccgggagagcatctacccctacctggaggacatcccagaccccggggtgaactggatcccctgccgggacccctggaggaagagcaagaagatgaatgaacctgtgtccaaggagctgtgctaccactgccacagcgagtgcaaccagtatggccagtggaagctgtaccgcacctag

SEQ ID NO: 175772 - DNA, 624 bp, synthetic construct
  misc_feature 1..624: note = Description of Artificial Sequence: Synthetic coding sequence
  source 1..624: mol_type = other DNA
atgatcatcagccacttccccaagtgtgtggccgtgtttgccctgctggccctgtctgtgggcgccctggacaccttcatcgctgctgtgtatgaacatgctgtgatcctgcccaacagaacagagacccctgtgtccaaggaggaggccctgctgctgatgaacaagaacattgatgtgctggagaaggctgtgaagctggccgccaagcagggcgcccacatcatcgtgaccccagaagatggcatctacggctggatcttcacccgggagagcatctacccctacctggaggacatcccagaccccggggtgaactggatcccctgccgggacccctggaggtttggaaacacccctgtgcagcagaggctgagctgcctggccaaggacaacagcatctacgtggtggccaacatcggggacaagaagccctgcaatgccagtgacagccagtgccccccagatggccgctaccagtacaacacagatgtggtgtttgacagccagggcaagctgctggcccgctaccacaagggcgtggagagcaccccccagaagcagagccgctgcaccaccatgacctggaagcagagggtggtgtcctgctgctaccagaactag

SEQ ID NO: 175773 - DNA, 561 bp, synthetic construct
  misc_feature 1..561: note = Description of Artificial Sequence: Synthetic coding sequence
  source 1..561: mol_type = other DNA
atgagccccaagccccgggccagcggccccccagccaaggccacagaagctgggaagaggaagagcagcagccagcccagccccagcgaccccaagaagaagaccaccaaggtggccaagaagggcaaggctgtgcggcggggcagaagaggcaagaagggagctgccaccaagatggctgctgtgacagcccctgaggccgagagcgccccagctgcccctggccccagcgaccagcccagccaggagctgccccagcacgagctgcccccagaggagcctgtgtctgagggcacccagcacgaccccctgagccaggaggccgagctggaggagcccctgagccaggagagcgaggtggaggagcccctgagccaggagagccaggtggaggagcccctgagccaggagagcgaggtggaggagcccctgagccaggagagccaggtggaggagcccctgagccaggagagcgagatggaggagcccctgagccaggagagccaggtggaggagccccccagccaggagagcgagatggaggagctgcccagcgtgtag

SEQ ID NO: 175774 - DNA, 621 bp, synthetic construct
  misc_feature 1..621: note = Description of Artificial Sequence: Synthetic coding sequence
  source 1..621: mol_type = other DNA
atgagccccaagccccgggccagcggccccccagccaaggccacagaagctgggaagaggaagagcagcagccagcccagccccagcgaccccaagaagaagaccaccaaggtggccaagaagggcaaggctgtgcggcggggcagaagaggcaagaagggagctgccaccaagatggctgctgtgacagcccctgaggccgagagcgccccagctgcccctggccccagcgaccagcccagccaggagctgccccagcacgagctgcccccagaggagcctgtgtctgagggcacccagcacgaccccctgagccaggaggccgagctggaggagcccctgagccaggagagcgaggtggaggagcccctgagccaggagagccaggtggaggagcccctgagccaggagagcgaggtggaggagcccctgagccaggagagccaggtggaggagcccctgagccaggagagcgaggtggaggagcccctgagccaggagagccaggtggaggagcccctgagccaggagagcgagatggaggagcccctgagccaggagagccaggtggaggagccccccagccaggagagcgagatggaggagctgcccagcgtgtag

SEQ ID NO: 175775 - DNA, 420 bp, synthetic construct
  misc_feature 1..420: note = Description of Artificial Sequence: Synthetic coding sequence
  source 1..420: mol_type = other DNA
atgagccccaagccccgggccagcggccccccagccaaggccacagaagctgggaagaggaagagcagcagccagcccagccccagcgaccccaagaagaagaccaccaaggtggccaagaagggcaaggctgtgcggcggggcagaagaggcaagaagggagctgccaccaagatggctgctgtgacagcccctgaggccgagagcgccccagctgcccctggccccagcgaccagcccagccaggagctgccccagcacgagctgcccccagaggagcctgtgtctgagggcacccagcacgaccccctgagccaggagagcgaggtggaggagcccctgagccaggagagcgaggtggaggagcccctgactgtgtggatggccagcttcagccctgtgtctgagagcacagactag

SEQ ID NO: 175776 - DNA, 561 bp, synthetic construct
  misc_feature 1..561: note = Description of Artificial Sequence: Synthetic coding sequence
  source 1..561: mol_type = other DNA
atgagccccaagccccgggccagcggccccccagccaaggccacagaagctgggaagaggaagagcagcagccagcccagccccagcgaccccaagaagaagaccaccaaggtggccaagaagggcaaggctgtgcggcggggcagaagaggcaagaagggagctgccaccaagatggctgctgtgacagcccctgaggccgagagcggccctgctgcccctggccccagcgaccagcccagccaggagctgccccagcacgagctgcccccagaggagcctgtgtctgagggcacccagcacgaccccctgagccaggagagcgagctggaggagcccctgagccaggagagcgaggtggaggagcccctgagccaggagagccaggtggaggagcccctgagccaggagagcgaggtggaggagcccctgagccaggagagccaggtggaggagcccctgagccaggagagcgaggtggaggagcccctgagccaggagagccaggtggaggagcccctgagccaggagagcgagatggaggagctgcccagcgtgtag

SEQ ID NO: 175777 - DNA, 501 bp, synthetic construct
  misc_feature 1..501: note = Description of Artificial Sequence: Synthetic coding sequence
  source 1..501: mol_type = other DNA
atgagccccaagccccgggccagcggccccccagccaaggccacagaagctgggaagaggaagagcagcagccagcccagccccagcgaccccaagaagaagaccaccaaggtggccaagaagggcaaggctgtgcggcggggcagaagaggcaagaagggagctgccaccaagatggctgctgtgacagcccctgaggccgagagcggccctgctgcccctggccccagcgaccagcccagccaggagctgccccagcacgagctgcccccagaggagcctgtgtctgagggcacccagcacgaccccctgagccaggagagcgagctggaggagcccctgagccaggagagcgaggtggaggagcccctgagccaggagagccaggtggaggagcccctgagccaggagagcgaggtggaggagcccctgagccaggagagccaggtggaggagcccctgagccaggagagcgagatggaggagctgcccagcgtgtag

SEQ ID NO: 175778 - DNA, 378 bp, synthetic construct
  misc_feature 1..378: note = Description of Artificial Sequence: Synthetic coding sequence
  source 1..378: mol_type = other DNA
atgagccccaagccccgggccagcggccccccagccaaggccacagaagctgggaagaggaagagcagcagccagcccagccccagcgaccccaagaagaagaccaccaaggtggccaagaagggcaaggctgtgcggcggggcagaagaggcaagaagggagctgccaccaagatggctgctgtgacagcccctgaggccgagagcggccctgctgcccctggccccagcgaccagcccagccaggagctgccccagcacgagctgcccccagaggagcctgtgtctgagggcacccagcacgaccccctgagccaggagagcgagctggaggagcccctgagccaggagaggcctgccacccccctgagcccctag

SEQ ID NO: 175779 - DNA, 378 bp, synthetic construct
  misc_feature 1..378: note = Description of Artificial Sequence: Synthetic coding sequence
  source 1..378: mol_type = other DNA
atgagccccaagccccgggccagcggccccccagccaaggccaaggagaccgggaagaggaagagcagcagccagcccagccccagcggccccaagaagaagaccaccaaggtggccgagaagggggaggccgtgcggggcggcagaagaggcaagaagggagctgccaccaagatggctgctgtgacagcccctgaggccgagagcggccctgctgcccctggccccagcgaccagcccagccaggagctgccccagcacgagctgcccccagaggagcctgtgtctgagggcacccagcacgaccccctgagccaggagagcgagctggaggagcccctgagcaagggccggcccagcacccccctgagcccctag

SEQ ID NO: 175780 - DNA, 2220 bp, synthetic construct
  misc_feature 1..2220: note = Description of Artificial Sequence: Synthetic coding sequence
  source 1..2220: mol_type = other DNA
atgcctgggaagatggtggtgatcctgggcgccagcaacatcctgtggatcatgtttgctgccagccaggccttcaagattgagaccaccccagagagccgctacctggcccagattggagacagcgtgtccctgacctgcagcaccaccggctgtgagagccccttcttctcctggaggacccagattgacagccccctgaatggcaaggtgaccaatgaaggcaccaccagcaccctgaccatgaaccctgtgtcctttggaaatgagcacagctacctgtgcacagccacctgtgagagcaggaagctggagaagggcatccaggtggagatctacagcttccccaaggaccctgagatccacctgagcggccccctggaggccggcaagcccatcaccgtgaagtgcagcgtggctgatgtgtacccctttgaccggctggagattgacctgctgaagggggaccacctgatgaagagccaggagttcctggaggatgctgacaggaagagcctggagaccaagagcctggaggtgaccttcacccctgtgattgaagatattggcaaggtgctggtgtgccgggccaagctgcacattgatgagatggacagcgtgcccaccgtgcggcaggccgtgaaggagctgcaggtgtacatcagccccaagaacacagtcatctctgtgaaccccagcaccaagctgcaggagggcggctctgtgaccatgacctgcagcagcgagggcctgcctgcccctgagatcttctggagcaagaagctggacaatggaaacctgcagcacctgtctggaaatgccaccctgaccctgattgccatgaggatggaggacagcggcatctacgtgtgtgaaggagtgaacctgattggcaagaacaggaaggaggtggagctgattgtgcaggagaagcccttcaccgtggagatcagccctggccccagaattgctgcccagattggagacagcgtgatgctgacctgcagcgtgatgggctgtgagagccccagcttctcctggaggacccagattgacagccccctgagcggcaaggtgcgctctgagggcaccaacagcaccctgaccctgagccctgtgtcctttgaaaatgagcacagctacctgtgcaccgtgacctgtggccacaagaagctggagaagggcatccaggtggagctgtacagcttcccccgggaccctgagattgagatgtctgggggcctggtgaatggcagctctgtgacagtgtcctgcaaggtgcccagcgtgtaccccctggaccggctggagattgagctgctgaagggggagaccatcctggagaacatcgagttcctggaggacacagacatgaagagcctggagaacaagagcctggagatgaccttcatccccaccattgaagatactgggaaggccctggtgtgccaggccaagctgcacattgatgacatggagtttgagcccaagcagaggcagagcacccagaccctgtatgtgaatgtggccccccgggacaccaccgtgctggtgagccccagcagcatcctggaggagggcagctctgtgaacatgacctgcctgagccagggcttccctgcccccaagatcctgtggagccggcagctgcccaacggggagctgcagcccctgtctgaaaatgccaccctgaccctcatcagcaccaagatggaggacagcggcgtgtacctgtgtgagggcatcaaccaggccggccgcagcaggaaggaggtggagctgatcatccaggtgacccccaaggacatcaagctgacagccttccccagcgagagcgtgaaggagggggacaccgtcatcatcagctgcacctgtggaaatgtgcctgagacctggatcatcctgaagaagaaggccgagactggagacacagtgctgaagagcattgatggagcctacaccatcaggaaggcccagctgaaggatgctggggtgtatgaatgtgagagcaagaacaaggtgggcagccagctgcggagcctgaccctggatgtgcagggccgggagaacaacaaggactacttcagccctgagctgctggtgctgtactttgccagcagcctcatcatcccagccatcggcatgatcatctactttgccaggaaggccaacatgaagggcagctacagcctggtggaggcccagaagagcaaggtgtag

SEQ ID NO: 175781 - DNA, 1944 bp, synthetic construct
  misc_feature 1..1944: note = Description of Artificial Sequence: Synthetic coding sequence
  source 1..1944: mol_type = other DNA
atgcctgggaagatggtggtgatcctgggcgccagcaacatcctgtggatcatgtttgctgccagccaggccttcaagattgagaccaccccagagagccgctacctggcccagattggagacagcgtgtccctgacctgcagcaccaccggctgtgagagccccttcttctcctggaggacccagattgacagccccctgaatggcaaggtgaccaatgaaggcaccaccagcaccctgaccatgaaccctgtgtcctttggaaatgagcacagctacctgtgcacagccacctgtgagagcaggaagctggagaagggcatccaggtggagatctacagcttccccaaggaccctgagatccacctgagcggccccctggaggccggcaagcccatcaccgtgaagtgcagcgtggctgatgtgtacccctttgaccggctggagattgacctgctgaagggggaccacctgatgaagagccaggagttcctggaggatgctgacaggaagagcctggagaccaagagcctggaggtgaccttcacccctgtgattgaagatattggcaaggtgctggtgtgccgggccaagctgcacattgatgagatggacagcgtgcccaccgtgcggcaggccgtgaaggagctgcaggtgtacatcagccccaagaacacagtcatctctgtgaaccccagcaccaagctgcaggagggcggctctgtgaccatgacctgcagcagcgagggcctgcctgcccctgagatcttctggagcaagaagctggacaatggaaacctgcagcacctgtctggaaatgccaccctgaccctgattgccatgaggatggaggacagcggcatctacgtgtgtgaaggagtgaacctgattggcaagaacaggaaggaggtggagctgattgtgcaggccttcccccgggaccctgagattgagatgtctgggggcctggtgaatggcagctctgtgacagtgtcctgcaaggtgcccagcgtgtaccccctggaccggctggagattgagctgctgaagggggagaccatcctggagaacatcgagttcctggaggacacagacatgaagagcctggagaacaagagcctggagatgaccttcatccccaccattgaagatactgggaaggccctggtgtgccaggccaagctgcacattgatgacatggagtttgagcccaagcagaggcagagcacccagaccctgtatgtgaatgtggccccccgggacaccaccgtgctggtgagccccagcagcatcctggaggagggcagctctgtgaacatgacctgcctgagccagggcttccctgcccccaagatcctgtggagccggcagctgcccaacggggagctgcagcccctgtctgaaaatgccaccctgaccctcatcagcaccaagatggaggacagcggcgtgtacctgtgtgagggcatcaaccaggccggccgcagcaggaaggaggtggagctgatcatccaggtgacccccaaggacatcaagctgacagccttccccagcgagagcgtgaaggagggggacaccgtcatcatcagctgcacctgtggaaatgtgcctgagacctggatcatcctgaagaagaaggccgagactggagacacagtgctgaagagcattgatggagcctacaccatcaggaaggcccagctgaaggatgctggggtgtatgaatgtgagagcaagaacaaggtgggcagccagctgcggagcctgaccctggatgtgcagggccgggagaacaacaaggactacttcagccctgagctgctggtgctgtactttgccagcagcctcatcatcccagccatcggcatgatcatctactttgccaggaaggccaacatgaagggcagctacagcctggtggaggcccagaagagcaaggtgtag

SEQ ID NO: 175782 - DNA, 1623 bp, synthetic construct
  misc_feature 1..1623: note = Description of Artificial Sequence: Synthetic coding sequence
  source 1..1623: mol_type = other DNA
atgcctgggaagatggtggtgatcctgggcgccagcaacatcctgtggatcatgtttgctgccagccaggccttcaagattgagaccaccccagagagccgctacctggcccagattggagacagcgtgtccctgacctgcagcaccaccggctgtgagagccccttcttctcctggaggacccagattgacagccccctgaatggcaaggtgaccaatgaaggcaccaccagcaccctgaccatgaaccctgtgtcctttggaaatgagcacagctacctgtgcacagccacctgtgagagcaggaagctggagaagggcatccaggtggagatctacagcttccccaaggaccctgagatccacctgagcggccccctggaggccggcaagcccatcaccgtgaagtgcagcgtggctgatgtgtacccctttgaccggctggagattgacctgctgaagggggaccacctgatgaagagccaggagttcctggaggatgctgacaggaagagcctggagaccaagagcctggaggtgaccttcacccctgtgattgaagatattggcaaggtgctggtgtgccgggccaagctgcacattgatgagatggacagcgtgcccaccgtgcggcaggccgtgaaggagctgcaggtgtacatcagccccaagaacacagtcatctctgtgaaccccagcaccaagctgcaggagggcggctctgtgaccatgacctgcagcagcgagggcctgcctgcccctgagatcttctggagcaagaagctggacaatggaaacctgcagcacctgtctggaaatgccaccctgaccctgattgccatgaggatggaggacagcggcatctacgtgtgtgaaggagtgaacctgattggcaagaacaggaaggaggtggagctgattgtgcaggtggccccccgggacaccaccgtgctggtgagccccagcagcatcctggaggagggcagctctgtgaacatgacctgcctgagccagggcttccctgcccccaagatcctgtggagccggcagctgcccaatggagagctgcagcccctgtctgaaaatgccaccctgaccctcatcagcaccaagatggaggacagcggcgtgtacctgtgtgagggcatcaaccaggccggccgcagcaggaaggaggtggagctgatcatccaggtgacccccaaggacatcaagctgacagccttccccagcgagagcgtgaaggagggggacaccgtcatcatcagctgcacctgtggaaatgtgcctgagacctggatcatcctgaagaagaaggccgagaccggggacacagtgctgaagagcattgatggagcctacaccatcaggaaggcccagctgaaggatgctggggtgtatgaatgtgagagcaagaacaaggtgggcagccagctgcggagcctgaccctggatgtgcagggccgggagaacaacaaggactacttcagccctgagctgctggtgctgtactttgccagcagcctcatcatcccagccatcggcatgatcatctactttgccaggaaggccaacatgaagggcagctacagcctggtggaggcccagaagagcaaggtgtag

SEQ ID NO: 175783 - DNA, 2034 bp, synthetic construct
  misc_feature 1..2034: note = Description of Artificial Sequence: Synthetic coding sequence
  source 1..2034: mol_type = other DNA
atgcctgggaagatggtggtgatcctgggcgccagcaacatcctgtggatcatgtttgctgccagccaggccttcaagattgagaccaccccagagagccgctacctggcccagattggagacagcgtgtccctgacctgcagcaccaccggcagcttccccaaggaccctgagatccacctgagcggccccctggaggccggcaagcccatcaccgtgaagtgcagcgtggctgatgtgtacccctttgaccggctggagattgacctgctgaagggggaccacctgatgaagagccaggagttcctggaggatgctgacaggaagagcctggagaccaagagcctggaggtgaccttcacccctgtgattgaagatattggcaaggtgctggtgtgccgggccaagctgcacattgatgagatggacagcgtgcccaccgtgcggcaggccgtgaaggagctgcaggtgtacatcagccccaagaacacagtcatctctgtgaaccccagcaccaagctgcaggagggcggctctgtgaccatgacctgcagcagcgagggcctgcctgcccctgagatcttctggagcaagaagctggacaatggaaacctgcagcacctgtctggaaatgccaccctgaccctgattgccatgaggatggaggacagcggcatctacgtgtgtgaaggagtgaacctgattggcaagaacaggaaggaggtggagctgattgtgcaggagaagcccttcaccgtggagatcagccctggccccagaattgctgcccagattggagacagcgtgatgctgacctgcagcgtgatgggctgtgagagccccagcttctcctggaggacccagattgacagccccctgagcggcaaggtgcgctctgagggcaccaacagcaccctgaccctgagccctgtgtcctttgaaaatgagcacagctacctgtgcaccgtgacctgtggccacaagaagctggagaagggcatccaggtggagctgtacagcttcccccgggaccctgagattgagatgtctgggggcctggtgaatggcagctctgtgacagtgtcctgcaaggtgcccagcgtgtaccccctggaccggctggagattgagctgctgaagggggagaccatcctggagaacatcgagttcctggaggacacagacatgaagagcctggagaacaagagcctggagatgaccttcatccccaccattgaagatactgggaaggccctggtgtgccaggccaagctgcacattgatgacatggagtttgagcccaagcagaggcagagcacccagaccctgtatgtgaatgtggccccccgggacaccaccgtgctggtgagccccagcagcatcctggaggagggcagctctgtgaacatgacctgcctgagccagggcttccctgcccccaagatcctgtggagccggcagctgcccaacggggagctgcagcccctgtctgaaaatgccaccctgaccctcatcagcaccaagatggaggacagcggcgtgtacctgtgtgagggcatcaaccaggccggccgcagcaggaaggaggtggagctgatcatccaggtgacccccaaggacatcaagctgacagccttccccagcgagagcgtgaaggagggggacaccgtcatcatcagctgcacctgtggaaatgtgcctgagacctggatcatcctgaagaagaaggccgagactggagacacagtgctgaagagcattgatggagcctacaccatcaggaaggcccagctgaaggatgctggggtgtatgaatgtgagagcaagaacaaggtgggcagccagctgcggagcctgaccctggatgtgcagggccgggagaacaacaaggactacttcagccctgagctgctggtgctgtactttgccagcagcctcatcatcccagccatcggcatgatcatctactttgccaggaaggccaacatgaagggcagctacagcctggtggaggcccagaagagcaaggtgtag

SEQ ID NO: 175784 - DNA, 1566 bp, synthetic construct
  misc_feature 1..1566: note = Description of Artificial Sequence: Synthetic coding sequence
  source 1..1566: mol_type = other DNA
atggaggccaactggacagccttcctgttccaggcccacgaggccagccaccaccagcagcaggccgcccagaacagcctgctgcccctgctgagcagcgctgtggagcccccagaccagaagcccctgctgcccatccccatcacccagaagccccagggcgcccctgagaccctgaaggatgccatcggcatcaagaaggagaagcccaagaccagctttgtgtgcacctactgcagcaaggccttccgggacagctaccacctgcggagacatgagagctgccacacaggcatcaagctggtgtcccggcccaagaagacccccaccaccgtggtgcccctcatcagcaccatcgccggggacagcagcaggaccagcctggtgtccaccatcgccggcatcctgagcacagtgaccaccagcagcagcggcaccaaccccagcagcagcgccagcaccacagccatgcctgtgacccagagcgtgaagaagcccagcaagcctgtgaagaagaaccacgcctgtgagatgtgtgggaaggccttcagagatgtgtaccacctgaacagacacaagctgagccacagtgatgagaagccctttgaatgtcccatctgcaaccagcgcttcaagaggaaggacaggatgacctaccacgtgcgcagccatgagggcggcatcaccaagccctacacctgcagcgtgtgtgggaagggcttcagcaggccagaccacctgagctgccacgtgaagcacgtgcacagcacagagcggcccttcaagtgccagacctgcacagctgcctttgccaccaaggaccggctgcggacccacatggtgagacatgagggcaaggtgtcctgcaacatctgtgggaagctgctgtctgctgcctacatcaccagccacctgaagacccacggccagagccagagcatcaactgcaacacctgcaagcagggcatcagcaagacctgcatgtctgaggagaccagcaaccagaagcagcagcagcagcagcagcagcagcagcagcagcagcagcagcagcagcagcagcacgtgacctcctggccaggcaagcaggtggagaccctgcggctgtgggaggaggccgtgaaggccaggaagaaggaggccgccaacctgtgccagaccagcacagctgccaccacccctgtgaccctgaccacccccttcagcatcaccagctctgtgagcagcggcaccatgagcaaccctgtgacagtggccgccgccatgtccatgaggagccctgtgaatgtgagcagcgctgtgaacatcaccagccccatgaacatcggccaccctgtgaccatcaccagccccctgtccatgaccagccccctgaccctgaccacccctgtgaacctgcccacccctgtgacagcccctgtgaacatcgcccaccctgtgaccatcaccagccccatgaacctgcccacccccatgaccctggccgcccccctgaacatcgccatgaggcctgtggagagcatgcccttcctgccccaggccctgcccaccagccccccctggtag

SEQ ID NO: 175785 - DNA, 1566 bp, synthetic construct; identical to SEQ ID NO: 175784
  misc_feature 1..1566: note = Description of Artificial Sequence: Synthetic coding sequence
  source 1..1566: mol_type = other DNA

SEQ ID NO: 175786 - DNA, 1374 bp, synthetic construct
  misc_feature 1..1374: note = Description of Artificial Sequence: Synthetic coding sequence
  source 1..1374: mol_type = other DNA
atgaggcctcccagccccctgcctgcccgctggctgtgtgtgctggccggggccctggcctgggccctgggccctgctgggggccaggccgcccggctgcaggaggagtgtgactatgtgcagatgattgaggtgcagcacaagcagtgcctggaggaggcccagctggagaatgagaccatcggctgcagcaagatgtgggacaacctgacctgctggccagccaccccccggggccaggtggtggtgctggcctgccccctcatcttcaagctgttcagcagcatccagggcagaaatgtgagccgcagctgcacagatgagggctggacccacctggagcccggcccctaccccatcgcctgtggcctggatgacaaggccgccagcctggatgagcagcagaccatgttttatggctctgtgaagacaggctacaccatcggctacggcctgagcctggccaccctgctggtggccacagccatcctgagcctcttcaggaagctgcactgcaccaggaactacatccacatgcacctgttcatctccttcatcctgcgggctgctgctgtgttcatcaaggacctggccctgtttgacagcggggagagtgaccagtgcagcgagggctctgtgggctgcaaggccgccatggtgttcttccagtactgtgtgatggccaacttcttctggctgctggtggagggcctgtacctgtacaccctgctggccgtgtccttcttcagcgagaggaagtacttctggggctacatcctgattggctggggcgtgcccagcaccttcaccatggtgtggaccatcgcccgcatccactttgaagattatggctgctgggacaccatcaacagcagcctgtggtggatcatcaagggccccatcctgaccagcatcctggtgaacttcatcctcttcatctgcatcatccgcatcctgctgcagaagctgcggcccccagacatcaggaagagtgacagcagcccctacagccggctggcccggagcaccctgctgctgatccccctgtttggagtgcactacatcatgtttgccttcttcccagacaacttcaagccagaggtgaagatggtgtttgagctggtggtgggcagcttccagggctttgtggtggccatcctgtactgcttcctgaatggagaggtgcaggccgagctgcggaggaagtggaggcgctggcacctgcagggcgtgctgggctggaaccccaagtaccgccaccccagcggcggcagcaatggagccacctgcagcacccaggtgtccatgctgaccagggtgtcccctggggcccggcgcagcagcagcttccaggccgaggtgtccctggtgtag

SEQ ID NO: 175787 - DNA, 1251 bp, synthetic construct
  misc_feature 1..1251: note = Description of Artificial Sequence: Synthetic coding sequence
  source 1..1251: mol_type = other DNA
atgattgaggtgcagcacaagcagtgcctggaggaggcccagctggagaatgagaccatcggctgcagcaagatgtgggacaacctgacctgctggccagccaccccccggggccaggtggtggtgctggcctgccccctcatcttcaagctgttcagcagcatccagggcagaaatgtgagccgcagctgcacagatgagggctggacccacctggagcccggcccctaccccatcgcctgtggcctggatgacaaggccgccagcctggatgagcagcagaccatgttctacggctctgtgaagacaggctacaccatcggctacggcctgagcctggccaccctgctggtggccacagccatcctgagcctcttcaggaagctgcactgcaccaggaactacatccacatgcacctgttcatctccttcatcctgcgggctgctgctgtgttcatcaaggacctggccctgtttgattctggagagagtgaccagtgcagcgagggctctgtgggctgcaaggccgccatggtgttcttccagtactgtgtgatggccaacttcttctggctgctggtggagggcctgtacctgtacaccctgctggccgtgtccttcttcagcgagaggaagtacttctggggctacatcctgattggctggggcgtgcccagcaccttcaccatggtgtggaccatcgcccgcatccactttgaggactatggctgctgggacaccatcaacagcagcctgtggtggatcatcaagggccccatcctgaccagcatcctggtgaacttcatcctcttcatctgcatcatccgcatcctgctgcagaagctgcggcccccagacatcaggaagagtgacagcagcccctacagccggctggcccggagcaccctgctgctgatccccctgtttggagtgcactacatcatgtttgccttcttcccagacaacttcaagccagaggtgaagatggtgtttgagctggtggtgggcagcttccagggctttgtggtggccatcctgtactgcttcctgaatggagaggtgcaggccgagctgcggaggaagtggaggcgctggcacctgcagggcgtgctgggctggaaccccaagtaccgccaccccagcggcggcagcaatggagccacctgcagcacccaggtgtccatgctgaccagggtgtcccctggggcccggcgcagcagcagcttccaggccgaggtgtccctggtgtag

SEQ ID NO: 175788 - DNA, 744 bp, synthetic construct
  misc_feature 1..744: note = Description of Artificial Sequence: Synthetic coding sequence
  source 1..744: mol_type = other DNA
atgacccggcagagggtgtggatgcgctgggccgtgcggcagccctggagcttcagcaacatcgtgtcctggctgaccagcagcggctgctggtggagggccagcacctgcaccccctgcctgcccagccccagcagcctgagcggcagcaccagcggcggcgtgcccagcaccttcaccatggtgtggaccatcgcccgcatccactttgaagattatggctgctgggacaccatcaacagcagcctgtggtggatcatcaagggccccatcctgaccagcatcctggtgaacttcatcctcttcatctgcatcatccgcatcctgctgcagaagctgcggcccccagacatcaggaagagtgacagcagcccctacagccggctggcccggagcaccctgctgctgatccccctgtttggagtgcactacatcatgtttgccttcttcccagacaacttcaagccagaggtgaagatggtgtttgagctggtggtgggcagcttccagggctttgtggtggccatcctgtactgcttcctgaatggagaggtgcaggccgagctgcggaggaagtggaggcgctggcacctgcagggcgtgctgggctggaaccccaagtaccgccaccccagcggcggcagcaatggagccacctgcagcacccaggtgtccatgctgaccagggtgtcccctggggcccggcgcagcagcagcttccaggccgaggtgtccctggtgtag

SEQ ID NO: 175789 - DNA, 1230 bp, synthetic construct
  misc_feature 1..1230: note = Description of Artificial Sequence: Synthetic coding sequence
  source 1..1230: mol_type = other DNA
atgagagctggaagaagaccccggctgggcccctgggccggcggctgcagcaagatgtgggacaacctgacctgctggccagccaccccccggggccaggtggtggtgctggcctgccccctcatcttcaagctgttcagcagcatccagggcagaaatgtgagccgcagctgcacagatgagggctggacccacctggagcccggcccctaccccatcgcctgtggcctggatgacaaggccgccagcctggatgagcagaccatgttttatggctctgtgaagacaggctacaccatcggctacggcctgagcctggccaccctgctggtggccacagccatcctgagcctcttcaggaagctgcactgcaccaggaactacatccacatgcacctgttcatctccttcatcctgcgggctgctgctgtgttcatcaaggacctggccctgtttgacagcggggagagtgaccagtgcagcgagggctctgtgggctgcaaggccgccatggtgttcttccagtactgtgtgatggccaacttcttctggctgctggtggagggcctgtacctgtacaccctgctggccgtgtccttcttcagcgagaggaagtacttctggggctacatcctgattggctggggcgtgcccagcaccttcaccatggtgtggaccatcgcccgcatccactttgaagattatggctgctgggacaccatcaacagcagcctgtggtggatcatcaagggccccatcctgaccagcatcctggtgaacttcatcctcttcatctgcatcatccgcatcctgctgcagaagctgcggcccccagacatcaggaagagtgacagcagcccctacagccggctggcccggagcaccctgctgctgatccccctgtttggagtgcactacatcatgtttgccttcttcccagacaacttcaagccagaggtgaagatggtgtttgagctggtggtgggcagcttccagggctttgtggtggccatcctgtactgcttcctgaatggagaggtgcaggccgagctgcggaggaagtggaggcgctggcacctgcagggcgtgctgggctggaaccccaagtaccgccaccccagcggcggcagcaatggagccacctgcagcacccaggtgtccatgctgaccagggtgtcccctggggcccggcgcagcagcagcttccaggccgaggtgtccctggtgtag

SEQ ID NO: 175790 - DNA, 1317 bp, synthetic construct
  misc_feature 1..1317: note = Description of Artificial Sequence: Synthetic coding sequence
  source 1..1317: mol_type = other DNA
atgaggaccctgctgcccccagccctgctgacctgctggctgctggcccctgtgaacagcatccaccctgagtgccgcttccacctggagatccaggaggaggagaccaagtgtgccgagctgctgcggagccagacagagaagcacaaggcctgcagcggcgtgtgggacaacatcacctgctggaggcctgccaacgtgggggagaccgtgacagtgccctgccccaaggtgttcagcaacttctacagcaaggccggcaacatcagcaagaactgcaccagtgatggctggagcgagaccttcccagactttgtggatgcctgtggctacagcgaccctgaagatgagagcaagatcaccttctacatcctggtgaaggccatctacaccctgggctacagcgtgtccctgatgagcctggccaccggcagcatcatcctgtgcctcttcaggaagctgcactgcaccaggaactacatccacctgaacctcttcctgtccttcatcctgcgggccatctctgtgctggtgaaggatgatgtgctgtacagcagcagcggcaccctgcactgcccagaccagcccagctcctgggtgggctgcaagctgagcctggtgttcctgcagtactgcatcatggccaacttcttctggctgctggtggagggcctgtacctgcacaccctgctggtggccatgctgcccccccggcgctgcttcctggcctacctgctgattggctggggcctgcccaccgtgtgcatcggggcctggacagctgcccggctgtacctggaggacaccggctgctgggacaccaatgaccacagcgtgccctggtgggtgatccgcatccccatcctgatcagcatcatcgtgaactttgtgctcttcatcagcatcatccgcatcctgctgcagaagctgaccagcccagatgtgggcggcaatgaccagagccagtacaagaggctggccaagagcaccctgctgctgatccccctgtttggagtgcactacatggtgtttgctgtgttccccatcagcatcagcagcaagtaccagatcctgtttgagctgtgcctgggcagcttccagggcctggtggtggccgtgctgtactgcttcctgaacagcgaggtgcagtgtgagctgaagaggaagtggaggagccgctgccccacccccagcgccagccgggactacagagtgtgtggcagcagcttcagcagaaatggaagtgaaggagccctgcagttccaccggggcagccgggcccagagcttcctgcagacagagaccagcgtcatctag

SEQ ID NO: 175791 - DNA, 1269 bp, synthetic construct
  misc_feature 1..1269: note = Description of Artificial Sequence: Synthetic coding sequence
  source 1..1269: mol_type = other DNA
atgcccctgtgggaggcccccagcgaccacccagccaaccccccagccaccctgcagggccacaccagcctgcccggctgccaggaggagcccgcccgggacccccagagcggcctgccccagatcaccagcgagagcagcagcttcagcgagggcagcctgcccagctggagcagcggccctgctggggccaagctgaatgccagccatgagggcatcggcagcagcagtgatggaaatggagacagcaaggccgccacagagcgggtggtgtctgccatggacacagtgcggaggaagcaccctgagatcaccttctacatcctggtgaaggccatctacaccctgggctacagcgtgtccctgatgagcctggccaccggcagcatcatcctgtgcctcttcaggaagctgcactgcaccaggaactacatccacctgaacctcttcctgtccttcatcctgcgggccatctctgtgctggtgaaggatgatgtgctgtacagcagcagcggcaccctgcactgcccagaccagcccagctcctgggtgggctgcaagctgagcctggtgttcctgcagtactgcatcatggccaacttcttctggctgctggtggagggcctgtacctgcacaccctgctggtggccatgctgcccccccggcgctgcttcctggcctacctgctgattggctggggcctgcccaccgtgtgcatcggggcctggacagctgcccggctgtacctggaggacaccggctgctgggacaccaatgaccacagcgtgccctggtgggtgatccgcatccccatcctgatcagcatcatcgtgaactttgtgctcttcatcagcatcatccgcatcctgctgcagaagctgaccagcccagatgtgggcggcaatgaccagagccagtacaagaggctggccaagagcaccctgctgctgatccccctgtttggagtgcactacatggtgtttgctgtgttccccatcagcatcagcagcaagtaccagatcctgtttgagctgtgcctgggcagcttccagggcctggtggtggccgtgctgtactgcttcctgaacagcgaggtgcagtgtgagctgaagaggaagtggaggagccgctgccccacccccagcgccagccgggactacagagtgtgtggcagcagcttcagcagaaatggaagtgaaggagccctgcagttccaccggggcagccgggcccagagcttcctgcagacagagaccagcgtcatctag

SEQ ID NO: 175792 - DNA, 234 bp, synthetic construct
  misc_feature 1..234: note = Description of Artificial Sequence: Synthetic coding sequence
  source 1..234: mol_type = other DNA
atgaggaccctgctgcccccagccctgctgacctgctggctgctggcccctgtgaacagcatccaccctgagtgccgcttccacctggagatccaggaggaggagaccaagtgtgccgagctgctgcggagccagacagagaagcacaagggccacaccaagggcttcatcctgattcatgctgggggcctgaagaggatcctggacccccacacctaccccctggccccctag

SEQ ID NO: 175793 - DNA, 2022 bp, synthetic construct
  misc_feature 1..2022: note = Description of Artificial Sequence: Synthetic coding sequence
  source 1..2022: mol_type = other DNA
atgtgcagccgggtgcccctgctgctgcccctgctgctgctgctggccctgggccctggggtgcagggctgccccagcggctgccagtgcagccagccccagacagtgttctgcacagcccggcagggcaccaccgtgcccagagatgtgcccccagacacagtgggcctgtatgtgtttgaaaatggcatcaccatgctggatgctggcagctttgctggcctgcccggcctgcagctgctggacctgagccagaaccagatcgccagcctgcccagcggggtcttccagcccctggccaacctgagcaacctggacctgacagccaaccggctgcacgagatcaccaatgagaccttccggggcctgcggcggctggagcggctgtacctgggcaagaaccgcatccgccacatccagcccggggcctttgacaccctggaccggctgctggagctgaagctgcaggacaatgagctgcgggccctgccccccctgcggctgccccggctgctgctgctggacctgagccacaacagcctgctggccctggagcccggcatcctggacacagccaacgtggaggccctgcggctggccggcctgggcctgcagcagctggatgagggcctcttcagccggctgaggaacctgcatgacctggatgtgtctgacaaccagctggagcgggtgccccctgtgatccggggcctgcggggcctgacccggctgcggctggccggcaacacccgcatcgcccagctgcggcctgaggacctggccggcctggccgccctgcaggagctggatgtgagcaacctgagcctgcaggccctgcccggggacctgagcggcctcttcccccggctgcggctgctggccgccgccaggaaccccttcaactgtgtgtgccccctgtcctggtttggcccctgggtgcgggagagccacgtgaccctggccagccctgaggagacccgctgccacttcccccccaagaatgccggccgcctgctgctggagctggactatgctgactttggctgcccagccaccaccaccacagccaccgtgcccaccaccaggcctgtggtgcgggagcccacagccctgagcagcagcctggcccccacctggctgagccccacagagcccgccacagaggcccccagcccccccagcacagcccccccaacagtgggccctgtgccccagccccaggactgcccccccagcacctgcctgaatggaggcacctgccacctgggcaccaggcaccacctggcctgcctgtgcccagagggcttcaccggcctgtactgtgagagccagatgggccagggcacccggcccagccccacccctgtgaccccccggccccccaggagcctgaccctgggcatcgagcctgtgagccccaccagcctgcgggtgggcctgcagcgctacctgcagggcagctctgtgcagctgcggagcctgcggctgacctacagaaacctgagcggccctgacaagaggctggtgaccctgcggctgcctgccagcctggccgagtacacagtgacccagctgcggcccaatgccacctacagcgtgtgtgtgatgcccctgggccctggccgggtgcctgagggggaggaggcctgtggggaggcccacaccccacctgctgtgcacagcaaccacgcccctgtgacccaggcccgggagggcaacctgcccctgctgattgccccagccctggccgctgtgctgctggccgccctggccgctgtgggcgccgcctactgtgtgcggcggggccgggccatggctgctgctgcccaggacaagggccaggtgggccctggagctggccccctggagctggagggcgtgaaggtgcccctggagcccggccccaaggccacagagggcggcggggaggccctgcccagcggctctgaatgtgaggtgcccctgatgggcttccctggccctggcctgcagagccccctgcacgccaagccctacatctag

SEQ ID NO: 175794 - DNA, 2538 bp, synthetic construct
  misc_feature 1..2538: note = Description of Artificial Sequence: Synthetic coding sequence
  source 1..2538: mol_type = other DNA
atggagctgtggaggcagtgcacccactggctgatccagtgccgggtgctgccccccagccaccgggtgacctgggatggagcccaggtgtgtgagctggcccaggccctgagagatggagtgctgctgtgccagctgctgaacaacctgctgccccacgccatcaacctgcgggaggtgaacctgcggccccagatgagccagttcctgtgcctgaagaacatccgcaccttcctgagcacctgctgtgagaagtttggcctgaagaggtctgagctgtttgaggcctttgacctgtttgatgtgcaggactttgggaaggtgatctacaccctgagcgccctgtcctggacccccatcgcccagaacagaggcatcatgcccttccccacagaggaggagagcgtgggagatgaggacatctacagcggcctgagtgaccagattgatgacacagtggaggaggatgaggacctgtatgactgtgtggagaatgaggaggccgagggagatgagatctatgaggacctgatgaggtctgagcctgtgtccatgccacccaagatgacagaatatgacaagcgctgctgctgcctgcgggagatccagcagacagaggagaagtacacagacaccctgggcagcatccagcagcacttcctgaagcccctgcagcgcttcctgaagccccaggacatcgagatcatcttcatcaacatcgaggacctgctgcgggtgcacacccacttcctgaaggagatgaaggaggccctgggcaccccaggagctgccaacctgtaccaggtgttcatcaagtacaaggagcgcttcctggtgtatggccgctactgcagccaggtggagagcgccagcaagcacctggacagagtggccgccgcccgggaggatgtgcagatgaagctggaggagtgcagccagagggccaacaacggccgcttcaccctgcgggacctgctgatggtgcccatgcagagggtgctgaagtaccacctgctgctgcaggagctggtgaagcacacccaggaggccatggagaaggagaacctgcggctggccctggatgccatgagggacctggcccagtgtgtgaatgaggtgaagagggacaatgagaccctgcggcagatcaccaacttccagctgagcattgagaacctggaccagagcctggcccactacggccggcccaagattgatggagagctgaagatcacctctgtggagcggcgcagcaagatggacagatatgccttcctgctggacaaggccctgctgatctgcaagagaagaggagacagctatgacctgaaggactttgtgaacctgcacagcttccaggtgagagatgacagcagcggggaccgggacaacaagaagtggagccacatgttcctgctgattgaggaccagggcgcccagggctatgagctgttcttcaagacccgggagctgaagaagaagtggatggagcagtttgagatggccatcagcaacatctacccagaaaatgccacagccaacggccatgacttccagatgttctcctttgaggagaccaccagctgcaaggcctgccagatgctgctgcggggcaccttctaccagggctaccgctgccaccgctgccgggccagcgcccacaaggagtgcctgggccgggtgcccccctgtggcagacatggccaggacttccctggcaccatgaagaaggacaagctgcaccggcgggcccaggacaagaagagaaatgagctgggcctgcccaagatggaggtgttccaggagtactacggcctgcccccacctcctggggccatcggccccttcctgcggctgaaccctggggacatcgtggagctgaccaaggccgaggccgagcagaactggtgggagggcaggaacaccagcaccaatgaaattggctggttcccctgcaacagagtgaagccctacgtgcacggccccccccaggacctgtctgtgcacctgtggtacgccggccccatggagagagctggagctgagagcatcctggccaacagaagtgatggcaccttcctggtgcggcagagggtgaaggatgctgctgagtttgccatcagcatcaagtacaacgtggaggtgaagcacatcaagatcatgacagctgagggcctgtaccgcatcacagagaagaaggccttccggggcctgacagagctggtggagttctaccagcagaacagcctgaaggactgcttcaagagcctggacaccaccctgcagttccccttcaaggagcctgagaagaggaccatcagcaggcctgctgtgggcagcaccaagtacttcggcacagccaaggcccgctatgacttctgtgcccgggacagaagtgagctgagcctgaaggagggggacatcatcaagatcctgaacaagaagggccagcagggctggtggagaggagagatctacggccgggtgggctggttccctgccaactacgtggaggaggactacagcgagtactgctag

SEQ ID NO: 175795 - DNA, 2247 bp, synthetic construct
  misc_feature 1..2247: note = Description of Artificial Sequence: Synthetic coding sequence
  source 1..2247: mol_type = other DNA
atgagccagttcctgtgcctgaagaacatccgcaccttcctgagcacctgctgtgagaagtttggcctgaagaggtctgagctgtttgaggcctttgacctgtttgatgtgcaggactttgggaaggtgatctacaccctgagcgccctgtcctggacccccatcgcccagaacagaggcatcatgcccttccccacagaggaggagagcgtgggagatgaggacatctacagcggcctgagtgaccagattgatgacacagtggaggaggatgaggacctgtatgactgtgtggagaatgaggaggccgagggagatgagatctatgaggacctgatgaggtctgagcctgtgtccatgccccacttcctgaagcccctgcagcgcttcctgaagccccaggacatcgagatcatcttcatcaacatcgaggacctgctgcgggtgcacacccacttcctgaaggagatgaaggaggccctgggcacccctggggccgccaacctgtaccaggtgttcatcaagtacaaggagcgcttcctggtgtatggccgctactgcagccaggtggagagcgccagcaagcacctggacagagtggccgccgccagagaagatgtgcagatgaagctggaggagtgcagccagagggccaacaacggccgcttcaccctgcgggacctgctgatggtgcccatgcagagggtgctgaagtaccacctgctgctgcaggagctggtgaagcacacccaggaggccatggagaaggagaacctgcggctggccctggatgccatgagggacctggcccagtgtgtgaatgaggtgaagagggacaatgagaccctgcggcagatcaccaacttccagctgagcattgagaacctggaccagagcctggcccactacggccggcccaagattgatggagagctgaagatcacctctgtggagaggaggagcaagatggacagatatgccttcctgctggacaaggccctgctgatctgcaagagaagaggagacagctatgacctgaaggactttgtgaacctgcacagcttccaggtgagagatgacagcagcggggaccgggacaacaagaagtggagccacatgttcctgctgattgaggaccagggcgcccagggctatgagctgttcttcaagacccgggagctgaagaagaagtggatggagcagtttgagatggccatcagcaacatctacccagaaaatgccacagccaatggacatgacttccagatgttctcctttgaggagaccaccagctgcaaggcctgccagatgctgctgcggggcaccttctaccagggctaccgctgccaccgctgccgggccagcgcccacaaggaatgtctgggccgggtgcccccctgtggccgccacggccaggacttccctggcaccatgaagaaggacaagctgcacagaagagcccaggacaagaagagaaatgagctgggcctgcccaagatggaggtgttccaggagtactacggcctgcccccacctcctggggccatcggccccttcctgcggctgaaccctggggacatcgtggagctgaccaaggccgaggccgagcagaactggtgggagggcaggaacaccagcaccaatgagatcggctggttcccctgcaacagagtgaagccctacgtgcacggccccccccaggacctgtctgtgcacctgtggtacgccggccccatggagcgggccggggctgagagcatcctggccaacagaagtgatggcaccttcctggtgcggcagagggtgaaggatgctgctgagtttgccatcagcatcaagtacaacgtggaggtgaagcacatcaagatcatgacagctgagggcctgtaccgcatcacagagaagaaggccttccggggcctgacagagctggtggagttctaccagcagaacagcctgaaggactgcttcaagagcctggacaccaccctgcagttccccttcaaggagcctgagaagaggaccatcagcaggcctgctgtgggcagcaccaagtactttggaacagccaaggcccgctatgacttctgtgcccgggacagaagtgagctgagcctgaaggagggggacatcatcaagatcctgaacaagaagggccagcagggctggtggagaggagagatctacggccgggtgggctggttccctgccaactacgtggaggaggactacagcgagtactgctag

SEQ ID NO: 175796 - DNA, 2442 bp, synthetic construct
  misc_feature 1..2442: note = Description of Artificial Sequence: Synthetic coding sequence
  source 1..2442: mol_type = other DNA
atggagctgtggaggcagtgcacccactggctgatccagtgccgggtgctgccccccagccaccgggtgacctgggatggagcccaggtgtgtgagctggcccaggccctgagagatggagtgctgctgtgccagctgctgaacaacctgctgccccacgccatcaacctgcgggaggtgaacctgcggccccagatgagccagttcctgtgcctgaagaacatccgcaccttcctgagcacctgctgtgagaagtttggcctgaagaggtctgagctgtttgaggcctttgacctgtttgatgtgcaggactttgggaaggtgatctacaccctgagcgccctgtcctggacccccatcgcccagaacagaggcatcatgcccttccccacagaggaggagagcgtgggagatgaggacatctacagcggcctgagtgaccagattgatgacacagtggaggaggatgaggacctgtatgactgtgtggagaatgaggaggccgagggagatgagatctatgaggacctgatgaggtctgagcctgtgtccatgccccacttcctgaagcccctgcagcgcttcctgaagccccaggacatcgagatcatcttcatcaacatcgaggacctgctgcgggtgcacacccacttcctgaaggagatgaaggaggccctgggcaccccaggagctgccaacctgtaccaggtgttcatcaagtacaaggagcgcttcctggtgtatggccgctactgcagccaggtggagagcgccagcaagcacctggacagagtggccgccgcccgggaggatgtgcagatgaagctggaggagtgcagccagagggccaacaacggccgcttcaccctgcgggacctgctgatggtgcccatgcagagggtgctgaagtaccacctgctgctgcaggagctggtgaagcacacccaggaggccatggagaaggagaacctgcggctggccctggatgccatgagggacctggcccagtgtgtgaatgaggtgaagagggacaatgagaccctgcggcagatcaccaacttccagctgagcattgagaacctggaccagagcctggcccactacggccggcccaagattgatggagagctgaagatcacctctgtggagcggcgcagcaagatggacagatatgccttcctgctggacaaggccctgctgatctgcaagagaagaggagacagctatgacctgaaggactttgtgaacctgcacagcttccaggtgagagatgacagcagcggggaccgggacaacaagaagtggagccacatgttcctgctgattgaggaccagggcgcccagggctatgagctgttcttcaagacccgggagctgaagaagaagtggatggagcagtttgagatggccatcagcaacatctacccagaaaatgccacagccaacggccatgacttccagatgttctcctttgaggagaccaccagctgcaaggcctgccagatgctgctgcggggcaccttctaccagggctaccgctgccaccgctgccgggccagcgcccacaaggagtgcctgggccgggtgcccccctgtggcagacatggccaggacttccctggcaccatgaagaaggacaagctgcaccggcgggcccaggacaagaagagaaatgagctgggcctgcccaagatggaggtgttccaggagtactacggcctgcccccacctcctggggccatcggccccttcctgcggctgaaccctggggacatcgtggagctgaccaaggccgaggccgagcagaactggtgggagggcaggaacaccagcaccaatgaaattggctggttcccctgcaacagagtgaagccctacgtgcacggccccccccaggacctgtctgtgcacctgtggtacgccggccccatggagagagctggagctgagagcatcctggccaacagaagtgatggcaccttcctggtgcggcagagggtgaaggatgctgctgagtttgccatcagcatcaagtacaacgtggaggtgaagcacatcaagatcatgacagctgagggcctgtaccgcatcacagagaagaaggccttccggggcctgacagagctggtggagttctaccagcagaacagcctgaaggactgcttcaagagcctggacaccaccctgcagttccccttcaaggagcctgagaagaggaccatcagcaggcctgctgtgggcagcaccaagtacttcggcacagccaaggcccgctatgacttctgtgcccgggacagaagtgagctgagcctgaaggagggggacatcatcaagatcctgaacaagaagggccagcagggctggtggagaggagagatctacggccgggtgggctggttccctgccaactacgtggaggaggactacagcgagtactgctag

SEQ ID NO: 175797 - DNA, 2538 bp, synthetic construct; identical to SEQ ID NO: 175794
  misc_feature 1..2538: note = Description of Artificial Sequence: Synthetic coding sequence
  source 1..2538: mol_type = other DNA

SEQ ID NO: 175798 - DNA, 2607 bp, synthetic construct
  misc_feature 1..2607: note = Description of Artificial Sequence: Synthetic coding sequence
  source 1..2607: mol_type = other DNA
atggagcagtggaggcagtgtggccgctggctgattgactgcaaggtgctgccccccaaccaccgggtggtgtggcccagcgctgtggtgtttgacctggcccaggccctgagagatggagtgctgctgtgccagctgctgcacaacctgagccctggcagcattgacctgaaggacatcaacttccggccccagatgagccagttcctgtgcctgaagaacatccgcaccttcctgaaggtgtgccacgacaagtttggcctgagaaattctgagctgtttgacccctttgacctgtttgatgtgcgggactttgggaaggtgatctctgctgtgtcccggctgagcctgcacagcatcgcccagaacaagggcatccggcccttccccagcgaggagaccacagaaaatgatgatgatgtgtaccgcagcctggaggagctggctgatgaacatgacctgggggaggacatctatgactgtgtgccctgtgaagatggaggagatgacatctatgaggacatcatcaaggtggaggtgcagcagcccatgaagatgggcatgacagaagatgacaagaggaactgctgcctgctggagatccaggagacagaggccaagtactaccgcaccctggaggacatcgagaagaactacatgagccccctgcggctggtgctgagccctgctgacatggctgctgtgttcatcaacctggaggacctgatcaaggtgcaccacagcttcctgcgggccattgatgtgtctgtgatggtgggcggcagcaccctggccaaggtgttcctggacttcaaggagcggctgctgatctacggggagtactgcagccacatggagcacgcccagaacaccctgaaccagctgctggccagccgggaggacttccggcagaaggtggaggagtgcaccctgaaggtgcaggacggcaagttcaagctgcaggacctgctggtggtgcccatgcagagggtgctgaagtaccacctgctgctgaaggagctgctgagccacagcgctgagaggcctgagcggcagcagctgaaggaggccctggaggccatgcaggacctggccatgtacatcaatgaggtgaagagggacaaggagaccctgaggaagatcagcgagttccagagcagcattgagaacctgcaggtgaagctggaggagtttggccggcccaagattgatggagagctgaaggtgcgcagcatcgtgaaccacaccaagcaggaccgctacctgttcctgtttgacaaggtggtgattgtgtgcaagaggaagggctacagctatgagctgaaggagatcatcgagctgctcttccacaagatgacagatgaccccatgaacaacaaggatgtgaagaagtggagctatggcttctacctgatccacctgcagggcaagcagggcttccagttcttctgcaagacagaggacatgaagaggaagtggatggagcagtttgagatggccatgagcaacatcaagccagacaaggccaatgccaaccaccacagcttccagatgtacacctttgacaagaccaccaactgcaaggcctgcaagatgttcctgcggggcaccttctaccagggctacatgtgcaccaagtgtggggtgggcgcccacaaggagtgcctggaggtgatccccccctgcaagttccgcaccagcggggacagagatgccagcggggccggccctggccccaagatggtggccatgcagaactaccacggcaacccagcccctcctgggaagcctgtgctgaccttccagacaggagatgtgctggagctgctgcggggggaccctgagagcccctggtgggagggccgcctggtgcagaccaggaagagcggctacttccccagcagctctgtgaagccctgccctgtggatggccggccccccatcagcaggcctcccagccgggagattgactacacagcctacccctggtttgctggcaacatggagcggcagcagacagacaacctgctgaagagccacgccagcggcacctacctgatccgggagaggcctgctgaggccgagagatttgccatcagcatcaagttcaatgatgaggtgaagcacatcaaggtggtggagaaggacaactggatccacatcacagaggccaagaagtttgacagcctgctggagctggtggagtactaccagtgccacagcctgaaggagagcttcaagcagctggacaccaccctgaagtacccctacaagagccgggagaggtctgccagccgggccagcagccgcagccctgccagctgtgccagctacaacttctccttcctgagcccccagggcctgagctttgccagccagggccccagcgcccccttctggagcgtcttcacccccagggtcatcggcacagctgtggcccgctacaactttgctgcccgggacatgagggagctgagcctgcgggagggagatgtggtgcgcatctacagcagaattggaggagaccagggctggtggaagggggagaccaacggccgcatcggctggttccccagcacctacgtggaggaggagggcatccagtag

SEQ ID NO: 175799 - DNA, 2637 bp, synthetic construct
  misc_feature 1..2637: note = Description of Artificial Sequence: Synthetic coding sequence
  source 1..2637: mol_type = other DNA
atggagcagtggaggcagtgtggccgctggctgattgactgcaaggtgctgccccccaaccaccgggtggtgtggcccagcgctgtggtgtttgacctggcccaggccctgagagatggagtgctgctgtgccagctgctgcacaacctgagccctggcagcattgacctgaaggacatcaacttccggccccagatgagccagttcctgtgcctgaagaacatccgcaccttcctgaaggtgtgccacgacaagtttggcctgagaaattctgagctgtttgacccctttgacctgtttgatgtgcgggactttgggaaggtgatctctgctgtgtcccggctgagcctgcacagcatcgcccagaacaagggcatccggcccttccccagcgaggagaccacagaaaatgatgatgatgtgtaccgcagcctggaggagctggctgatgaacatgacctgggggaggacatctatgactgtgtgccctgtgaagatggaggagatgacatctatgaggacatcatcaaggtggaggtgcagcagcccatgatccgctacatgcagaagatgggcatgacagaagatgacaagaggaactgctgcctgctggagatccaggagacagaggccaagtactaccgcaccctggaggacatcgagaagaactacatgagccccctgcggctggtgctgagccctgctgacatggctgctgtgttcatcaacctggaggacctgatcaaggtgcaccacagcttcctgcgggccattgatgtgtctgtgatggtgggcggcagcaccctggccaaggtgttcctggacttcaaggagcggctgctgatctatggagagtactgcagccacatggagcacgcccagaacaccctgaaccagctgctggccagccgggaggacttccggcagaaggtggaggagtgcaccctgaaggtgcaggacggcaagttcaagctgcaggacctgctggtggtgcccatgcagagggtgctgaagtaccacctgctgctgaaggagctgctgagccacagcgctgagaggcctgagcggcagcagctgaaggaggccctggaggccatgcaggacctggccatgtacatcaatgaggtgaagagggacaaggagaccctgaggaagatcagcgagttccagagcagcattgagaacctgcaggtgaagctggaggagtttggccggcccaagattgatggagagctgaaggtgcgcagcatcgtgaaccacaccaagcaggaccgctacctgttcctgtttgacaaggtggtgattgtgtgcaagaggaagggctacagctatgagctgaaggagatcatcgagctgctcttccacaagatgacagatgaccccatgaacaacaaggatgtgaagaagagccacggcaagatgtggagctatggcttctacctgatccacctgcagggcaagcagggcttccagttcttctgcaagacagaggacatgaagaggaagtggatggagcagtttgagatggccatgagcaacatcaagccagacaaggccaatgccaaccaccacagcttccagatgtacacctttgacaagaccaccaactgcaaggcctgcaagatgttcctgcggggcaccttctaccagggctacatgtgcaccaagtgtggggtgggcgcccacaaggagtgcctggaggtgatccccccctgcaagttcaccagccctgctgacctggatgccagcggggccggccctggccccaagatggtggccatgcagaactaccacggcaacccagcccctcctgggaagcctgtgctgaccttccagacaggagatgtgctggagctgctgcggggggaccctgagagcccctggtgggagggccgcctggtgcagaccaggaagagcggctacttccccagcagctctgtgaagccctgccctgtggatggccggccccccatcagcaggcctcccagccgggagattgactacacagcctacccctggtttgctggcaacatggagcggcagcagacagacaacctgctgaagagccacgccagcggcacctacctgatccgggagaggcctgctgaggccgagagatttgccatcagcatcaagttcaatgatgaggtgaagcacatcaaggtggtggagaaggacaactggatccacatcacagaggccaagaagtttgacagcctgctggagctggtggagtactaccagtgccacagcctgaaggagagcttcaagcagctggacaccaccctgaagtacccctacaagagccgggagaggtctgccagccgggccagcagccgcagccctgccagctgtgccagctacaacttctccttcctgagcccccagggcctgagctttgccagccagggccccagcgcccccttctggagcgtcttcacccccagggtcatcggcacagctgtggcccgctacaactttgctgcccgggacatgagggagctgagcctgcgggagggagatgtggtgcgcatctacagcagaattggaggagaccagggctggtggaagggggagaccaacggccgcatcggctggttccccagcacctacgtggaggaggagggcatccagtag

SEQ ID NO: 175800 - DNA, 2607 bp, synthetic construct
  misc_feature 1..2607: note = Description of Artificial Sequence: Synthetic coding sequence
  source 1..2607: mol_type = other DNA
atggagcagtggaggcagtgtggccgctggctgattgactgcaaggtgctgccccccaaccaccgggtggtgtggcccagcgctgtggtgtttgacctggcccaggccctgagagatggagtgctgctgtgccagctgctgcacaacctgagccctggcagcattgacctgaaggacatcaacttccggccccagatgagccagttcctgtgcctgaagaacatccgcaccttcctgaaggtgtgccacgacaagtttggcctgagaaattctgagctgtttgacccctttgacctgtttgatgtgcgggactttgggaaggtgatctctgctgtgtcccggctgagcctgcacagcatcgcccagaacaagggcatccggcccttccccagcgaggagaccacagaaaatgatgatgatgtgtaccgcagcctggaggagctggctgatgaacatgacctgggggaggacatctatgactgtgtgccctgtgaagatggaggagatgacatctatgaggacatcatcaaggtggaggtgcagcagcccatgaagatgggcatgacagaagatgacaagaggaactgctgcctgctggagatccaggagacagaggccaagtactaccgcaccctggaggacatcgagaagaactacatgagccccctgcggctggtgctgagccctgctgacatggctgctgtgttcatcaacctggaggacctgatcaaggtgcaccacagcttcctgcgggccattgatgtgtctgtgatggtgggcggcagcaccctggccaaggtgttcctggacttcaaggagcggctgctgatctacggggagtactgcagccacatggagcacgcccagaacaccctgaaccagctgctggccagccgggaggacttccggcagaaggtggaggagtgcaccctgaaggtgcaggacggcaagttcaagctgcaggacctgctggtggtgcccatgcagagggtgctgaagtaccacctgctgctgaaggagctgctgagccacagcgctgagaggcctgagcggcagcagctgaaggaggccctggaggccatgcaggacctggccatgtacatcaatgaggtgaagagggacaaggagaccctgaggaagatcagcgagttccagagcagcattgagaacctgcaggtgaagctggaggagtttggccggcccaagattgatggagagctgaaggtgcgcagcatcgtgaaccacaccaagcaggaccgctacctgttcctgtttgacaaggtggtgattgtgtgcaagaggaagggctacagctatgagctgaaggagatcatcgagctgctcttccacaagatgacagatgaccccatgaacaacaaggatgtgaagaagtggagctatggcttctacctgatccacctgcagggcaagcagggcttccagttcttctgcaagacagaggacatgaagaggaagtggatggagcagtttgagatggccatgagcaacatcaagccagacaaggccaatgccaaccaccacagcttccagatgtacacctttgacaagaccaccaactgcaaggcctgcaagatgttcctgcggggcaccttctaccagggctacatgtgcaccaagtgtggggtgggcgcccacaaggagtgcctggaggtgatccccccctgcaagttcaccagccctgctgacctggatgccagcggggccggccctggccccaagatggtggccatgcagaactaccacggcaacccagcccctcctgggaagcctgtgctgaccttccagacaggagatgtgctggagctgctgcggggggaccctgagagcccctggtgggagggccgcctggtgcagaccaggaagagcggctacttccccagcagctctgtgaagccctgccctgtggatggccggccccccatcagcaggcctcccagccgggagattgactacacagcctacccctggtttgctggcaacatggagcggcagcagacagacaacctgctgaagagccacgccagcggcacctacctgatccgggagaggcctgctgaggccgagagatttgccatcagcatcaagttcaatgatgaggtgaagcacatcaaggtggtggagaaggacaactggatccacatcacagaggccaagaagtttgacagcctgctggagctggtggagtactaccagtgccacagcctgaaggagagcttcaagcagctggacaccaccctgaagtacccctacaagagccgggagaggtctgccagccgggccagcagccgcagccctgccagctgtgccagctacaacttctccttcctgagcccccagggcctgagctttgccagccagggccccagcgcccccttctggagcgtcttcacccccagggtcatcggcacagctgtggcccgctacaactttgctgcccgggacatgagggagctgagcctgcgggagggagatgtggtgcgcatctacagcagaattggaggagaccagggctggtggaagggggagaccaacggccgcatcggctggttccccagcacctacgtggaggaggagggcatccagtag

SEQ ID NO: 175801 - DNA, 2520 bp, synthetic construct
  misc_feature 1..2520: note = Description of Artificial Sequence: Synthetic coding sequence
  source 1..2520: mol_type = other DNA
atggagcagtggaggcagtgtggccgctggctgattgactgcaaggtgctgccccccaaccaccgggtggtgtggcccagcgctgtggtgtttgacctggcccaggccctgagagatggagtgctgctgtgccagctgctgcacaacctgagccctggcagcattgacctgaaggacatcaacttccggccccagatgagccagttcctgtgcctgaagaacatccgcaccttcctgaaggtgtgccacgacaagtttggcctgagaaattctgagctgtttgacccctttgacctgtttgatgtgcgggactttgggaaggtgatctctgctgtgtcccggctgagcctgcacagcatcgcccagaacaagggcatccggcccttccccagcgaggagaccacagaaaatgatgatgatgtgtaccgcagcctggaggagctggctgatgaacatgacctgggggaggacatctatgactgtgtgccctgtgaagatggaggagatgacatctatgaggacatcatcaaggtggaggtgcagcagcccatgaagatgggcatgacagaagatgacaagaggaactgctgcctgctggagatccaggagacagaggccaagtactaccgcaccctggaggacatcgagaagaactacatgagccccctgcggctggtgctgagccctgctgacatggctgctgtgttcatcaacctggaggacctgatcaaggtgcaccacagcttcctgcgggccattgatgtgtctgtgatggtgggcggcagcaccctggccaaggtgttcctggacttcaaggagcggctgctgatctacggggagtactgcagccacatggagcacgcccagaacaccctgaaccagctgctggccagccgggaggacttccggcagaaggtggaggagtgcaccctgaaggtgcaggacggcaagttcaagctgcaggacctgctggtggtgcccatgcagagggtgctgaagtaccacctgctgctgaaggagctgctgagccacagcgctgagaggcctgagcggcagcagctgaaggaggccctggaggccatgcaggacctggccatgtacatcaatgaggtgaagagggacaaggagaccctgaggaagatcagcgagttccagagcagcattgagaacctgcaggtgaagctggaggagtttggccggcccaagattgatggagagctgaaggtgcgcagcatcgtgaaccacaccaagcaggaccgctacctgttcctgtttgacaaggtggtgattgtgtgcaagaggaagggctacagctatgagctgaaggagatcatcgagctgctcttccacaagatgacagatgaccccatgaacaacaaggatgtgaagaagtggagctatggcttctacctgatccacctgcagggcaagcagggcttccagttcttctgcaagacagaggacatgaagaggaagtggatggagcagtttgagatggccatgagcaacatcaagccagacaaggccaatgccaaccaccacagcttccagatgtacacctttgacaagaccaccaactgcaaggcctgcaagatgttcctgcggggcaccttctaccagggctacatgtgcaccaagtgtggggtgggcgcccacaaggagtgcctggaggtgatccccccctgcaagttcaccagccctgctgacctggatgccagcggggccggccctggccccaagatggtggccatgcagaactaccacggcaacccagcccctcctgggaagcctgtgctgaccttccagacaggagatgtgctggagctgctgcggggggaccctgagagcccctggtgggagggccgcctggtgcagaccaggaagagcggctacttccccagcagctctgtgaagccctgccctgtggatggccggccccccatcagcaggcctcccagccgggagattgactacacagcctacccctggtttgctggcaacatggagcggcagcagacagacaacctgctgaagagccacgccagcggcacctacctgatccgggagaggcctgctgaggccgagagatttgccatcagcatcaagttcaatgatgaggtgaagcacatcaaggtggtggagaaggacaactggatccacatcacagaggccaagaagtttgacagcctgctggagctggtggagtactaccagtgccacagcctgaaggagagcttcaagcagctggacaccaccctgaagtacccctacaagagccgggagaggtctgccagccgggccagcagccgcagccctgtgttcaccccccgggtgattggaacagctgtggcccgctacaactttgctgcccgggacatgagggagctgagcctgcgggagggagatgtggtgcgcatctacagccgcatcggcggggaccagggctggtggaagggggagaccaacggcagaattggctggttccccagcacctacgtggaggaggagggcatccagtag

SEQ ID NO: 175802 - DNA, 2544 bp, synthetic construct
  misc_feature 1..2544: note = Description of Artificial Sequence: Synthetic coding sequence
  source 1..2544: mol_type = other DNA
atggagccctggaagcagtgtgcccagtggctgatccactgcaaggtgctgcccaccaaccaccgggtgacctgggacagcgcccaggtgtttgacctggcccagaccctgagagatggagtgctgctgtgccagctgctgaacaacctgcgggcccacagcatcaacctgaaggagatcaacctgcggccccagatgagccagttcctgtgcctgaagaacatccgcaccttcctgacagcctgctgtgagaccttcggcatgaggaagtctgagctgtttgaggcctttgacctgtttgatgtgcgggactttgggaaggtgattgagaccctgagccggctgagcaggacccccatcgccctggccaccggcatccggcccttccccacagaggagagcatcaatgatgaggacatctacaagggcctgcctgacctgattgatgagaccctggtggaggatgaggaggacctgtatgactgtgtgtatggagaagatgaaggaggagaggtgtatgaggacctgatgaaggccgaggaggcccaccagcccaagtgcccagaaaatgacatccgcagctgctgcctggccgagatcaagcagacagaggagaagtacacagagaccctggagagcattgagaagtacttcatggcccccctgaagcgcttcctgacagctgctgagtttgattctgtgttcatcaacatccctgagctggtgaagctgcacaggaacctgatgcaggagatccatgacagcatcgtgaacaagaatgaccagaacctgtaccaggtgttcatcaactacaaggagcggctggtgatctacggccagtactgcagcggcgtggagagcgccatcagcagcctggactacatcagcaagaccaaggaggatgtgaagctgaagctggaggagtgcagcaagagggccaacaacgggaagttcaccctgcgggacctgctggtggtgcccatgcagagggtgctgaagtaccacctgctgctgcaggagctggtgaagcacaccacagaccccacagagaaggccaacctgaagctggccctggatgccatgaaggacctggcccagtatgtgaatgaggtgaagagggacaatgagaccctgcgggagatcaagcagttccagctgagcattgagaacctgaaccagcctgtgctgctgtttggccggccccagggagatggagagatccgcatcaccaccctggacaagcacaccaagcaggagcggcacatcttcctgtttgacctggccgtcatcgtgtgcaagaggaaaggagacaactatgagatgaaggagatcatcgacctgcagcagtacaagatcgccaacaaccccaccacagacaaggagaacaagaagtggagctatggcttctacctgatccacacccagggccagaatggcctggagttctactgcaagaccaaggacctgaagaagaagtggctggagcagtttgagatggccctgagcaacatccggccagactatgctgacagcaacttccatgacttcaagatgcacaccttcaccagggtgaccagctgcaaggtgtgccagatgctgctgcggggcaccttctaccagggctacctgtgcttcaagtgtggggcccgggcccacaaggagtgcctgggccgggtggacaactgtggccgggtgaacagcggggagcagggcaccctgaagctgcctgagaagaggaccaacggcctgcggaggacccccaagcaggtggaccccggcctgcccaagatgcaggtgatccggaactacagcggcaccccacctccagccctgcacgagggcccccccctgcagctgcaggccggggacacagtggagctgctgaagggagatgcccacagcctcttctggcagggcaggaacctggccagcggggaggtgggcttcttccccagtgatgctgtgaagccctgcccctgtgtgcccaagcctgtggactacagctgccagccctggtacgccggggccatggagcggctgcaggccgagacagagctgatcaacagagtgaacagcacctacctggtgcgccacaggaccaaggagagcggggagtatgccatcagcatcaagtacaacaatgaggccaagcacatcaagatcctgaccagagatggcttcttccacatcgccgagaacaggaagttcaagagcctgatggagctggtggagtactacaagcaccacagcctgaaggagggcttccgcaccctggacaccaccctgcagttcccctacaaggagcctgagcacagcgctggccagaggggcaacagagctggcaacagcctgctgagccccaaggtgctgggcatcgccatcgcccgctatgacttctgtgcccgggacatgagggagctgagcctgctgaagggagatgtggtgaagatctacaccaagatgtctgccaacggctggtggagaggagaggtgaatggccgggtgggctggttccccagcacctacgtggaggaggatgaatag

SEQ ID NO: 175803 - DNA, 1671 bp, synthetic construct
  misc_feature 1..1671: note = Description of Artificial Sequence: Synthetic coding sequence
  source 1..1671: mol_type = other DNA
atgagccagttcctgtgcctgaagaacatccgcaccttcctgacagcctgctgtgagaccttcggcatgaggaagtctgagctgtttgaggcctttgacctgtttgatgtgcgggactttgggaaggtgattgagaccctgagccggctgagcaggacccccatcgccctggccaccggcatccggcccttccccacagaggagagcatcaatgatgaggacatctacaagggcctgcctgacctgattgatgagaccctggtggaggatgaggaggacctgtatgactgtgtgtatggagaagatgagggcggggaggtgtatgaggacctgatgaaggccgaggaggcccaccagcccaagtgcccagaaaatgacatccgcagctgctgcctggccgagatcaagcagacagaggagaagtacacagagaccctggagagcattgagaagtacttcatggcccccctgaagcgcttcctgacagctgctgagtttgacagcgtcttcatcaacatccctgagctggtgaagctgcacaggaacctgatgcaggagatccatgacagcatcgtgaacaagaatgaccagaacctgtaccaggtgttcatcaactacaaggagcggctggtgatctacggccagtactgcagcggcgtggagagcgccatcagcagcctggactacatcagcaagaccaaggaggatgtgaagctgaagctggaggagtgcagcaagagggccaacaacgggaagttcaccctgcgggacctgctggtggtgcccatgcagagggtgctgaagtaccacctgctgctgcaggagctggtgaagcacaccacagaccccacagagaaggccaacctgaagctggccctggatgccatgaaggacctggcccagtatgtgaatgaggtgaagagggacaatgagaccctgcgggagatcaagcagttccagctgagcattgagaacctgaaccagcctgtgctgctgtttggccggccccagggagatggagagatccgcatcaccaccctggacaagcacaccaagcaggagcggcacatcttcctgtttgacctggccgtgattgtgtgcaagaggaagggggacaactatgagatgaaggagatcatcgacctgcagcagtacaagatcgccaacaaccccaccacagacaaggagaacaagaagtggagctatggcttctacctgatccacacccagggccagaatggcctggagttctactgcaagaccaaggacctgaagaagaagtggctggagcagtttgagatggccctgagcaacatccggccagactatgctgacagcaacttccatgacttcaagatgcacaccttcaccagggtgaccagctgcaaggtgtgccagatgctgctgcggggcaccttctaccagggctacctgtgcttcaagtgtggggcccgggcccacaaggaatgtctgggccgggtggacaactgtggccgggtgaacagcggggagcagggcaccctgaagctgcctgagaagaggaccaacggcctgcggaggacccccaagcaggtggaccctgatgtgccctgcctgctgcacttcttcatctccatggccccagccaccaggagcatcgtgaagagccagaagaagaacaagaagttctag

SEQ ID NO: 175804 - DNA, 864 bp, synthetic construct
  misc_feature 1..864: note = Description of Artificial Sequence: Synthetic coding sequence
  source 1..864: mol_type = other DNA
atgcccatcttcaccttcctgtctgagcagggcaccctgaagctgcctgagaagaggaccaacggcctgcggaggacccccaagcaggtggaccccggcctgcccaagatgcaggtgatccggaactacagcggcaccccacctccagccctgcacgagggcccccccctgcagctgcaggccggggacacagtggagctgctgaagggagatgcccacagcctcttctggcagggcaggaacctggccagcggggaggtgggcttcttccccagtgatgctgtgaagccctgcccctgtgtgcccaagcctgtggactacagctgccagccctggtacgccggggccatggagcggctgcaggccgagacagagctgatcaacagagtgaacagcacctacctggtgcgccacaggaccaaggagagcggggagtatgccatcagcatcaagtacaacaatgaggccaagcacatcaagatcctgaccagagatggcttcttccacatcgccgagaacaggaagttcaagagcctgatggagctggtggagtactacaagcaccacagcctgaaggagggcttccgcaccctggacaccaccctgcagttcccctacaaggagcctgagcacagcgctggccagaggggcaacagagctggcaacagcctgctgagccccaaggtgctgggcatcgccatcgcccgctatgacttctgtgcccgggacatgagggagctgagcctgctgaagggagatgtggtgaagatctacaccaagatgtctgccaacggctggtggagaggagaggtgaatggccgggtgggctggttccccagcacctacgtggaggaggatgaatag

SEQ ID NO: 175805 - DNA, 2628 bp, synthetic construct
  misc_feature 1..2628: note = Description of Artificial Sequence: Synthetic coding sequence
  source 1..2628: mol_type = other DNA
atggagccctggaagcagtgtgcccagtggctgatccactgcaaggtgctgcccaccaaccaccgggtgacctgggacagcgcccaggtgtttgacctggcccagaccctgagagatggagtgctgctgtgccagctgctgaacaacctgcgggcccacagcatcaacctgaaggagatcaacctgcggccccagatgagccagttcctgtgcctgaagaacatccgcaccttcctgacagcctgctgtgagaccttcggcatgaggaagtctgagctgtttgaggcctttgacctgtttgatgtgcgggactttgggaaggtgattgagaccctgagccggctgagcaggacccccatcgccctggccaccggcatccggcccttccccacagaggagagcatcaatgatgaggacatctacaagggcctgcctgacctgattgatgagaccctggtggaggatgaggaggacctgtatgactgtgtgtatggagaagatgaaggaggagaggtgtatgaggacctgatgaaggccgaggaggcccaccagcccaagtgcccagaaaatgacatccgcagctgctgcctggccgagatcaagcagacagaggagaagtacacagagaccctggagagcattgagaagtacttcatggcccccctgaagcgcttcctgacagctgctgagtttgattctgtgttcatcaacatccctgagctggtgaagctgcacaggaacctgatgcaggagatccatgacagcatcgtgaacaagaatgaccagaacctgtaccaggtgttcatcaactacaaggagcggctggtgatctacggccagtactgcagcggcgtggagagcgccatcagcagcctggactacatcagcaagaccaaggaggatgtgaagctgaagctggaggagtgcagcaagagggccaacaacgggaagttcaccctgcgggacctgctggtggtgcccatgcagagggtgctgaagtaccacctgctgctgcaggagctggtgaagcacaccacagaccccacagagaaggccaacctgaagctggccctggatgccatgaaggacctggcccagtatgtgaatgaggtgaagagggacaatgagaccctgcgggagatcaagcagttccagctgagcattgagaacctgaaccagcctgtgctgctgtttggccggccccagggagatggagagatccgcatcaccaccctggacaagcacaccaagcaggagcggcacatcttcctgtttgacctggccgtcatcgtgtgcaagaggaaaggagacaactatgagatgaaggagatcatcgacctgcagcagtacaagatcgccaacaaccccaccacagacaaggagaacaagaagtggagctatggcttctacctgatccacacccagggccagaatggcctggagttctactgcaagaccaaggacctgaagaagaagtggctggagcagtttgagatggccctgagcaacatccggccagactatgctgacagcaacttccatgacttcaagatgcacaccttcaccagggtgaccagctgcaaggtgtgccagatgctgctgcggggcaccttctaccagggctacctgtgcttcaagtgtggggcccgggcccacaaggagtgcctgggccgggtggacaactgtggccgggtgaacagcggggagcagggcaccctgaagctgcctgagaagaggaccaacggcctgcggaggacccccaagcaggtggaccccggcctgcccaagatgcaggtgatccggaactacagcggcaccccacctccagccctgcacgagggcccccccctgcagctgcaggccggggacacagtggagctgctgaagggagatgcccacagcctcttctggcagggcaggaacctggccagcggggaggtgggcttcttccccagtgatgctgtgaagccctgcccctgtgtgcccaagcctgtggactacagctgccagccctggtacgccggggccatggagcggctgcaggccgagacagagctgatcaacagagtgaacagcacctacctggtgcgccacaggaccaaggagagcggggagtatgccatcagcatcaagtacaacaatgaggccaagcacatcaagatcctgaccagagatggcttcttccacatcgccgagaacaggaagttcaagagcctgatggagctggtggagtactacaagcaccacagcctgaaggagggcttccgcaccctggacaccaccctgcagttcccctacaaggagcctgagcacagcgctggccagaggggcaacagagctggcaacagcagccccagcctcttctgtggcttctcctttgtgaccccaccagactacagctttgtgccccccagcagcacccccttctggagcgtgctgagccccaaggtgctgggcatcgccatcgcccgctatgacttctgtgcccgggacatgagggagctgagcctgctgaagggagatgtggtgaagatctacaccaagatgtctgccaacggctggtggagaggagaggtgaatggccgggtgggctggttccccagcacctacgtggaggaggatgaatag

SEQ ID NO: 175806 - DNA, 756 bp, synthetic construct
  misc_feature 1..756: note = Description of Artificial Sequence: Synthetic coding sequence
  source 1..756: mol_type = other DNA
atgcaggtgatccggaactacagcggcaccccacctccagccctgcacgagggcccccccctgcagctgcaggccggggacacagtggagctgctgaagggagatgcccacagcctcttctggcagggcaggaacctggccagcggggaggtgggcttcttccccagtgatgctgtgaagccctgcccctgtgtgcccaagcctgtggactacagctgccagccctggtacgccggggccatggagcggctgcaggccgagacagagctgatcaacagagtgaacagcacctacctggtgcgccacaggaccaaggagagcggggagtatgccatcagcatcaagtacaacaatgaggccaagcacatcaagatcctgaccagagatggcttcttccacatcgccgagaacaggaagttcaagagcctgatggagctggtggagtactacaagcaccacagcctgaaggagggcttccgcaccctggacaccaccctgcagttcccctacaaggagcctgagcacagcgctggccagaggggcaacagagctggcaacagcctgctgagccccaaggtgctgggcatcgccatcgcccgctatgacttctgtgcccgggacatgagggagctgagcctgctgaagggagatgtggtgaagatctacaccaagatgtctgccaacggctggtggagaggagaggtgaatggccgggtgggctggttccccagcacctacgtggaggaggatgaatag

SEQ ID NO: 175807 - DNA, 912 bp, synthetic construct
  misc_feature 1..912: note = Description of Artificial Sequence: Synthetic coding sequence
  source 1..912: mol_type = other DNA
atgagcagcgccaggtttgacagcagtgacagaagtgcctggtacatgggccctgtgtcccggcaggaggcccagacccggctgcagggccagagacatggcatgttcctggtgcgggacagcagcacctgccctggggactatgtgctgtctgtgtctgagaacagccgggtgagccactacatcatcaacagcctgcccaacagacgcttcaagattggagaccaggagtttgaccacctgcctgccctgctggagttctacaagatccactacctggacaccaccaccctgattgaaccagccccccgctaccccagcccccccatgggctctgtgtctgcccccaacctgcccacagctgaggacaacctggagtatgtgaggaccctgtatgacttccctggaaatgatgctgaggacctgcccttcaagaagggggagatcctggtgatcatcgagaagccagaggagcagtggtggagcgccaggaacaaggatggccgggtgggcatgatccctgtgccctacgtggagaagctggtgcgcagcagcccccacggcaagcacggcaacagaaacagcaacagctatggcatccctgagcccgcccacgcctatgcccagccccagaccaccacccccctgcctgctgtgtctggcagccctggagctgccatcacccccctgcccagcacccagaatggacctgtgtttgccaaggccatccagaagagggtgccctgtgcctatgacaagacagccctggccctggaggtgggggacatcgtgaaggtgaccaggatgaacatcaatggccagtgggagggggaggtgaatggaaggaagggcctcttccccttcacccacgtgaagatctttgacccccagaacccagatgaaaatgaatag

SEQ ID NO: 175808 - DNA, 912 bp, synthetic construct; identical to SEQ ID NO: 175807
  misc_feature 1..912: note = Description of Artificial Sequence: Synthetic coding sequence
  source 1..912: mol_type = other DNA

SEQ ID NO: 175809 - DNA, 3132 bp, synthetic construct
  misc_feature 1..3132: note = Description of Artificial Sequence: Synthetic coding sequence
  source 1..3132: mol_type = other DNA
atggagtttgtgcgggccctgtggctgggcctggccctggccctgggccctggcagcgctgggggccacccccagccctgtggggtgctggcccggctgggcggctctgtgcggctgggcgccctgctgccccgggcccccctggcccgggcccgggcccgggccgccctggcccgggccgccctggccccccggctgccccacaacctgagcctggagctggtggtggccgcccccccagcccgggaccctgccagcctgacccggggcctgtgccaggccctggtgcccccaggagtggccgccctgctggccttccctgaggcccggcctgagctgctgcagctgcacttcctggccgccgccacagagacccctgtgctgagcctgctgcggcgggaggcccgggcccccctgggcgcccccaaccccttccacctgcagctgcactgggccagccccctggagaccctgctggatgtgctggtggccgtgctgcaggcccacgcctgggaggatgtgggcctggccctgtgcaggacccaggaccccggcggcctggtggccctgtggaccagcagagctggccggcccccccagctggtgctggacctgagcagaagagacacaggagatgctggcctgcgggcccggctggcccccatggccgcccctgtgggcggggaggcccctgtgcctgctgctgtgctgctgggctgtgacatcgcccgggcccggcgggtgctggaggccgtgcccccaggcccccactggctgctgggcacccccctgccccccaaggccctgcccacagctggcctgcccccaggcctgctggccctgggggaggtggcccggccccccctggaggccgccatccatgacatcgtgcagctggtggcccgggccctgggcagcgctgcccaggtgcagcccaagagggccctgctgcctgcccctgtgaactgtggggacctgcagcctgctggccctgagagccctggccgcttcctggcccgcttcctggccaacaccagcttccagggccgcactggacctgtgtgggtgacaggcagcagccaggtgcacatgagccgccacttcaaggtgtggagcctgcggcgggaccccaggggggccccagcctgggccaccgtgggctcctggagagatggccagctggacctggagcccggcggggccagcgcccggcccccaccaccccagggcgcccaggtgtggcccaagctgcgggtggtgaccctgctggagcacccctttgtgtttgcccgggaccctgatgaagatggccagtgcccagctggccagctgtgcctggaccccggcaccaatgattctgccaccctggatgccctgtttgctgccctggccaatggaagtgccccccgggccctgaggaagtgctgctacggctactgcatcgacctgctggagcggctggccgaggacaccccatttgattttgagctgtacctggtgggagatggcaagtatggagccctgagagatggccgctggacaggcctggtgggggacctgctggccggccgggcccacatggctgtgaccagcttcagcatcaacagcgcccggagccaggtggtggacttcaccagccccttcttcagcaccagcctgggcatcatggtgcgggcccgggacacagccagccccatcggggccttcatgtggcccctgcactggagcacctggctgggcgtgtttgctgccctgcacctgacagccctcttcctgactgtgtatgagtggaggagcccctacggcctgaccccccggggcaggaacagaagcaccgtcttctcctacagcagcgccctgaacctgtgctacgccatcctcttcagaagaacagtgagcagcaagacccccaagtgccccaccggccgcctgctgatgaacctgtgggccatcttctgcctgctggtgctgagcagctacacagccaacctggccgctgtgatggtgggggacaagacctttgaggagctgagcggcatccatgaccccaagctgcaccacccagcccagggcttccgcttcggcaccgtgtgggagagcagcgctgaggcctacatcaagaagagcttcccagacatgcacgcccacatgaggaggcacagcgcccccaccaccccccggggcgtggccatgctgaccagtgacccccccaagctgaatgccttcatcatggacaagagcctgctggactatgaggtgtccattgatgctgactgcaagctgctgactgtgggcaagccctttgccatcgagggctatggaattggcctgccccagaacagccccctgaccagcaacctgtctgagttcatcagccgctacaagagcagcggcttcatcgacctgctgcatgacaagtggtacaagatggtgccctgtgggaagagggtgtttgctgtgacagagaccctgcagatgagcatctaccactttgctggcctgtttgtgctgctgtgcctgggcctgggcagcgccctgctgagcagcctgggggagcacgccttcttccggctggccctgccccgcatcaggaagggcagccggctgcagtactggctgcacaccagccagaagatccaccgggccctgaacacagagcccccagagggcagcaaggaggagacagctgaggccgagcccagcggccctgaggtggagcagcagcagcagcagcaggaccagcccacagcccctgagggctggaagagggccaggagagctgtggacaaggagcggcgggtgcgcttcctgctggagcctgctgtggtggtggcccctgaggctgatgctgaggccgaggccgccccccgggagggccctgtgtggctgtgcagctatggccggcccccagctgcccggcccactggagccccccagcccggggagctgcaggagctggagcggcgcatcgaggtggcccgggagcggctgcggcaggccctggtgagaagaggccagctgctggcccagctgggggacagcgcccggcaccggccccggcggctgctgcaggcccgggccgccccagctgaggccccaccccacagcggccggcccggcagccaggagtag

SEQ ID NO: 175810 - DNA, 2502 bp, synthetic construct
  misc_feature 1..2502: note = Description of Artificial Sequence: Synthetic coding sequence
  source 1..2502: mol_type = other DNA
atgcaccagctgttccggctggtgctgggccagaaggacctgagcagagctggggacctcttcagcctggatgacagcgagattgaggacagcctgacagaggccctggagcagatcaagatcatcagcagcagcagtgactaccagaccaacaacaatgaccaggccgtggtggagatctgcatcacccgcatcaccacagccatccgggagacagagagcattgagaagcacgccaaggccctggtgggcctgtgggacagctgcctggagcacaacctgcggccctttgggaaggatgaggacacccctcatgccaagatcgccagtgacatcatgagctgcatcctgcagaactacaacagacctcctgtgatggccctggccatccccatcgctgtgaagttcctgcaccggggcaacaaggagctgtgcaggaacatgagcaactacctgagcctggccgccatcaccaaggctgacctgctggccgaccacacagaggtgattgtgaagagcatcctgcagggcaacaccatgctgctgcgggtgctgcctgctgtgtatgagaagcagccccagcccatcaacagacacctgacagagctgctggccctgatgagccagctggagcagcctgagcagtaccacctgctgcggctgctgcacgtggccgccaagaagaagcagctggaggtggtgcagaagtgcatccccttcctgattggccacctgaaggacagcacccacaatgacatcatcctgaacatcctgattgaaattgctgtgtatgagcctgtggccctgaacagcttcctgcccatgctgaaggagattggagagcgcttcccctacctgaccggccagatggcccgcatctacggggctgtgggccacgtggatgaggagcgggcccggagctgcctgacctacctggtgtcccagctggccaacatggagcacagcttccaccacatcctgctgctggagatcaagagcatcacagacaccttcagcagcatcctgggcccccagagccgggacatcttcaggatgagcaacagcttcaccgccatcgccaagctgctgacccggcagctggagaacaccaaggccggcagcggccgcaggaagatcagcacagaaattgagttccctgagaagctggaggagaccaagctgattgtgacagaaaatgaagaccacgagaagctgcaggtgaagatccaggcctttgaggacaagatcaatgccggcagcaacaccccaggcagcatccgccgctacagcctgggccaggtgtccaaggaggagaggaagaacatccgcttcaacagaagcaagagcctggccttccacaccatgctgaccaagggcgtgggcagtgatgatggagaagatgagaacagaggagacatcccagccagcatcagcctgtctgaaattgaccccctgggccagggcaatgacaagctgcccttcaagacagacacagagaggagccagctgggggagagctctgtgtcctaccccaacatcatccacatcgacagcgagaacctgtctgagaccgtgaaggagaacagccaggaggagaccccagagaccacagccagccccatcgagtaccaggacaagctgtacctgcacctgaagaagaacctgagcaaggtgaaggcctatgccatggagatcggcaagaagatccctgtgcctgaccagtgcaccatcgaggacacagtgcgcagctgtgtggccaagctgttcttcacctgcagcctgaagggccactactgcctgtacagcaagagcagcttcatcctgatcagccaggagccccagccctggatccagatcatgttcctgttccagcagagcctcttccctgagcccctgagcatccagagccacagcgtgcagttcctgcgggccctgtgggagaagacccaggccggcggggcccacagctttgaaacagccatgatggagagcaccttcccccagcagaaggacctggaccaggtgcagctgcacctggaggaggtgcgcttctttgatgtgtttggcttcagcgagacagctggggcctggcagtgcttcatgtgcaacaaccctgagaaggccaccgtggtgaaccaggacggccagcccctgattgagggcaagctgaaggagaagcaggtgcgctggaagttcatcaagcgctggaagacccgctacttcaccctggccggcaaccagctgctcttccagaagggcaagagcaaggatgatcctgatgactgccccatcgagctgagcaaggtgcagagcgtgaaggctgtggccaagaagagaagagacaggagcctgccccgggcctttgagatcttcacagacaacaagacctacgtgttcaaggccaaggatgagaagaatgctgaggagtggctgcagtgcatcaacgtggccgtggcccaggccaaggagcgggagagccgggaggtgaccacctacctgtag

SEQ ID NO: 175811 - DNA, 2502 bp, synthetic construct; identical to SEQ ID NO: 175810
  misc_feature 1..2502: note = Description of Artificial Sequence: Synthetic coding sequence
  source 1..2502: mol_type = other DNA

SEQ ID NO: 175812 - DNA, 2367 bp, synthetic construct
  misc_feature 1..2367: note = Description of Artificial Sequence: Synthetic coding sequence
  source 1..2367: mol_type = other DNA
atgcaccagctgttccggctggtgctgggccagaaggacctgagcagagctggggacctcttcagcctggatgacagcgagattgaggacagcctgacagaggccctggagcagatcaagatcatcagcagcagcagtgactaccagaccaacaacaatgaccaggccgtggtggagatctgcatcacccgcatcaccacagccatccgggagacagagagcattgagaagcacgccaaggccctggtgggcctgtgggacagctgcctggagcacaacctgcggccctttgggaaggatgaggacacccctcatgccaagatcgccagtgacatcatgagctgcatcctgcagaactacaacagacctcctgtgatggccctggccatccccatcgctgtgaagttcctgcaccggggcaacaaggagctgtgcaggaacatgagcaactacctgagcctggccgccatcaccaaggctgacctgctggccgaccacacagaggtgattgtgaagagcatcctgcagggcaacaccatgctgctgcgggtgctgcctgctgtgtatgagaagcagccccagcccatcaacagacacctgacagagctgctggccctgatgagccagctggagcagcctgagcagtaccacctgctgcggctgctgcacgtggccgccaagaagaagcagctggaggtggtgcagaagtgcatccccttcctgattggccacctgaaggacagcacccacaatgacatcatcctgaacatcctgattgaaattgctgtgtatgagcctgtggccctgaacagcttcctgcccatgctgaaggagattggagagcgcttcccctacctgaccggccagatggcccgcatctacggggctgtgggccacgtggatgaggagcgggcccggagctgcctgacctacctggtgtcccagctggccaacatggagcacagcttccaccacatcctgctgctggagatcaagagcatcacagacaccttcagcagcatcctgggcccccagagccgggacatcttcaggatgagcaacagcttcaccgccatcgccaagctgctgacccggcagctggagaacaccaaggccggcagcggccgcaggaagatcagcacagaaattgagttccctgagaagctggaggagaccaagctgattgtgacagaaaatgaagaccacgagaagctgcaggtgaagatccaggcctttgaggacaagatcaatgccggcagcaacaccccaggcagcatccgccgctacagcctgggccaggtgtccaaggaggagaggaagaacatccgcttcaacagaagcaagagcctggccttccacaccatgctgaccaagggcgtgggcagtgatgatggagaagatgagaacagaggagacatcccagccagcatcagcctgtctgaaattgaccccctgggccagggcaatgacaagctgcccttcaagacagacacagagaggagccagctgggggagagctctgtgtcctaccccaacatcatccacatcgacagcgagaacctgtctgagaccgtgaaggagaacagccaggaggagaccccagagaccacagccagccccatcgagtaccaggacaagctgtacctgcacctgaagaagaacctgagcaaggtgaaggcctatgccatggagatcggcaagaagatccctgtgcctgaccagtgcaccatcgaggacacagtgcgcagctgtgtggccaagctgttcttcacctgcagcctgaagggccactactgcctgtacagcaagagcagcttcatcctgatcagccaggagccccagccctggatccagatcatgttcctgttccagcaggacctggaccaggtgcagctgcacctggaggaggtgcgcttctttgatgtgtttggcttcagcgagacagctggggcctggcagtgcttcatgtgcaacaaccctgagaaggccaccgtggtgaaccaggacggccagcccctcatcgagggcaagctgaaggagaagcaggtgcgctggaagttcatcaagcgctggaagacccgctacttcaccctggccggcaaccagctgctcttccagaagggcaagagcaaggatgatcctgatgactgccccatcgagctgagcaaggtgcagagcgtgaaggctgtggccaagaagaggcgggacaggagcctgccccgggcctttgagatcttcacagacaacaagacctacgtgttcaaggccaaggatgagaagaatgctgaggagtggctgcagtgcatcaacgtggccgtggcccaggccaaggagcgggagagccgggaggtgaccacctacctgtag

SEQ ID NO: 175813 - DNA, 192 bp, synthetic construct
  misc_feature 1..192: note = Description of Artificial Sequence: Synthetic coding sequence
  source 1..192: mol_type = other DNA
atgcaccagctgttccggctggtgctgggccagaaggacctgagcagagctggggacctcttcagcctggatgacagcgagattgaggacagcctgacagaggccctggagcagatcaagatcatcagcagcagcagtgactaccagaccaacaacaatgaccaggccgtggtggagatctgcatcacctag

SEQ ID NO: 175814 - DNA, 642 bp, synthetic construct
  misc_feature 1..642: note = Description of Artificial Sequence: Synthetic coding sequence
  source 1..642: mol_type = other DNA
atgcaccagctgttccggctggtgctgggccagaaggacctgagcagagctggggacctcttcagcctggatgacagcgagattgaggacagcctgacagaggccctggagcagatcaagatcatcagcagcagcagtgactaccagaccaacaacaatgaccaggccgtggtggagatctgcatcacccgcatcaccacagccatccgggagacagagagcattgagaagcacgccaaggccctggtgggcctgtgggacagctgcctggagcacaacctgcggccctttgggaaggatgaggacacccctcatgccaagatcgccagtgacatcatgagctgcatcctgcagaactacaacagacctcctgtgatggccctggccatccccatcgctgtgaagttcctgcaccggggcaacaaggagctgtgcaggaacatgagcaactacctgagcctggccgccatcaccaaggctgacctgctggccgaccacacagaggtgattgtgaagagcatcctgcagggcatggtgaggaagctgagcctgggcacctgcttcggccgctacctgaaggtgttcagcagcagcatctacggcctgtgggaggcccggccccgggtgctggaggccaactag

SEQ ID NO: 175815 - DNA, 498 bp, synthetic construct
  misc_feature 1..498: note = Description of Artificial Sequence: Synthetic coding sequence
  source 1..498: mol_type = other DNA
atgcaccagctgttccggctggtgctgggccagaaggacctgagcagagctggggacctcttcagcctggatgacagcgagattgaggacagcctgacagaggccctggagcagatcaagatcatcagcagcagcagtgactaccagaccaacaacaatgaccaggccgtggtggagatctgcatcacccgcatcaccacagccatccgggagacagagagcattgagaagcacgccaaggccctggtgggcctgtgggacagctgcctggagcacaacctgcggccctttgggaaggatgaggacacccctcatgccaagatcgccagtgacatcatgagctgcatcctgcagaactacaacagacctcctgtgatggccctggccatccccatcgctgtgaagttcctgcaccggggcaacaaggagctgtgcaggaacatgagcaactacctgagcctggccgccatcaccaaggctgacctgctggccgactag

SEQ ID NO: 175816 - DNA, 168 bp, synthetic construct
  misc_feature 1..168: note = Description of Artificial Sequence: Synthetic coding sequence
  source 1..168: mol_type = other DNA
atgcaccagctgttccggctggtgctgggccagaaggacctgagcagagctggggacctcttcagcctggatgacagcgagattgaggacagcctgacagaggccctggagcagatcaagatcatcagcagcagcagtgactaccagaccaacaacaatgaccagtag

SEQ ID NO: 175817 - DNA, 642 bp, synthetic construct; identical to SEQ ID NO: 175814
  misc_feature 1..642: note = Description of Artificial Sequence: Synthetic coding sequence
  source 1..642: mol_type = other DNA

SEQ ID NO: 175818 - DNA, 534 bp, synthetic construct
  misc_feature 1..534: note = Description of Artificial Sequence: Synthetic coding sequence
  source 1..534: mol_type = other DNA
atgcaccagctgttccggctggtgctgggccagaaggacctgagcagagctggggacctcttcagcctggatgacagcgagattgaggacagcctgacagaggccctggagcagatcaagatcatcagcagcagcagtgactaccagaccaacaacaatgaccaggccgtggtggagatctgcatcacccgcatcaccacagccatccgggagacagagagcattgagaagcacgccaaggccctggtgggcctgtgggacagctgcctggagcacaacctgcggccctttgggaaggatgaggacacccctcatgccaagatcgccagtgacatcatgagctgcatcctgcagaactacaacagacctcctgtgatggccctggccatccccatcgctgtgaagttcctgcaccggggcaacaaggagctgtgcaggaacatgagcaactacctgagcctggccgccatcaccaaggctgacctgctggccgaccacacagaggtgattgtgaagagcatcctgcaggtgtag

SEQ ID NO: 175819 - DNA, 2367 bp, synthetic construct; identical to SEQ ID NO: 175812
  misc_feature 1..2367: note = Description of Artificial Sequence: Synthetic coding sequence
  source 1..2367: mol_type = other DNA

SEQ ID NO: 175820 - DNA, 3768 bp, synthetic construct
  misc_feature 1..3768: note = Description of Artificial Sequence: Synthetic coding sequence
  source 1..3768: mol_type = other DNA
atggagctggccgccctgtgccgctggggcctgctgctggccctgctgcccccaggggccgccagcacccaggtgtgcacaggaacagacatgaagctgcggctgcctgccagccctgagacccacctggacatgctgcggcacctgtaccagggctgccaggtggtgcagggcaacctggagctgacctacctgcccaccaatgccagcctgtccttcctgcaggacatccaggaggtgcagggctacgtgctgattgcccacaaccaggtgcggcaggtgcccctgcagaggctgagaattgtgcggggcacccagctgtttgaggacaactatgccctggccgtgctggacaatggagaccccctgaacaacaccacccctgtgactggagccagccctgggggcctgcgggagctgcagctgcggagcctgacagagatcctgaagggcggcgtgctgatccagaggaacccccagctgtgctaccaggacaccatcctgtggaaggacatcttccacaagaacaaccagctggccctgaccctgattgacaccaacagaagccgggcctgccacccctgcagccccatgtgcaagggcagccgctgctggggcgagagcagcgaggactgccagagcctgaccaggacagtgtgtgccggcggctgtgcccgctgcaagggccccctgcccacagactgctgccacgagcagtgtgccgccggctgcaccggccccaagcacagcgactgcctggcctgcctgcacttcaaccacagcggcatctgtgagctgcactgcccagccctggtgacctacaacacagacacctttgagagcatgcccaaccctgagggccgctacacctttggagccagctgtgtgacagcctgcccctacaactacctgagcacagatgtgggcagctgcaccctggtgtgccccctgcacaaccaggaggtgacagcagaagatggcacccagagatgtgagaagtgcagcaagccctgtgcccgggtgtgctacggcctgggcatggagcacctgcgggaggtgcgggctgtgaccagcgccaacatccaggagtttgctggctgcaagaagatcttcggcagcctggccttcctgcctgagagctttgatggagaccctgccagcaacacagcccccctgcagcctgagcagctgcaggtgtttgagaccctggaggagatcaccggctacctgtacatcagcgcctggccagacagcctgcctgacctgtctgtgttccagaacctgcaggtgatccggggccgcatcctgcacaacggggcctacagcctgaccctgcagggcctgggcatctcctggctgggcctgcggagcctgcgggagctgggcagcggcctggccctgatccaccacaacacccacctgtgctttgtgcacacagtgccctgggaccagctgttcaggaacccccaccaggccctgctgcacacagccaacagaccagaagatgaatgtgtgggggagggcctggcctgccaccagctgtgtgcccggggccactgctggggccctggccccacccagtgtgtgaactgcagccagttcctgcggggccaggagtgtgtggaggagtgccgggtgctgcagggcctgccccgggagtatgtgaatgcccggcactgcctgccctgccaccctgagtgccagccccagaatggatctgtgacctgctttggacctgaggccgaccagtgtgtggcctgtgcccactacaaggacccccccttctgtgtggcccgctgccccagcggcgtgaagccagacctgagctacatgcccatctggaagttcccagatgaggagggcgcctgccagccctgccccatcaactgcacccacagctgtgtggacctggatgacaagggctgcccagctgagcagagggccagccccctgaccagcatcatctctgctgtggtgggcatcctgctggtggtggtgctgggcgtggtgtttggcatcctgatcaagaggcggcagcagaagatcaggaagtacaccatgaggcggctgctgcaggagacagagctggtggagcccctgaccccatctggggccatgcccaaccaggcccagatgaggatcctgaaggagacagagctgaggaaggtgaaggtgctgggcagcggggcctttggaacagtgtacaagggcatctggatcccagatggagaaaatgtgaagatccctgtggccatcaaggtgctgcgggagaacaccagccccaaggccaacaaggagatcctggatgaggcctacgtgatggccggcgtgggcagcccctacgtgtcccggctgctgggcatctgcctgaccagcacagtgcagctggtgacccagctgatgccctacggctgcctgctggaccacgtgcgggagaacagaggccgcctgggcagccaggacctgctgaactggtgcatgcagatcgccaagggcatgagctacctggaggatgtgcggctggtgcaccgggacctggccgccagaaatgtgctggtgaagagccccaaccacgtgaagatcacagactttggcctggcccggctgctggacattgatgaaacagagtaccacgcagatggcggcaaggtgcccatcaagtggatggccctggagagcatcctgcggcggcgcttcacccaccagagtgatgtgtggagctatggagtgacagtgtgggagctgatgaccttcggggccaagccctatgatggcatcccagcccgggagatcccagacctgctggagaagggggagcggctgccccagccccccatctgcaccattgatgtgtacatgatcatggtgaagtgctggatgattgattctgagtgccggccccgcttccgggagctggtgtctgagttcagcaggatggcccgggacccccagagatttgtggtgatccagaatgaagacctgggccctgccagccccctggacagcaccttctaccgcagcctgctggaggatgatgacatgggagacctggtggatgctgaggagtacctggtgccccagcagggcttcttctgcccagaccctgcccctggagctgggggcatggtgcaccaccgccacaggagcagcagcaccaggtctgggggcggggacctgaccctgggcctggagcccagcgaggaggaggcccccaggagccccctggcccccagcgagggcgccggcagtgatgtgtttgatggagacctgggcatgggcgccgccaagggcctgcagagcctgcccacccatgaccccagccccctgcagcgctacagcgaggaccccaccgtgcccctgcccagcgagacagatggctacgtggcccccctgacctgcagcccccagccagaatatgtgaaccagccagatgtgcggccccagccccccagcccccgggagggccccctgcctgctgcccggcctgctggggccaccctggagcggcccaagaccctgagccctgggaagaatggagtggtgaaggatgtgtttgcctttggaggagctgtggagaaccctgagtacctgaccccccagggcggggccgccccccagccccaccccccaccagccttctccccagcctttgacaacctgtactactgggaccaggaccccccagagcggggggccccacccagcaccttcaagggcacccccacagctgagaaccctgagtacctgggcctggatgtgcctgtgtag

SEQ ID NO: 175821 - DNA, 3678 bp, synthetic construct
  misc_feature 1..3678: note = Description of Artificial Sequence: Synthetic coding sequence
  source 1..3678: mol_type = other DNA
atgaagctgcggctgcctgccagccctgagacccacctggacatgctgcggcacctgtaccagggctgccaggtggtgcagggcaacctggagctgacctacctgcccaccaatgccagcctgtccttcctgcaggacatccaggaggtgcagggctacgtgctgattgcccacaaccaggtgcggcaggtgcccctgcagaggctgagaattgtgcggggcacccagctgtttgaggacaactatgccctggccgtgctggacaatggagaccccctgaacaacaccacccctgtgactggagccagccctgggggcctgcgggagctgcagctgcggagcctgacagagatcctgaagggcggcgtgctgatccagaggaacccccagctgtgctaccaggacaccatcctgtggaaggacatcttccacaagaacaaccagctggccctgaccctgattgacaccaacagaagccgggcctgccacccctgcagccccatgtgcaagggcagccgctgctggggcgagagcagcgaggactgccagagcctgaccaggacagtgtgtgccggcggctgtgcccgctgcaagggccccctgcccacagactgctgccacgagcagtgtgccgccggctgcaccggccccaagcacagcgactgcctggcctgcctgcacttcaaccacagcggcatctgtgagctgcactgcccagccctggtgacctacaacacagacacctttgagagcatgcccaaccctgagggccgctacacctttggagccagctgtgtgacagcctgcccctacaactacctgagcacagatgtgggcagctgcaccctggtgtgccccctgcacaaccaggaggtgacagcagaagatggcacccagagatgtgagaagtgcagcaagccctgtgcccgggtgtgctacggcctgggcatggagcacctgcgggaggtgcgggctgtgaccagcgccaacatccaggagtttgctggctgcaagaagatcttcggcagcctggccttcctgcctgagagctttgatggagaccctgccagcaacacagcccccctgcagcctgagcagctgcaggtgtttgagaccctggaggagatcaccggctacctgtacatcagcgcctggccagacagcctgcctgacctgtctgtgttccagaacctgcaggtgatccggggccgcatcctgcacaacggggcctacagcctgaccctgcagggcctgggcatctcctggctgggcctgcggagcctgcgggagctgggcagcggcctggccctgatccaccacaacacccacctgtgctttgtgcacacagtgccctgggaccagctgttcaggaacccccaccaggccctgctgcacacagccaacagaccagaagatgaatgtgtgggggagggcctggcctgccaccagctgtgtgcccggggccactgctggggccctggccccacccagtgtgtgaactgcagccagttcctgcggggccaggagtgtgtggaggagtgccgggtgctgcagggcctgccccgggagtatgtgaatgcccggcactgcctgccctgccaccctgagtgccagccccagaatggatctgtgacctgctttggacctgaggccgaccagtgtgtggcctgtgcccactacaaggacccccccttctgtgtggcccgctgccccagcggcgtgaagccagacctgagctacatgcccatctggaagttcccagatgaggagggcgcctgccagccctgccccatcaactgcacccacagctgtgtggacctggatgacaagggctgcccagctgagcagagggccagccccctgaccagcatcatctctgctgtggtgggcatcctgctggtggtggtgctgggcgtggtgtttggcatcctgatcaagaggcggcagcagaagatcaggaagtacaccatgaggcggctgctgcaggagacagagctggtggagcccctgaccccatctggggccatgcccaaccaggcccagatgaggatcctgaaggagacagagctgaggaaggtgaaggtgctgggcagcggggcctttggaacagtgtacaagggcatctggatcccagatggagaaaatgtgaagatccctgtggccatcaaggtgctgcgggagaacaccagccccaaggccaacaaggagatcctggatgaggcctacgtgatggccggcgtgggcagcccctacgtgtcccggctgctgggcatctgcctgaccagcacagtgcagctggtgacccagctgatgccctacggctgcctgctggaccacgtgcgggagaacagaggccgcctgggcagccaggacctgctgaactggtgcatgcagatcgccaagggcatgagctacctggaggatgtgcggctggtgcaccgggacctggccgccagaaatgtgctggtgaagagccccaaccacgtgaagatcacagactttggcctggcccggctgctggacattgatgaaacagagtaccacgcagatggcggcaaggtgcccatcaagtggatggccctggagagcatcctgcggcggcgcttcacccaccagagtgatgtgtggagctatggagtgacagtgtgggagctgatgaccttcggggccaagccctatgatggcatcccagcccgggagatcccagacctgctggagaagggggagcggctgccccagccccccatctgcaccattgatgtgtacatgatcatggtgaagtgctggatgattgattctgagtgccggccccgcttccgggagctggtgtctgagttcagcaggatggcccgggacccccagagatttgtggtgatccagaatgaagacctgggccctgccagccccctggacagcaccttctaccgcagcctgctggaggatgatgacatgggagacctggtggatgctgaggagtacctggtgccccagcagggcttcttctgcccagaccctgcccctggagctgggggcatggtgcaccaccgccacaggagcagcagcaccaggtctgggggcggggacctgaccctgggcctggagcccagcgaggaggaggcccccaggagccccctggcccccagcgagggcgccggcagtgatgtgtttgatggagacctgggcatgggcgccgccaagggcctgcagagcctgcccacccatgaccccagccccctgcagcgctacagcgaggaccccaccgtgcccctgcccagcgagacagatggctacgtggcccccctgacctgcagcccccagccagaatatgtgaaccagccagatgtgcggccccagccccccagcccccgggagggccccctgcctgctgcccggcctgctggggccaccctggagcggcccaagaccctgagccctgggaagaatggagtggtgaaggatgtgtttgcctttggaggagctgtggagaaccctgagtacctgaccccccagggcggggccgccccccagccccaccccccaccagccttctccccagcctttgacaacctgtactactgggaccaggaccccccagagcggggggccccacccagcaccttcaagggcacccccacagctgagaaccctgagtacctgggcctggatgtgcctgtgtag

SEQ ID NO: 175822 - DNA, 2940 bp, synthetic construct
  misc_feature 1..2940: note = Description of Artificial Sequence: Synthetic coding sequence
  source 1..2940: mol_type = other DNA
atggagctggccgccctgtgccgctggggcctgctgctggccctgctgcccccaggggccgccagcacccaggacaactacctgagcacagatgtgggcagctgcaccctggtgtgccccctgcacaaccaggaggtgacagcagaagatggcacccagagatgtgagaagtgcagcaagccctgtgcccgggtgtgctacggcctgggcatggagcacctgcgggaggtgcgggctgtgaccagcgccaacatccaggagtttgctggctgcaagaagatcttcggcagcctggccttcctgcctgagagctttgatggagaccctgccagcaacacagcccccctgcagcctgagcagctgcaggtgtttgagaccctggaggagatcaccggctacctgtacatcagcgcctggccagacagcctgcctgacctgtctgtgttccagaacctgcaggtgatccggggccgcatcctgcacaacggggcctacagcctgaccctgcagggcctgggcatctcctggctgggcctgcggagcctgcgggagctgggcagcggcctggccctgatccaccacaacacccacctgtgctttgtgcacacagtgccctgggaccagctgttcaggaacccccaccaggccctgctgcacacagccaacagaccagaagatgaatgtgtgggggagggcctggcctgccaccagctgtgtgcccggggccactgctggggccctggccccacccagtgtgtgaactgcagccagttcctgcggggccaggagtgtgtggaggagtgccgggtgctgcagggcctgccccgggagtatgtgaatgcccggcactgcctgccctgccaccctgagtgccagccccagaatggatctgtgacctgctttggacctgaggccgaccagtgtgtggcctgtgcccactacaaggacccccccttctgtgtggcccgctgccccagcggcgtgaagccagacctgagctacatgcccatctggaagttcccagatgaggagggcgcctgccagccctgccccatcaactgcacccacagctgtgtggacctggatgacaagggctgcccagctgagcagagggccagccccctgaccagcatcatctctgctgtggtgggcatcctgctggtggtggtgctgggcgtggtgtttggcatcctgatcaagaggcggcagcagaagatcaggaagtacaccatgaggcggctgctgcaggagacagagctggtggagcccctgaccccatctggggccatgcccaaccaggcccagatgaggatcctgaaggagacagagctgaggaaggtgaaggtgctgggcagcggggcctttggaacagtgtacaagggcatctggatcccagatggagaaaatgtgaagatccctgtggccatcaaggtgctgcgggagaacaccagccccaaggccaacaaggagatcctggatgaggcctacgtgatggccggcgtgggcagcccctacgtgtcccggctgctgggcatctgcctgaccagcacagtgcagctggtgacccagctgatgccctacggctgcctgctggaccacgtgcgggagaacagaggccgcctgggcagccaggacctgctgaactggtgcatgcagatcgccaagggcatgagctacctggaggatgtgcggctggtgcaccgggacctggccgccagaaatgtgctggtgaagagccccaaccacgtgaagatcacagactttggcctggcccggctgctggacattgatgaaacagagtaccacgcagatggcggcaaggtgcccatcaagtggatggccctggagagcatcctgcggcggcgcttcacccaccagagtgatgtgtggagctatggagtgacagtgtgggagctgatgaccttcggggccaagccctatgatggcatcccagcccgggagatcccagacctgctggagaagggggagcggctgccccagccccccatctgcaccattgatgtgtacatgatcatggtgaagtgctggatgattgattctgagtgccggccccgcttccgggagctggtgtctgagttcagcaggatggcccgggacccccagagatttgtggtgatccagaatgaagacctgggccctgccagccccctggacagcaccttctaccgcagcctgctggaggatgatgacatgggagacctggtggatgctgaggagtacctggtgccccagcagggcttcttctgcccagaccctgcccctggagctgggggcatggtgcaccaccgccacaggagcagcagcaccaggtctgggggcggggacctgaccctgggcctggagcccagcgaggaggaggcccccaggagccccctggcccccagcgagggcgccggcagtgatgtgtttgatggagacctgggcatgggcgccgccaagggcctgcagagcctgcccacccatgaccccagccccctgcagcgctacagcgaggaccccaccgtgcccctgcccagcgagacagatggctacgtggcccccctgacctgcagcccccagccagaatatgtgaaccagccagatgtgcggccccagccccccagcccccgggagggccccctgcctgctgcccggcctgctggggccaccctggagcggcccaagaccctgagccctgggaagaatggagtggtgaaggatgtgtttgcctttggaggagctgtggagaaccctgagtacctgaccccccagggcggggccgccccccagccccaccccccaccagccttctccccagcctttgacaacctgtactactgggaccaggaccccccagagcggggggccccacccagcaccttcaagggcacccccacagctgagaaccctgagtacctgggcctggatgtgcctgtgtag

SEQ ID NO: 175823 - DNA, 1812 bp, synthetic construct
  misc_feature 1..1812: note = Description of Artificial Sequence: Synthetic coding sequence
  source 1..1812: mol_type = other DNA
atgaagctgcggctgcctgccagccctgagacccacctggacatgctgcggcacctgtaccagggctgccaggtggtgcagggcaacctggagctgacctacctgcccaccaatgccagcctgtccttcctgcaggacatccaggaggtgcagggctacgtgctgattgcccacaaccaggtgcggcaggtgcccctgcagaggctgagaattgtgcggggcacccagctgtttgaggacaactatgccctggccgtgctggacaatggagaccccctgaacaacaccacccctgtgactggagccagccctgggggcctgcgggagctgcagctgcggagcctgacagagatcctgaagggcggcgtgctgatccagaggaacccccagctgtgctaccaggacaccatcctgtggaaggacatcttccacaagaacaaccagctggccctgaccctgattgacaccaacagaagccgggcctgccacccctgcagccccatgtgcaagggcagccgctgctggggcgagagcagcgaggactgccagagcctgaccaggacagtgtgtgccggcggctgtgcccgctgcaagggccccctgcccacagactgctgccacgagcagtgtgccgccggctgcaccggccccaagcacagcgactgcctggcctgcctgcacttcaaccacagcggcatctgtgagctgcactgcccagccctggtgacctacaacacagacacctttgagagcatgcccaaccctgagggccgctacacctttggagccagctgtgtgacagcctgcccctacaactacctgagcacagatgtgggcagctgcaccctggtgtgccccctgcacaaccaggaggtgacagcagaagatggcacccagagatgtgagaagtgcagcaagccctgtgcccgggtgtgctacggcctgggcatggagcacctgcgggaggtgcgggctgtgaccagcgccaacatccaggagtttgctggctgcaagaagatcttcggcagcctggccttcctgcctgagagctttgatggagaccctgccagcaacacagcccccctgcagcctgagcagctgcaggtgtttgagaccctggaggagatcaccggctacctgtacatcagcgcctggccagacagcctgcctgacctgtctgtgttccagaacctgcaggtgatccggggccgcatcctgcacaacggggcctacagcctgaccctgcagggcctgggcatctcctggctgggcctgcggagcctgcgggagctgggcagcggcctggccctgatccaccacaacacccacctgtgctttgtgcacacagtgccctgggaccagctgttcaggaacccccaccaggccctgctgcacacagccaacagaccagaagatgaatgtgtgggggagggcctggcctgccaccagctgtgtgcccggggccactgctggggccctggccccacccagtgtgtgaactgcagccagttcctgcggggccaggagtgtgtggaggagtgccgggtgctgcagggcctgccccgggagtatgtgaatgcccggcactgcctgccctgccaccctgagtgccagccccagaatggatctgtgacctgctttggacctgaggccgaccagtgtgtggcctgtgcccactacaaggacccccccttctgtgtggcccgctgccccagcggcgtgaagccagacctgagctacatgcccatctggaagttcccagatgaggagggcgcctgccagccctgccccatcaactgcacccacagctag

SEQ ID NO: 175824 - DNA, 3678 bp, synthetic construct; identical to SEQ ID NO: 175821
  misc_feature 1..3678: note = Description of Artificial Sequence: Synthetic coding sequence
  source 1..3678: mol_type = other DNA

SEQ ID NO: 175825 - DNA, 3723 bp, synthetic construct
  misc_feature 1..3723: note = Description of Artificial Sequence: Synthetic coding sequence
  source 1..3723: mol_type = other DNA
atgccccggggctcctggaagccccaggtgtgcaccggcacagacatgaagctgcggctgcctgccagccctgagacccacctggacatgctgcggcacctgtaccagggctgccaggtggtgcagggcaacctggagctgacctacctgcccaccaatgccagcctgtccttcctgcaggacatccaggaggtgcagggctacgtgctgattgcccacaaccaggtgcggcaggtgcccctgcagaggctgcgcatcgtgcggggcacccagctgtttgaggacaactatgccctggccgtgctggacaacggggaccccctgaacaacaccacccctgtgactggagccagccctgggggcctgcgggagctgcagctgcggagcctgacagagatcctgaagggcggcgtgctgatccagaggaacccccagctgtgctaccaggacaccatcctgtggaaggacatcttccacaagaacaaccagctggccctgaccctgattgacaccaacagaagccgggcctgccacccctgcagccccatgtgcaagggcagccgctgctggggcgagagcagcgaggactgccagagcctgaccaggacagtgtgtgccggcggctgtgcccgctgcaagggccccctgcccacagactgctgccacgagcagtgtgccgccggctgcaccggccccaagcacagcgactgcctggcctgcctgcacttcaaccacagcggcatctgtgagctgcactgcccagccctggtgacctacaacacagacacctttgagagcatgcccaaccctgagggccgctacaccttcggggccagctgtgtgacagcctgcccctacaactacctgagcacagatgtgggcagctgcaccctggtgtgccccctgcacaaccaggaggtgacagcagaagatggcacccagagatgtgagaagtgcagcaagccctgtgcccgggtgtgctacggcctgggcatggagcacctgcgggaggtgcgggctgtgaccagcgccaacatccaggagtttgctggctgcaagaagatcttcggcagcctggccttcctgcctgagagctttgatggagaccctgccagcaacacagcccccctgcagcctgagcagctgcaggtgtttgagaccctggaggagatcaccggctacctgtacatcagcgcctggccagacagcctgcctgacctgagcgtcttccagaacctgcaggtgatccggggccgcatcctgcacaatggagcctacagcctgaccctgcagggcctgggcatctcctggctgggcctgcggagcctgcgggagctgggcagcggcctggccctgatccaccacaacacccacctgtgctttgtgcacacagtgccctgggaccagctgttcaggaacccccaccaggccctgctgcacacagccaacagaccagaagatgaatgtgtgggggagggcctggcctgccaccagctgtgtgcccggggccactgctggggccctggccccacccagtgtgtgaactgcagccagttcctgcggggccaggagtgtgtggaggagtgccgggtgctgcagggcctgccccgggagtatgtgaatgcccggcactgcctgccctgccaccctgagtgccagccccagaatggatctgtgacctgcttcggccctgaggccgaccagtgtgtggcctgtgcccactacaaggacccccccttctgtgtggcccgctgccccagcggcgtgaagccagacctgagctacatgcccatctggaagttcccagatgaggagggcgcctgccagccctgccccatcaactgcacccacagctgtgtggacctggatgacaagggctgcccagctgagcagagggccagccccctgaccagcatcatctctgctgtggtgggcatcctgctggtggtggtgctgggcgtggtgtttggcatcctgatcaagaggcggcagcagaagatcaggaagtacaccatgaggcggctgctgcaggagacagagctggtggagcccctgacccccagcggggccatgcccaaccaggcccagatgaggatcctgaaggagacagagctgaggaaggtgaaggtgctgggcagcggggccttcggcaccgtgtacaagggcatctggatcccagatggagaaaatgtgaagatccctgtggccatcaaggtgctgcgggagaacaccagccccaaggccaacaaggagatcctggatgaggcctacgtgatggccggcgtgggcagcccctacgtgtcccggctgctgggcatctgcctgaccagcacagtgcagctggtgacccagctgatgccctacggctgcctgctggaccacgtgagagaaaatagaggccgcctgggcagccaggacctgctgaactggtgcatgcagatcgccaagggcatgagctacctggaggatgtgcggctggtgcaccgggacctggccgccagaaatgtgctggtgaagagccccaaccacgtgaagatcacagactttggcctggcccggctgctggacattgatgaaacagagtaccacgcagatggcggcaaggtgcccatcaagtggatggccctggagagcatcctgcggcggcgcttcacccaccagagtgatgtgtggagctatggagtgacagtgtgggagctgatgacctttggagccaagccctatgatggcatcccagcccgggagatcccagacctgctggagaagggggagcggctgccccagccccccatctgcaccattgatgtgtacatgatcatggtgaagtgctggatgattgacagtgaatgtcggccccgcttccgggagctggtgtctgagttcagcaggatggcccgggacccccagagatttgtggtgatccagaatgaagacctgggccctgccagccccctggacagcaccttctaccgcagcctgctggaggatgatgacatgggagacctggtggatgctgaggagtacctggtgccccagcagggcttcttctgcccagaccctgcccctggggccggcggcatggtgcaccaccgccacaggagcagcagcaccaggtctgggggcggggacctgaccctgggcctggagcccagcgaggaggaggcccccaggagccccctggcccccagcgagggcgccggcagtgatgtgtttgatggagacctgggcatgggcgccgccaagggcctgcagagcctgcccacccatgaccccagccccctgcagcgctacagcgaggaccccaccgtgcccctgcccagcgagacagatggctacgtggcccccctgacctgcagcccccagccagaatatgtgaaccagccagatgtgcggccccagccccccagcccccgggagggccccctgcctgctgcccggcctgctggggccaccctggagcggcccaagaccctgagccctgggaagaatggagtggtgaaggatgtgtttgccttcggcggcgctgtggagaaccctgagtacctgaccccccagggcggggccgccccccagccccaccccccaccagccttcagccctgcctttgacaacctgtactactgggaccaggaccccccagagcggggggccccacccagcaccttcaagggcacccccacagcagaaaatcctgagtacctgggcctggatgtgcctgtgtag

SEQ ID NO: 175826 - DNA, 2259 bp, synthetic construct
  misc_feature 1..2259: note = Description of Artificial Sequence: Synthetic coding sequence
  source 1..2259: mol_type = other DNA
atgggcaccagcgccctgtgggccctgtggctgctgctggccctgtgctgggccccccgggagagcggggccactggaactggaaggaaggccaagtgtgagcccagccagttccagtgcaccaacggccgctgcatcaccctgctgtggaagtgtgatggagatgaggactgtgtggatggcagtgatgagctggactgtgccccacccacctgtggggcccacgagttccagtgcagcaccagcagctgcatccccatctcctgggtgtgtgatgatgatgctgactgcagcgaccagagtgatgagagcctggagcagtgtggccggcagcccgtcatccacaccaagtgcccagccagcgagatccagtgtggcagcggggagtgcatccacaagaagtggaggtgtgatggagaccctgactgcaaggatggcagtgatgaggtgaactgccccagcaggacctgcaggccagaccagtttgaatgtgaagatggcagctgcatccacggcagccggcagtgcaatggcatccgggactgtgtggatggcagtgatgaggtgaactgcaagaatgtgaaccagtgcctgggccctgggaagttcaagtgccgctctggagaatgtattgacatcagcaaggtgtgcaaccaggagcaggactgccgggactggagcgatgagcccctgaaggagtgccacatcaatgaatgtctggtgaacaatggaggctgcagccacatctgcaaggacctggtgattggctatgaatgtgactgtgccgccggctttgagctgattgacaggaagacctgtggggacattgatgagtgccagaaccctggcatctgcagccagatctgcatcaacctgaagggcggctacaagtgtgaatgttcccggggctaccagatggacctggccaccggggtgtgcaaggctgtgggcaaggagcccagcctcatcttcaccaacagaagagacatcaggaagattggcctggagaggaaggagtacatccagctggtggagcagctgaggaacacagtggccctggatgctgacattgctgcccagaagctgttctgggccgacctgagccagaaggccatcttcagcgccagcattgatgacaaggtgggccgccacgtgaagatgattgacaacgtgtacaacccagctgccatcgctgtggactgggtgtacaagaccatctactggacagatgctgccagcaagaccatctctgtggccaccctggatggcaccaagaggaagttcctgttcaacagcgacctgcgggagcccgccagcattgctgtggaccccctgagcggctttgtgtactggagcgactggggcgagcccgccaagattgagaaggccggcatgaatggatttgaccggcggcccctggtgacagctgacatccagtggcccaacggcatcaccctggacctgatcaagagccggctgtactggctggacagcaagctgcacatgctgagctctgtggacctgaatggccaggacagaagaattgtgctgaagagcctggagttcctggcccaccccctggccctgaccatctttgaagatagagtgtactggattgatggagaaaatgaagctgtgtatggagccaacaagttcaccggcagcgagctggccaccctggtgaacaacctgaatgatgcccaggacatcatcgtgtaccacgagctggtgcagcccagcggcaagaactggtgtgaggaggacatggagaatggaggctgtgagtacctgtgcctgcctgccccccagatcaatgaccacagccccaagtacacctgcagctgccccagcggctacaacgtggaggagaatggccgggactgccagagcacagccaccaccgtgacctacagcgagaccaaggacaccaacaccacagagatcagcgccaccagcggcctggtgcctgggggcatcaacgtgaccacagctgtgtctgaggtgtctgtgccccccaagggcaccagcgctgcctgggccatcctgcccctgctgctgctggtgatggctgctgtgggcggctacctgatgtggaggaactggcagcacaagaacatgaagtccatgaactttgacaaccctgtgtacctgaagaccacagaggaggacctgagcattgacatcggccgccacagcgcctctgtgggccacacctacccagccatctctgtggtgtccacagatgatgacctggcctag

SEQ ID NO: 175827 - DNA, 522 bp, synthetic construct
  misc_feature 1..522: note = Description of Artificial Sequence: Synthetic coding sequence
  source 1..522: mol_type = other DNA
atgggcaccagcgccctgtgggccctgtggctgctgctggccctgtgctgggccccccgggagagcggggccactggaactggaaggaaggccaagtgtgagcccagccagttccagtgcaccaacggccgctgcatcaccctgctgtggaagtgtgatggagatgaggactgtgtggatggcagtgatgagaagaactgtgtgaagaagacctgtgccgagagtgactttgtgtgcaacaacggccagtgtgtgcccagccgctggaagtgtgatggagaccctgactgtgaagatggcagtgatgagagccctgagcagtgcaggaacatcacctgcagcccagatgagttcacctgcagcagcggccgctgcatcagcaggaactttgtgtgcaatggccaggatgactgcagtgatggcagtgatgagctggactgtgccccacccacctgtggggcccacgagttccagtgcagcaccagcagctgcatccccatctcctgggtgtgtgatgactag

SEQ ID NO: 175828 - DNA, 2538 bp, synthetic construct
  misc_feature 1..2538: note = Description of Artificial Sequence: Synthetic coding sequence
  source 1..2538: mol_type = other DNA
atgggcaccagcgccctgtgggccctgtggctgctgctggccctgtgctgggccccccgggagagcggggccactggaactggaaggaaggccaagtgtgagcccagccagttccagtgcaccaacggccgctgcatcaccctgctgtggaagtgtgatggagatgaggactgtgtggatggcagtgatgagaagaactgtgtgaagaagacctgtgccgagagtgactttgtgtgcaacaacggccagtgtgtgcccagccgctggaagtgtgatggagaccctgactgtgaagatggcagtgatgagagccctgagcagtgccacatgaggacctgccgcatccacgagatcagctgtggggcccacagcacccagtgcatccctgtgtcctggaggtgtgatggagaaaatgactgtgacagcggggaggatgaggagaactgtggcaacatcacctgcagcccagatgagttcacctgcagcagcggccgctgcatcagcaggaactttgtgtgcaatggccaggatgactgcagtgatggcagtgatgagctggactgtgccccacccacctgtggggcccacgagttccagtgcagcaccagcagctgcatccccatctcctgggtgtgtgatgatgatgctgactgcagcgaccagagtgatgagagcctggagcagtgtggccggcagcctgtgatccacaccaagtgcccagccagcgagatccagtgtggcagcggggagtgcatccacaagaagtggaggtgtgatggagaccctgactgcaaggatggcagtgatgaggtgaactgccccagcaggacctgcaggccagaccagtttgaatgtgaagatggcagctgcatccacggcagccggcagtgcaatggcatccgggactgtgtggatggcagtgatgaggtgaactgcaagaatgtgaaccagtgcctgggccctgggaagttcaagtgccgcagcggggagtgcatcgacatcagcaaggtgtgcaaccaggagcaggactgccgggactggagcgatgagcccctgaaggagtgccacatcaatgaatgtctggtgaacaacggcggctgcagccacatctgcaaggacctggtgattggctatgaatgtgactgtgccgccggctttgagctgattgacaggaagacctgtggggacattgatgagtgccagaaccctggcatctgcagccagatctgcatcaacctgaagggcggctacaagtgtgagtgcagccggggctaccagatggacctggccactggagtgtgcaaggctgtgggcaaggagcccagcctcatcttcaccaacagaagagacatcaggaagattggcctggagaggaaggagtacatccagctggtggagcagctgaggaacacagtggccctggatgctgacattgctgcccagaagctgttctgggccgacctgagccagaaggccatcttcagcgccagcattgatgacaaggtgggcagacatgtgaagatgattgacaacgtgtacaacccagctgccatcgctgtggactgggtgtacaagaccatctactggacagatgctgccagcaagaccatctctgtggccaccctggatggcaccaagaggaagttcctgttcaacagcgacctgcgggagcccgccagcattgctgtggaccccctgagcggctttgtgtactggagcgactggggcgagcccgccaagattgagaaggccggcatgaatggatttgacagaagacccctggtgacagctgacatccagtggcccaacggcatcaccctggacctgatcaagagccggctgtactggctggacagcaagctgcacatgctgagctctgtggacctgaatggccaggaccggcgcatcgtgctgaagagcctggagttcctggcccaccccctggccctgaccatctttgaggacagagtgtactggattgatggagaaaatgaggccgtgtatggagccaacaagttcaccggcagcgagctggccaccctggtgaacaacctgaatgatgcccaggacatcatcgtgtaccacgagctggtgcagcccagcggcaagaactggtgtgaggaggacatggagaatggaggctgtgagtacctgtgcctgcctgccccccagatcaatgaccacagccccaagtacacctgcagctgccccagcggctacaacgtggaggagaatggccgggactgccagaggatcaacgtgaccacagctgtgtctgaggtgtctgtgccccccaagggcaccagcgctgcctgggccatcctgcccctgctgctgctggtgatggctgctgtgggcggctacctgatgtggaggaactggcagcacaagaacatgaagtccatgaactttgacaaccctgtgtacctgaagaccacagaggaggacctgagcattgatattggccgccacagcgcctctgtgggccacacctacccagccatctctgtggtgtccacagatgatgacctggcctag

SEQ ID NO: 175829 - DNA, 2622 bp, synthetic construct
  misc_feature 1..2622: note = Description of Artificial Sequence: Synthetic coding sequence
  source 1..2622: mol_type = other DNA
atgggcaccagcgccctgtgggccctgtggctgctgctggccctgtgctgggccccccgggagagcggggccactggaactggaaggaaggccaagtgtgagcccagccagttccagtgcaccaacggccgctgcatcaccctgctgtggaagtgtgatggagatgaggactgtgtggatggcagtgatgagaagaactgtgtgaagaagacctgtgccgagagtgactttgtgtgcaacaacggccagtgtgtgcccagccgctggaagtgtgatggagaccctgactgtgaagatggcagtgatgagagccctgagcagtgccacatgaggacctgccgcatccacgagatcagctgtggggcccacagcacccagtgcatccctgtgtcctggaggtgtgatggagaaaatgactgtgacagcggggaggatgaggagaactgtggcaacatcacctgcagcccagatgagttcacctgcagcagcggccgctgcatcagcaggaactttgtgtgcaatggccaggatgactgcagtgatggcagtgatgagctggactgtgccccacccacctgtggggcccacgagttccagtgcagcaccagcagctgcatccccatctcctgggtgtgtgatgatgatgctgactgcagcgaccagagtgatgagagcctggagcagtgtggccggcagcctgtgatccacaccaagtgcccagccagcgagatccagtgtggcagcggggagtgcatccacaagaagtggaggtgtgatggagaccctgactgcaaggatggcagtgatgaggtgaactgccccagcaggacctgcaggccagaccagtttgaatgtgaagatggcagctgcatccacggcagccggcagtgcaatggcatccgggactgtgtggatggcagtgatgaggtgaactgcaagaatgtgaaccagtgcctgggccctgggaagttcaagtgccgcagcggggagtgcatcgacatcagcaaggtgtgcaaccaggagcaggactgccgggactggagcgatgagcccctgaaggagtgccacatcaatgaatgtctggtgaacaacggcggctgcagccacatctgcaaggacctggtgattggctatgaatgtgactgtgccgccggctttgagctgattgacaggaagacctgtggggacattgatgagtgccagaaccctggcatctgcagccagatctgcatcaacctgaagggcggctacaagtgtgagtgcagccggggctaccagatggacctggccactggagtgtgcaaggctgtgggcaaggagcccagcctcatcttcaccaacagaagagacatcaggaagattggcctggagaggaaggagtacatccagctggtggagcagctgaggaacacagtggccctggatgctgacattgctgcccagaagctgttctgggccgacctgagccagaaggccatcttcagcgccagcattgatgacaaggtgggcagacatgtgaagatgattgacaacgtgtacaacccagctgccatcgctgtggactgggtgtacaagaccatctactggacagatgctgccagcaagaccatctctgtggccaccctggatggcaccaagaggaagttcctgttcaacagcgacctgcgggagcccgccagcattgctgtggaccccctgagcggctttgtgtactggagcgactggggcgagcccgccaagattgagaaggccggcatgaatggatttgacagaagacccctggtgacagctgacatccagtggcccaacggcatcaccctggacctgatcaagagccggctgtactggctggacagcaagctgcacatgctgagctctgtggacctgaatggccaggaccggcgcatcgtgctgaagagcctggagttcctggcccaccccctggccctgaccatctttgaggacagagtgtactggattgatggagaaaatgaggccgtgtatggagccaacaagttcaccggcagcgagctggccaccctggtgaacaacctgaatgatgcccaggacatcatcgtgtaccacgagctggtgcagcccagcggcaagaactggtgtgaggaggacatggagaatggaggctgtgagtacctgtgcctgcctgccccccagatcaatgaccacagccccaagtacacctgcagctgccccagcggctacaacgtggaggagaatggccgggactgccagagcacagccaccaccgtgacctacagcgagaccaaggacaccaacaccacagagatcagcgccaccagcggcctggtgcctgggggcatcaacgtgaccacagctgtgtctgaggtgtctgtgccccccaagggcaccagcgctgcctgggccatcctgcccctgctgctgctggtgatggctgctgtgggcggctacctgatgtggaggaactggcagcacaagaacatgaagtccatgaactttgacaaccctgtgtacctgaagaccacagaggaggacctgagcattgatattggccgccacagcgcctctgtgggccacacctacccagccatctctgtggtgtccacagatgatgacctggcctag

SEQ ID NO: 175830 - DNA, 729 bp, synthetic construct
  misc_feature 1..729: note = Description of Artificial Sequence: Synthetic coding sequence
  source 1..729: mol_type = other DNA
atgtctgatgagcgggaggtggccgaggccgccaccggggaggatgccagcagccccccacccaagacagaagctgccagtgacccccagcaccctgctgccagcgagggcgctgctgctgctgctgccagcccccccctgctgcgctgcctggtgctgaccggctttggaggctatgacaaggtgaagctgcagagcaggcctgctgcccccccagcccctggccctggccagctgaccctgcggctgcgggcctgtggcctgaactttgctgacctgatggcccggcagggcctgtatgaccggctgccccccctgcctgtgaccccaggcatggagggcgccggcgtggtgattgctgtgggggagggcgtgtctgacaggaaggccggggacagagtgatggtgctgaacagaagtggcatgtggcaggaggaggtgacagtgcccagcgtgcagaccttcctgatccctgaggccatgacctttgaggaggccgccgccctgctggtgaactacatcacagcctacatggtgctgtttgattttggaaacctgcagcccggccacagcgtgctggtgcacatggccgccggcggcgtgggcatggctgctgtgcagctgccctacagcggagaatgtgacagcgtgagaaatggcctgggccagcaggcccggggcacagaaggagagtggggccacaccagccaccggctgagccatgactag

SEQ ID NO: 175831 - DNA, 1182 bp, synthetic construct
  misc_feature 1..1182: note = Description of Artificial Sequence: Synthetic coding sequence
  source 1..1182: mol_type = other DNA
atgtctgatgagcgggaggtggccgaggccgccaccggggaggatgccagcagccccccacccaagacagaagctgccagtgacccccagcaccctgctgccagcgagggcgctgctgctgctgctgccagcccccccctgctgcgctgcctggtgctgaccggctttggaggctatgacaaggtgaagctgcagagcaggcctgctgcccccccagcccctggccctggccagctgaccctgcggctgcgggcctgtggcctgaactttgctgacctgatggcccggcagggcctgtatgaccggctgccccccctgcctgtgaccccaggcatggagggcgccggcgtggtgattgctgtgggggagggcgtgtctgacaggaaggccggggacagagtgatggtgctgaacagaagtggcatgtggcaggaggaggtgacagtgcccagcgtgcagaccttcctgatccctgaggccatgacctttgaggaggccgccgccctgctggtgaactacatcacagcctacatggtgctgtttgattttggaaacctgcagcccggccacagcgtgctggtgcacatggccgccggcggcgtgggcatggctgctgtgcagctgtgcaggacagtggagaatgtgacagtgtttggaacagccagcgccagcaagcatgaggccctgaaggaaaatggagtgacccaccccatcgactaccacaccacagattatgtggatgagatcaagaagatcagccccaagggcgtggacatcgtgatggaccccctgggcggcagtgacacagccaagggctacaacctgctgaagcccatgggcaaggtggtgacctacggcatggccaacctgctgaccggccccaagaggaacctgatggccctggcccggacctggtggaaccagttctctgtgacagccctgcagctgctgcaggccaacagagctgtgtgtggcttccacctgggctacctggatggagaggtggagctggtgtctggagtggtggcccggctgctggccctgtacaaccagggccacatcaagccccacatcgacagcgtgtggccctttgagaaggtggctgatgccatgaagcagatgcaggagaagaagaatgtgggcaaggtgctgctggtgcccggccctgagaaggagaactag

SEQ ID NO: 175832 - DNA, 780 bp, synthetic construct
  misc_feature 1..780: note = Description of Artificial Sequence: Synthetic coding sequence
  source 1..780: mol_type = other DNA
atggtgctgaacagaagtggcatgtggcaggaggaggtgacagtgcccagcgtgcagaccttcctgatccctgaggccatgacctttgaggaggccgccgccctgctggtgaactacatcacagcctacatggtgctgtttgattttggaaacctgcagcccggccacagcgtgctggtgcacatggccgccggcggcgtgggcatggctgctgtgcagctgtgcaggacagtggagaatgtgacagtgtttggaacagccagcgccagcaagcatgaggccctgaaggaaaatggagtgacccaccccatcgactaccacaccacagattatgtggatgagatcaagaagatcagccccaagggcgtggacatcgtgatggaccccctgggcggcagtgacacagccaagggctacaacctgctgaagcccatgggcaaggtggtgacctacggcatggccaacctgctgaccggccccaagaggaacctgatggccctggcccggacctggtggaaccagttctctgtgacagccctgcagctgctgcaggccaacagagctgtgtgtggcttccacctgggctacctggatggagaggtggagctggtgtctggagtggtggcccggctgctggccctgtacaaccagggccacatcaagccccacatcgacagcgtgtggccctttgagaaggtggctgatgccatgaagcagatgcaggagaagaagaatgtgggcaaggtgctgctggtgcccggccctgagaaggagaactag

SEQ ID NO: 175833 - DNA, 903 bp, synthetic construct
  misc_feature 1..903: note = Description of Artificial Sequence: Synthetic coding sequence
  source 1..903: mol_type = other DNA
atggcccggcagggcctgtatgaccggctgccccccctgcctgtgaccccaggcatggagggcgctggggtggtgattgctgtgggggagggcgtgtctgacaggaaggccggggacagagtgatggtgctgaacagaagtggcatgtggcaggaggaggtgacagtgcccagcgtgcagaccttcctgatccctgaggccatgacctttgaggaggccgccgccctgctggtgaactacatcacagcctacatggtgctgtttgattttggaaacctgcagcccggccacagcgtgctggtgcacatggctgctggaggagtgggcatggctgctgtgcagctgtgcaggacagtggagaatgtgacagtgtttggaacagccagcgccagcaagcatgaggccctgaaggaaaatggagtgacccaccccatcgactaccacaccacagattatgtggatgagatcaagaagatcagccccaagggcgtggacatcgtgatggaccccctgggcggcagtgacacagccaagggctacaacctgctgaagcccatgggcaaggtggtgacctacggcatggccaacctgctgaccggccccaagaggaacctgatggccctggcccggacctggtggaaccagttctctgtgacagccctgcagctgctgcaggccaacagagctgtgtgtggcttccacctgggctacctggatggagaggtggagctggtgtctggagtggtggcccggctgctggccctgtacaaccagggccacatcaagccccacattgattctgtgtggccctttgagaaggtggctgatgccatgaagcagatgcaggagaagaagaatgtgggcaaggtgctgctggtgcccggccctgagaaggaaaattag

SEQ ID NO: 175834 - DNA, 654 bp, synthetic construct
  misc_feature 1..654: note = Description of Artificial Sequence: Synthetic coding sequence
  source 1..654: mol_type = other DNA
atgagcagtgactttgagggctatgagcaggactttgctgtgctgacagctgagatcaccagcaagatcgcccgggtgccccggctgcccccagatgagaagaagcagatggtggccaacgtggagaagcagctggaggaggccaaggagctgctggagcagatggacctggaggtgcgggagatccccccccagagccggggcatgtacagcaacaggatgaggagctacaagcaggagatgggcaagctggagacagacttcaagaggagcagaattgcctacagtgatgaggtgagaaatgagctgctgggagatgatggcaacagcagcgagaaccagagggcccacctgctggacaacacagagcggctggagaggagcagccggcggctggaggccggctaccagattgctgtggagacagagcagatcggccaggagatgctggagaacctgagccatgaccgggagaagatccagagggcccgggagcggctgcgggagacagatgccaacctgggcaagagcagccgcatcctgaccggcatgctgcggcgcatcatccagaaccgcatcctgctggtgatcctgggcatcatcgtggtgatcaccatcctgatggccatcaccttctctgtgagaagacactag

SEQ ID NO: 175835 - DNA, 612 bp, synthetic construct
  misc_feature 1..612: note = Description of Artificial Sequence: Synthetic coding sequence
  source 1..612: mol_type = other DNA
atgagcagtgactttgagggctatgagcaggactttgctgtgctgacagctgagatcaccagcaagatcgcccgggtgccccggctgcccccagatgagaagaagcagatggtggccaacgtggagaagcagctggaggaggccaaggagctgctggagcagatggacctggaggtgcgggagatccccccccagagccggggcatgtacagcaacaggatgaggagctacaagcaggagatgggcaagctggagacagacttcaagaggagcagaattgcctacagtgatgaggtgagaaatgagctgctgggagatgatggcaacagcagcgagaaccagagggcccacctgctggacaacacagagcggctggagaggagcagccggcggctggaggccggctaccagattgctgtggagacagagcagatcggccaggagatgctggagaacctgagccatgaccgggagaagatccagagggcccgggagcggctgcgggagacagatgccaacctgggcaagagcagccgcatcctgaccggcatgctgcggcggggctgcagcgtgaagaagcagtgcaacctgagcctggcccccaaggcctag

SEQ ID NO: 175836 - DNA, 432 bp, synthetic construct
  misc_feature 1..432: note = Description of Artificial Sequence: Synthetic coding sequence
  source 1..432: mol_type = other DNA
atgtctgccccagcccagcccccagctgagggcacagagggcacagcccctgggggcggccccccaggccccccacccaacatgaccagcaacagaaggctgcagcagacccaggcccaggtggaggaggtggtggacatcatccgggtgaatgtggacaaggtgctggagcgggaccagaagctgtctgagctggatgacagagcagatgccctgcaggccggggccagccagtttgagagcagcgctgccaagctgaagaggaagtactggtggaagaactgcaagatgatgatcatgctgggccgctggcagctgacccagtactgcctggtgatgtggagcttccccagctggaccaggcctgaggagggccctgggggcggccccaagagcaacctggtgtctgtgcagtaccccttcaggaagtag

SEQ ID NO: 175837 - DNA, 354 bp, synthetic construct
  misc_feature 1..354: note = Description of Artificial Sequence: Synthetic coding sequence
  source 1..354: mol_type = other DNA
atgtctgccccagcccagcccccagctgagggcacagagggcacagcccctgggggcggccccccaggccccccacccaacatgaccagcaacagaaggctgcagcagacccaggcccaggtggaggaggtggtggacatcatccgggtgaatgtggacaaggtgctggagcgggaccagaagctgtctgagctggatgacagagcagatgccctgcaggccggggccagccagtttgagagcagcgctgccaagctgaagaggaagtactggtggaagaactgcaagatgatgatcatgctgggcgccatctgtgccatcatcgtggtggtgattgtgtccaagtacagatag

SEQ ID NO: 175838 - DNA, 357 bp, synthetic construct
  misc_feature 1..357: note = Description of Artificial Sequence: Synthetic coding sequence
  source 1..357: mol_type = other DNA
atgtctgccccagcccagcccccagctgagggcacagagggcacagcccctgggggcggccccccaggccccccacccaacatgaccagcaacagaaggctgcagcagacccaggcccaggtggaggaggtggtggacatcatccgggtgaatgtggacaaggtgctggagcgggaccagaagctgtctgagctggatgacagagcagatgccctgcaggccggggccagccagtttgagagcagcgctgccaagctgaagaggaagtactggtggaagaactgcaagatgatgatcatgctgggcgccatctgtgccatcatcgtggtggtgattgtcatctacttcttcacctag

SEQ ID NO: 175839 - DNA, 744 bp, synthetic construct
  misc_feature 1..744: note = Description of Artificial Sequence: Synthetic coding sequence
  source 1..744: mol_type = other DNA
atgtctgccccagcccagcccccagctgagggcacagagggcacagcccctgggggcggccccccaggccccccacccaacatgaccagcaacagaaggctgcagcagacccaggcccaggtggaggaggtggtggacatcatccgggtgaatgtggacaaggtgctggagcgggaccagaagctgtctgagctggatgacagagcagatgccctgcaggccggggccagccagtttgagagcagcgctgccaagctgaagaggaagtactggtggaagaactgcaagatgatgatcatgctgggcgccatctgtgccatcatcgtggtggtgattgtcatctacttctacctgaggatgtaccaccccttccctgtggtgcactgccacccccacagctgccccctgcccagcgtgtgcagcctgaacaccctgccccacccccccagcagcatcccagcccaggccagccccagccccatcccccccttcagcctgcggagctttgccctgtgccccagcaccctggagatgctgctggtggcccagagcaagagcctgcctgaggagcagcagctggcccccccaccctgcctgctcttcctgtacagccaggtgccccccaagccccagagggtgggcggccagggcaagggccagggcggggagtggctgcggcgcagcacccatgaggccgcccagacctgggaggagaagagcattggagcccacggggacttctag

SEQ ID NO: 175840 - DNA, 351 bp, synthetic construct
  misc_feature 1..351: note = Description of Artificial Sequence: Synthetic coding sequence
  source 1..351: mol_type = other DNA
atgtctgccccagcccagcccccagctgagggcacagagggcacagcccctgggggcggccccccaggccccccacccaacatgaccagcaacagaaggctgcagcagacccaggcccaggtggaggaggtggtggacatcatccgggtgaatgtggacaaggtgctggagcgggaccagaagctgtctgagctggatgacagagcagatgccctgcaggccggggccagccagtttgagagcagcgctgccaagctgaagaggaagtactggtggaagaactgcaagatgatgatcatgctgggcgccatctgtgccatcatcgtggtggtgattgtgcggcgggactag

SEQ ID NO: 175841 - DNA, 351 bp, synthetic construct
  misc_feature 1..351: note = Description of Artificial Sequence: Synthetic coding sequence
  source 1..351: mol_type = other DNA
atgtctgccacagctgccacagcccctcctgctgccccagctggggagggcggccccccagcccccccacccaacctgaccagcaacagaaggctgcagcagacccaggcccaggtggatgaggtggtggacatcatgagggtgaatgtggacaaggtgctggagcgggaccagaagctgtctgagctggatgacagagcagatgccctgcaggccggggccagccagtttgagaccagcgctgccaagctgaagaggaagtactggtggaagaacctgaagatgatgatcatcctgggcgtcatctgtgccatcatcctgatcatcatcatcgtgtacttcagcacctag

SEQ ID NO: 175842 - DNA, 303 bp, synthetic construct
  misc_feature 1..303: note = Description of Artificial Sequence: Synthetic coding sequence
  source 1..303: mol_type = other DNA
atgagcacaggccccacagctgccaccggcagcaacagaaggctgcagcagacccagaaccaggtggatgaggtggtggacatcatgagggtgaatgtggacaaggtgctggagcgggaccagaagctgtctgagctggatgacagagcagatgccctgcaggccggggccagccagtttgagaccagcgctgccaagctgaagaggaagtactggtggaagaactgcaagatgtgggccatcggcatcaccgtgctggtgatcttcatcatcatcatcatcgtgtgggtggtgagcagctag

SEQ ID NO: 175843 - DNA, 351 bp, synthetic construct
  misc_feature 1..351: note = Description of Artificial Sequence: Synthetic coding sequence
  source 1..351: mol_type = other DNA
atggccggcatcgagctggagcgctgccagcagcaggccaatgaggtgacagagatcatgaggaacaactttgggaaggtgctggagcggggcgtgaagctggccgagctgcagcagaggagtgaccagctgctggacatgagcagcaccttcaacaagaccacccagaacctggcccagaagaagtgctgggagaacatccgctaccgcatctgtgtgggcctggtggtggtgggcgtgctgctgatcatcctgattgtgctgctggtggtgttcctgccccagagcagtgacagcagcagcgcccccaggacccaggatgctggcatcgccagcggccctggcaactag

SEQ ID NO: 175844 - DNA, 783 bp, synthetic construct
  misc_feature 1..783: note = Description of Artificial Sequence: Synthetic coding sequence
  source 1..783: mol_type = other DNA
atggccatcctgtttgctgtggtggcccggggcaccaccatcctggccaagcacgcctggtgtggcggcaacttcctggaggtgacagagcagatcctggccaagatccccagcgagaacaacaagctgacctacagccacggcaactacctgttccactacatctgccaggaccgcatcgtgtacctgtgcatcacagatgatgactttgagaggagccgggccttcaacttcctgaatgagatcaagaagcgcttccagaccacctacggcagccgggcccagacagccctgccctatgccatgaacagcgagttcagctctgtgctggccgcccagctgaagcaccacagtgaaaataaaggcctggacaaggtgatggagacccaggcccaggtggatgagctgaagggcatcatggtgaggaacatcgtgtgccacctgcagaactaccagcagaagagctgcagcagccacgtgtatgaggagccccaggcccactactaccaccaccaccgcatcaactgtgtgcacctgtaccactgcttcaccagcctgtggtggatctacatggccaagctgtgtgaggagatcggcaagaagaagctgcccctgaccaaggacatgagggagcagggcgtgaagagcaacccctgtgacagcagcctgagccacacagaccgctggtacctgcctgtgagcagcaccctcttcagcctcttcaagatcctcttccacgccagccgcttcatctttgtgctgagcaccagcctcttcctgtag

SEQ ID NO: 175845 - DNA, 663 bp, synthetic construct
  misc_feature 1..663: note = Description of Artificial Sequence: Synthetic coding sequence
  source 1..663: mol_type = other DNA
atggccatcctgtttgctgtggtggcccggggcaccaccatcctggccaagcacgcctggtgtggcggcaacttcctggaggtgacagagcagatcctggccaagatccccagcgagaacaacaagctgacctacagccacggcaactacctgttccactacatctgccaggaccgcatcgtgtacctgtgcatcacagatgatgactttgagaggagccgggccttcaacttcctgaatgagatcaagaagcgcttccagaccacctacggcagccgggcccagacagccctgccctatgccatgaacagcgagttcagctctgtgctggccgcccagctgaagcaccacagtgaaaataaaggcctggacaaggtgatggagacccaggcccaggtggatgagctgaagggcatcatggtgaggaacatcgacctggtggcccagagaggagagcggctggagctgctgattgacaagacagagaacctggtggacagctctgtgaccttcaagaccaccagcaggaacctggcccgggccatgtgcatgaagaacctgaagctgaccatcatcatcatcatcgtgtccatcgtgttcatctacatcatcgtgagccccctgtgtggcggcttcacctggcccagctgtgtgaagaagtag

SEQ ID NO: 175846 - DNA, 540 bp, synthetic construct
  misc_feature 1..540: note = Description of Artificial Sequence: Synthetic coding sequence
  source 1..540: mol_type = other DNA
atggccatcctgtttgctgtggtggcccggggcaccaccatcctggccaagcacgcctggtgtggcggcaacttcctggaggactttgagaggagccgggccttcaacttcctgaatgagatcaagaagcgcttccagaccacctacggcagccgggcccagacagccctgccctatgccatgaacagcgagttcagctctgtgctggccgcccagctgaagcaccacagcgagaacaagggcctggacaaggtgatggagacccaggcccaggtggatgagctgaagggcatcatggtgagaaatattgacctggtggcccagagaggagagcggctggagctgctgattgacaagacagagaacctggtggacagctctgtgaccttcaagaccaccagcaggaacctggcccgggccatgtgcatgaagaacctgaagctgaccatcatcatcatcatcgtgtccatcgtgttcatctacatcatcgtgagccccctgtgtggcggcttcacctggcccagctgtgtgaagaagtag

SEQ ID NO: 175847 - DNA, 303 bp, synthetic construct
  misc_feature 1..303: note = Description of Artificial Sequence: Synthetic coding sequence
  source 1..303: mol_type = other DNA
atggaggaggccagcgagggcggcggcaatgacagagtgaggaacctgcagagcgaggtggagggcgtgaagaacatcatgacccagaatgtggagcgcatcctggcccggggggagaacctggagcacctgaggaacaagacagaggacctggaggccaccagcgagcacttcaagaccaccagccagaaggtggccaggaagttctggtggaagaatgtgaagatgattgtgctgatctgtgtgattgtgttcatcatcatcctcttcatcgtgctgtttgccaccggggccttctcctag

SEQ ID NO: 175848 - DNA, 777 bp, synthetic construct
  misc_feature 1..777: note = Description of Artificial Sequence: Synthetic coding sequence
  source 1..777: mol_type = other DNA
atggaggagatgaagaagacagccatccggctgcccaagggcaagcagaagcccatcaagacagagtggaacagccgctgtgtgctcttcacctacttccagggcgacatcagctctgtggtggatgagcacttcagccgggccctgagcaacatcaagagcccccaggagctgacccccagcagccagagcgagggcgtgatgctgaagaatgatgacagcatgagccccaaccagtggagatacagcagcccctggaccaagccccagcctgaggtgcctgtgaccaacagagctgccaactgcaacctgcacgtgcccggccccatggctgtgaaccagttcagccccagcctggcccggcgggcctctgtgcggcctggagagctgtggcacttcagcagcctggccggcaccagcagcctggagcccggctacagccaccccttccctgcccggcacctggtgcctgagccccagccagatggcaagcgggagcccctgctgagcctgctgcagcaggaccgctgcctggcccggccccaggagagcgctgcccgggagaatggaaatcctggccagattgctggcagcacaggcctgctcttcaacctgcccccaggctctgtgcactacaagaagctgtatgtgtcccggggcagcgccagcaccagcctgcccaatgagaccctgtctgagctggagaccccaggcaagtacagcctgaccccacccaaccactggggccacccccaccgctacctgcagcacctgtag

SEQ ID NO: 175849 - DNA, 348 bp, synthetic construct
  misc_feature 1..348: note = Description of Artificial Sequence: Synthetic coding sequence
  source 1..348: mol_type = other DNA
atgaagaagacagccatccggctgcccaagggcaagcagaagcccatcaagacagagtggaacagccgctgtgtgctcttcacctacttccagggcgacatcagctctgtggtggatgagcacttcagccgggccctgagcaacatcaagagcccccaggagctgacccccagcagccagagcgagggcgtgatgctgaagaatgacaagaagctgtatgtgtcccggggcagcgccagcaccagcctgcccaatgagaccctgtctgagctggagacccctgggaagtacagcctgaccccacccaaccactggggccacccccaccgctacctgcagcacctgtag

SEQ ID NO: 175850 - DNA, 492 bp, synthetic construct
  misc_feature 1..492: note = Description of Artificial Sequence: Synthetic coding sequence
  source 1..492: mol_type = other DNA
tgaatcagctctgtggtggatgagcacttcagccgggccctgagcaacatcaagagcccccaggagctgacccccagcagccagagcgagggcgtgatgctgaagaatgatgacagcatgagccccaaccagtggagatacagcagcccctggaccaagccccagcctgaggtgcctgtgaccaacagagctgccaactgcaacctgcacgtgcccggccccatggctgtgaaccagttcagccccagcctggcccggcgggcctctgtgcggcctggagagctgtggcacttcagcagcctggccggcaccagcagcctggagcccggctacagccaccccttccctgcccggcacctggtgcctgagccccagccagatggcaagcacaagaagctgtatgtgtcccggggcagcgccagcaccagcctgcccaatgagaccctgtctgagctggagaccccaggcaagtacagcctgaccccaccctag

SEQ ID NO: 175851 - DNA, 183 bp, synthetic construct
  misc_feature 1..183: note = Description of Artificial Sequence: Synthetic coding sequence
  source 1..183: mol_type = other DNA
acccccagcagccagagcgagggcgtgatgctgaagaatgacaagaagctgtatgtgtcccggggcagcgccagcaccagcctgcccaatgagaccctgtctgagctggagaccccaggcaagtacagcctgaccccacccaaccactggggccacccccaccgctacctgcagcacctgtag

SEQ ID NO: 175852 - DNA, 954 bp, synthetic construct
  misc_feature 1..954: note = Description of Artificial Sequence: Synthetic coding sequence
  source 1..954: mol_type = other DNA
atgagctgcctggatgtgatgtaccaggtgtatggccccccccagccctactttgctgctgcctacaccccctaccaccagaagctggcctactacagcaagatgcaggaggcccaggagtgcaatgccagccccagcagcagcggcagcggcagcagcagcttcagcagccagaccccagccagcatcaaggaggaggagggcagccctgagaaggagaggcctcctgaggccgagtacatcaacagccgctgtgtgctcttcacctacttccagggcgacatcagctctgtggtggatgagcacttcagccgggccctgagccagcccagcagctacagccccagctgcaccagcagcaaggcccccaggagcagcggcccctggagggactgcagcttccccatgagccagaggagcttccctgccagcttctggaacagcgcctaccaggcccctgtgcccccacccctgggcagccccctggccacagcccacagcgagctgccctttgctgctgctgacccctacagccctgctgccctgcacggccacctgcaccagggcgccacagagccctggcaccacgcccacccccaccacgcccacccccaccacccctatgccctgggcggggccctgggcgcccaggccgccccctaccccaggcctgctgctgtgcatgaggtgtatgccccccactttgaccccaggtatggccccctgctgatgcctgctgccagcggccgcccagcccggctggccacagccccagccccagcccctggcagccccccctgtgagctgagcggcaagggggagcctgctggggccgcctgggccggccctgggggcccctttgccagccccagcggagatgtggcccagggcctgggcctgtctgtggacagcgcccggcgctacagcctgtgtggggccagcctgctgtcctag

SEQ ID NO: 175853 - DNA, 432 bp, synthetic construct
  misc_feature 1..432: note = Description of Artificial Sequence: Synthetic coding sequence
  source 1..432: mol_type = other DNA
atgagctgcctggatgtgatgtaccaggtgtatggccccccccagccctactttgctgctgcctacaccccctaccaccagaagctggcctactacagcaagatgcaggaggcccaggagtgcaatgccagccccagcagcagcggcagcggcagcagcagcttcagcagccagaccccagccagcatcaaggaggaggagggcagccctgagaaggagaggcctcctgaggccgagtacatcaacagccgctgtgtgctcttcacctacttccagggcgacatcagctctgtggtggatgagcacttcagccgggccctgagccagcccagcagctacagccccagctgcaccagcagcaaggcccccaggagcagcggcccctggagggcccggcgctacagcctgtgtggggccagcctgctgtcctag

SEQ ID NO: 175854 - DNA, 963 bp, synthetic construct
  misc_feature 1..963: note = Description of Artificial Sequence: Synthetic coding sequence
  source 1..963: mol_type = other DNA
atgagctgtgccgaggtgatgtaccacccccagccctatggagccagccagtacctgcccaaccccatggccgccaccacctgccccacagcctactaccagcctgccccccagcccggccagcagaagaagctggccgtgttcagcaagatgcaggacagcctggaggtgaccctgcccagcaagcaggaggaggaggatgaggaggaggaggaggaggagaaggaccagcctgctgagatggagtacctgaacagccgctgtgtgctcttcacctacttccagggcgacatcggctctgtggtggatgagcacttcagccgggccctgggccaggccatcaccctgcaccctgagagcgccatcagcaagagcaagatgggcctgacccccctgtggagggacagcagcgccctgagcagccagagaaattccttccccaccagcttctggaccagcagctaccagcccccaccagccccctgcctgggcggcgtgcacccagacttccaggtgactggacctcctggcaccttctctgctgctgaccccagcccctggccaggccacaacctgcaccagacaggccctgcccctcctcctgctgtgtctgagagctggccctaccccctgaccagccaggtgagccccagctacagccacatgcatgatgtgtacatgaggcaccaccacccccacgcccacatgcaccaccgccaccgccaccaccaccaccaccaccaccccccagctggcagcgccctggaccccagctatggccccctgctgatgcccagcgtgcatgctgcccgcatcccagccccccagtgtgacatcaccaagacagagcccaccaccgtgaccagcgccaccagcgcctgggccggggccttccatggaacagtggacatcgtgcccagcgtgggctttgacaccggctggagcgccatggcccggagctag

SEQ ID NO: 175855 - DNA, 981 bp, synthetic construct
  misc_feature 1..981: note = Description of Artificial Sequence: Synthetic coding sequence
  source 1..981: mol_type = other DNA
atgagctgtgccgaggtgatgtaccacccccagccctatggagccagccagtacctgcccaaccccatggccgccaccacctgccccacagcctactaccagcctgccccccagcccggccagcagaagaagctggccgtgttcagcaagatgcaggacagcctggaggtgaccctgcccagcaagcaggaggaggaggatgaggaggaggaggaggaggagaaggaccagcctgctgagatggagtacctgaacagccgctgtgtgctcttcacctacttccagggcgacatcggctctgtggtggatgagcacttcagccgggccctgggccaggccatcaccctgcaccctgagagcgccatcagcaagagcaagatgggcctgacccccctgtggagggacagcagcgccctgagcagccagagaaattccttccccaccagcttctggaccagcagctaccagcccccaccagccccctgcctgggcggcgtgcacccagacttccaggtgactggacctcctggcaccttctctgctgctgaccccagcccctggccaggccacaacctgcaccagacaggccctgcccctcctcctgctgtgtctgagagctggccctaccccctgaccagccaggtgagccccagctacagccacatgcatgatgtgtacatgaggcaccaccacccccacgcccacatgcaccaccgccaccgccaccaccaccaccaccaccaccccccagctggcagcgccctggaccccagctatggccccctgctgatgcccagcgtgcatgctgcccgcatcccagccccccagtgtgacatcaccaagacagagcccaccaccgtgaccagcgccaccagcgcctgggccggggccttccatggaacagtggacatcgtgcccagcgtgggctttgacaccggcctgcagcaccaggacaagagcaaggagagcccctggtactag

SEQ ID NO: 175856 - DNA, 1326 bp, synthetic construct
  misc_feature 1..1326: note = Description of Artificial Sequence: Synthetic coding sequence
  source 1..1326: mol_type = other DNA
atgaaggctgctgtggacctgaagcccaccctgaccatcatcaagacagagaaggtggacctggagctgttccccagcccagacatggagtgtgctgatgtgcccctgctgacccccagcagcaaggagatgatgagccaggccctgaaggccaccttcagcggcttcaccaaggagcagcagaggctgggcatccccaaggacccccggcagtggacagagacccacgtgcgggactgggtgatgtgggccgtgaatgagttcagcctgaagggcgtggacttccagaagttctgcatgaatggagctgccctgtgtgccctgggcaaggactgcttcctggagctggccccagactttgtgggggacatcctgtgggagcacctggagatcctgcagaaggaggatgtgaagccctaccaggtgaatggagtgaacccagcctacccagagagccgctacaccagtgactacttcatctcctatggcatcgagcacgcccagtgtgtgcccccatctgagttcagcgagcccagcttcatcacagagagctaccagaccctgcaccccatcagcagcgaggagctgctgagcctgaagtatgaaaatgactaccccagcgtcatcctgcgggaccccctgcagacagacaccctgcagaatgactactttgccatcaagcaggaggtggtgaccccagacaacatgtgcatgggccgcaccagccggggcaagctgggcggccaggacagctttgagagcattgagagctatgacagctgtgaccggctgacccagagctggagcagccagagcagcttcaacagcctgcagagggtgcccagctatgacagctttgacagcgaggactacccagctgccctgcccaaccacaagcccaagggcaccttcaaggactatgtgcgggacagagctgacctgaacaaggacaagcctgtgatcccagctgctgccctggccggctacacaggcagcggccccatccagctgtggcagttcctgctggagctgctgacagacaagagctgccagagcttcatctcctggacaggagatggctgggagttcaagctgagtgaccctgatgaggtggcccggcgctggggcaagaggaagaacaagcccaagatgaactatgagaagctgagccggggcctgcgctactactatgacaagaacatcatccacaagacagctgggaagcgctacgtgtacagatttgtgtgtgacctgcagagcctgctgggctacaccccagaggagctgcacgccatgctggatgtgaagccagatgctgatgaatag

SEQ ID NO: 175857 - DNA, 1065 bp, synthetic construct
  misc_feature 1..1065: note = Description of Artificial Sequence: Synthetic coding sequence
  source 1..1065: mol_type = other DNA
atgaaggctgctgtggacctgaagcccaccctgaccatcatcaagacagagaaggtggacctggagctgttccccagcccagacatggagtgtgctgatgtgcccctgctgacccccagcagcaaggagatgatgagccaggccctgaaggccaccttcagcggcttcaccaaggagcagcagaggctgggcatccccaaggacccccggcagtggacagagacccacgtgcgggactgggtgatgtgggccgtgaatgagttcagcctgaagggcgtggacttccagaagttctgcatgaatggagctgccctgtgtgccctgggcaaggactgcttcctggagctggccccagactttgtgggggacatcctgtgggagcacctggagatcctgcagaaggaggatgtgaagccctaccaggtgaatggagtgaacccagcctacccagagagccgctacaccagtgactacttcatctcctatggcatcgagcacgcccagtgtgtgcccccatctgagttcagcgagcccagcttcatcacagagagctaccagaccctgcaccccatcagcagcgaggagctgctgagcctgaagtatgaaaatgactaccccagcgtcatcctgcgggaccccctgcagacagacaccctgcagaatgactactttgccatcaagcaggaggtggtgaccccagacaacatgtgcatgggccgcaccagccggggcagcggccccatccagctgtggcagttcctgctggagctgctgacagacaagagctgccagagcttcatctcctggacaggagatggctgggagttcaagctgagtgaccctgatgaggtggcccggcgctggggcaagaggaagaacaagcccaagatgaactatgagaagctgagccggggcctgcgctactactatgacaagaacatcatccacaagacagctgggaagagatatgtgtacagatttgtgtgtgacctgcagagcctgctgggctacaccccagaggagctgcacgccatgctggatgtgaagccagatgctgatgaatag

SEQ ID NO: 175858 - DNA, 1458 bp, synthetic construct
  misc_feature 1..1458: note = Description of Artificial Sequence: Synthetic coding sequence
  source 1..1458: mol_type = other DNA
atgagctactttgtggacagcgctggcagcagccctgtgccctacagcgcccccaggcctgctgtggtgcggcagggccccagcaacacctatgaggaccccaggatgaactgtggcttccagagcaactaccaccagcagaggccctgctaccccttctgggatgagatggccacccaggaggtgcccaccggcctggagcactgtgtgtctgacatggagtgtgctgatgtgcccctgctgacccccagcagcaaggagatgatgagccaggccctgaaggccaccttcagcggcttcaccaaggagcagcagaggctgggcatccccaaggacccccggcagtggacagagacccacgtgcgggactgggtgatgtgggccgtgaatgagttcagcctgaagggcgtggacttccagaagttctgcatgaatggagctgccctgtgtgccctgggcaaggactgcttcctggagctggccccagactttgtgggggacatcctgtgggagcacctggagatcctgcagaaggaggatgtgaagccctaccaggtgaatggagtgaacccagcctacccagagagccgctacaccagtgactacttcatctcctatggcatcgagcacgcccagtgtgtgcccccatctgagttcagcgagcccagcttcatcacagagagctaccagaccctgcaccccatcagcagcgaggagctgctgagcctgaagtatgaaaatgactaccccagcgtcatcctgcgggaccccctgcagacagacaccctgcagaatgactactttgccatcaagcaggaggtggtgaccccagacaacatgtgcatgggccgcaccagccggggcaagctgggcggccaggacagctttgagagcattgagagctatgacagctgtgaccggctgacccagagctggagcagccagagcagcttcaacagcctgcagagggtgcccagctatgacagctttgacagcgaggactacccagctgccctgcccaaccacaagcccaagggcaccttcaaggactatgtgcgggacagagctgacctgaacaaggacaagcctgtgatcccagctgctgccctggccggctacacaggcagcggccccatccagctgtggcagttcctgctggagctgctgacagacaagagctgccagagcttcatctcctggacaggagatggctgggagttcaagctgagtgaccctgatgaggtggcccggcgctggggcaagaggaagaacaagcccaagatgaactatgagaagctgagccggggcctgcgctactactatgacaagaacatcatccacaagacagctgggaagcgctacgtgtacagatttgtgtgtgacctgcagagcctgctgggctacaccccagaggagctgcacgccatgctggatgtgaagccagatgctgatgaatag

SEQ ID NO: 175859 - DNA, 1065 bp, synthetic construct; identical to SEQ ID NO: 175857
  misc_feature 1..1065: note = Description of Artificial Sequence: Synthetic coding sequence
  source 1..1065: mol_type = other DNA

SEQ ID NO: 175860 - DNA, 819 bp, synthetic construct
  misc_feature 1..819: note = Description of Artificial Sequence: Synthetic coding sequence
  source 1..819: mol_type = other DNA
atgaaggctgctgtggacctgaagcccaccctgaccatcatcaagacagagaaggtggacctggagctgttccccagcccagacatggagtgtgctgatgtgcccctgctgacccccagcagcaaggagatgatgagccaggccctgaaggccaccttcagcggcttcaccaaggagcagcagaggctgggcatccccaaggacccccggcagtggacagagacccacgtgcgggactgggtgatgtgggccgtgaatgagttcagcctgaagggcgtggacttccagaagttctgcatgaatggagctgccctgtgtgccctgggcaaggactgcttcctggagctggccccagactttgtgggggacatcctgtgggagcacctggagatcctgcagaaggaggatgtgaagccctaccaggtgaatggagtgaacccagcctacccagagagccgctacaccagtgactacttcatctcctatggcatcgagcacgcccagtgtgtgcccccatctgagttcagcgagcccagcttcatcacagagagctaccagaccctgcaccccatcagcagcgaggagctgctgagcctgaagtatgaaaatgactaccccagcgtcatcctgcgggaccccctgcagacagacaccctgcagaatgactactttgccatcaagcaggaggtggtgaccccagacaacatgtgcatgggccgcaccagccggggcaagctgggcggccaggacagctttgagagcattgagagctatgacagctgtggccaggagatgggcaaggaggagaagcagacctag

SEQ ID NO: 175861 - DNA, 678 bp, synthetic construct
  misc_feature 1..678: note = Description of Artificial Sequence: Synthetic coding sequence
  source 1..678: mol_type = other DNA
atgaaggctgctgtggacctgaagcccaccctgaccatcatcaagacagagaaggtggacctggagctgttccccagccctgggaagctgggcggccaggacagctttgagagcattgagagctatgacagctgtgaccggctgacccagagctggagcagccagagcagcttcaacagcctgcagagggtgcccagctatgacagctttgacagcgaggactacccagctgccctgcccaaccacaagcccaagggcaccttcaaggactatgtgcgggacagagctgacctgaacaaggacaagcctgtgatcccagctgctgccctggccggctacacaggcagcggccccatccagctgtggcagttcctgctggagctgctgacagacaagagctgccagagcttcatctcctggacaggagatggctgggagttcaagctgagtgaccctgatgaggtggcccggcgctggggcaagaggaagaacaagcccaagatgaactatgagaagctgagccggggcctgcgctactactatgacaagaacatcatccacaagacagctgggaagcgctacgtgtacagatttgtgtgtgacctgcagagcctgctgggctacaccccagaggagctgcacgccatgctggatgtgaagccagatgctgatgaatag

SEQ ID NO: 175862 - DNA, 1848 bp, synthetic construct
  misc_feature 1..1848: note = Description of Artificial Sequence: Synthetic coding sequence
  source 1..1848: mol_type = other DNA
atgaaggccctgcggctgagcgccagcgccctcttctgcctgctgctgatcaatggcctgggcgccgcccctcctggccggcctgaggcccagcccccacccctgagcagcgagcacaaggagcctgtggccggagatgctgtgcccggccccaaggatggcagcgcccctgaggtgcggggggccagaaattctgagccccaggatgaaggagagctgttccagggcgtggacccccgggccctggccgctgtgctgctgcaggccctggacaggcctgccagccccccagcccccagcggcagccagcagggccctgaggaggaggccgctgaggccctgctgacagagaccgtgcgcagccagacccacagcctgcctgcccctgagagccctgagcctgctgccccaccccggccccagaccccagaaaatggacctgaggccagtgaccccagcgaggagctggaggccctggccagcctgctgcaggagctgcgggacttcagccccagcagcgccaagaggcagcaggagacagctgctgctgagacagagaccaggacccacaccctgaccagggtgaacctggagagccctggccctgagcgggtgtggagggcctcctggggcgagttccaggcccgggtgcctgagcgggcccccctgcccccaccagcccccagccagttccaggccaggatgccagacagcggccccctgcctgagacccacaagtttggagagggcgtgagcagccccaagacccacctgggggaggccctggcccccctgagcaaggcctaccagggcgtggccgcccccttccccaaggcccggcggcctgagagcgccctgctgggcggcagcgaggccggggagcggctgctgcagcagggcctggcccaggtggaggccggccggcggcaggccgaggccacccggcaggccgccgcccaggaggagcggctggccgacctggccagtgacctgctgctgcagtacctgctgcagggcggggcccggcagaggggcctgggcggccggggcctgcaggaggccgctgaggagcgggagagcgcccgggaggaggaggaggccgagcaggagaggagaggaggagaggagcgggtgggggaggaggatgaggaggccgctgaggccgaggccgaggccgaggaggccgagcgggcccggcagaatgccctgctgtttgctgaggaggaggatggagaggccggggctgaggacaagaggagccaggaggagaccccaggccacaggaggaaggaggccgagggcacagaggagggcggggaggaggaggatgatgaggagatggacccccagaccatcgacagcctcatcgagctgagcaccaagctgcacctgcctgcagatgatgtggtgtccatcatcgaggaggtggaggagaagaggaagaggaagaagaatgcccctcctgagcctgtgcccccaccccgggccgccccagcccccacccacgtgcgcagcccccagcccccacctccagccccagccccagccagagatgagctgcctgactggaatgaggtgctgcccccctgggaccgggaggaggatgaggtgtacccacctggcccctaccaccccttccccaactacatccggcccaggaccctgcagcccccatctgccctgcggcggcggcactaccaccacgccctgccccccagccgccactacccaggccgggaggcccaggcccggcgggcccaggaggaggccgaggccgaggagcggcggctgcaggagcaggaggagctggagaactacattgaacatgtgctgctgcggcggccctag

SEQ ID NO: 175863 - DNA, 1848 bp, synthetic construct; identical to SEQ ID NO: 175862
  misc_feature 1..1848: note = Description of Artificial Sequence: Synthetic coding sequence
  source 1..1848: mol_type = other DNA

SEQ ID NO: 175864 - DNA, 1134 bp, synthetic construct
  misc_feature 1..1134: note = Description of Artificial Sequence: Synthetic coding sequence
  source 1..1134: mol_type = other DNA
atgaaggccctgcggctgagcgccagcgccctcttctgcctgctgctgatcaatggcctgggcgccgcccctcctggccggcctgaggcccagcccccacccctgagcagcgagcacaaggagcctgtggccggagatgctgtgcccggccccaaggatggcagcgcccctgaggtgcggggggccagaaattctgagccccaggatgaaggagagctgttccagggcgtggacccccgggccctggccgctgtgctgctgcaggccctggacaggcctgccagccccccagcccccagcggcagccagcagggccctgaggaggaggccgctgaggccctgctgacagagaccgtgcgcagccagacccacagcctgcctgcccctgagagccctgagcctgctgccccaccccggccccagaccccagaaaatggacctgaggccagtgaccccagcgaggagctggaggccctggccagcctgctgcaggagctgcgggacttcagccccagcagcgccaagaggcagcaggagacagctgctgctgagacagagaccaggacccacaccctgaccagggtgaacctggagagccctggccctgagcgggtgtggagggcctcctggggcgagttccaggcccgggtgcctgagcgggcccccctgcccccaccagcccccagccagttccaggccaggatgccagacagcggccccctgcctgagacccacaagtttggagagggcgtgagcagccccaagacccacctgggggaggccctggcccccctgagcaaggcctaccagggcgtggccgcccccttccccaaggcccggcggcctgagagcgccctgctgggcggcagcgaggccggggagcggctgctgcagcagggcctggcccaggtggaggccggccggcggcaggccgaggccacccggcaggccgccgcccaggaggagcggctggccgacctggccagtgacctgctgctgcagtttgctgctggccggggccctgctgcccggccctgccccctggccctgcccctgagccctggctgtgtgggcacctgccagacccccctgcccggccctgagcctgagctgcctgagctgacccggggctag

SEQ ID NO: 175865 - DNA, 2484 bp, synthetic construct
  misc_feature 1..2484: note = Description of Artificial Sequence: Synthetic coding sequence
  source 1..2484: mol_type = other DNA
atgaccaagctgagcgcccaggtgaagggcagcctgaacatcaccaccccaggcctgcagatctggagaattgaggccatgcagatggtgcctgtgcccagcagcaccttcggcagcttctttgatggagactgctacatcatcctggccatccacaagacagccagcagcctgtcctatgacatccactactggattggccaggacagcagcctggatgagcagggcgccgccgccatctacaccacccagatggatgacttcctgaagggccgggctgtgcagcaccgggaggtgcagggcaatgaaagtgaggccttccggggctacttcaagcagggcctggtgatcagaaaaggaggagtggccagcggcatgaagcacgtggagaccaacagctatgatgtgcagaggctgctgcacgtgaagggcaagagaaatgtggtggccggggaggtggagatgtcctggaagagcttcaacagaggagatgtgttcctgctggacctgggcaagctgatcatccagtggaatggacctgagagcaccaggatggagcggctgcggggcatgaccctggccaaggagatccgggaccaggagcggggcggccgcacctacgtgggcgtggtggatggagaaaatgagctggccagccccaagctgatggaggtgatgaaccacgtgctgggcaagagaagagagctgaaggctgctgtgcctgacacagtggtggagcccgccctgaaggccgccctgaagctgtaccacgtgtctgattctgagggcaacctggtggtgcgggaggtggccacccggcccctgacccaggacctgctgagccatgaggactgctacatcctggaccagggcggcctgaagatctacgtgtggaagggcaagaaggccaatgagcaggagaagaagggggccatgagccacgccctgaacttcatcaaggccaagcagtacccacccagcacccaggtggaggtgcagaatgatggagctgagagcgctgtgttccagcagctgttccagaagtggacagccagcaacagaaccagcggcctgggcaagacccacacagtgggctctgtggccaaggtggagcaggtgaagtttgatgccacctccatgcacgtgaagccccaggtggccgcccagcagaagatggtggatgatggcagcggggaggtgcaggtgtggagaattgagaacctggagctggtgcctgtggacagcaagtggctgggccacttctacggcggggactgctacctgctgctgtacacctacctgattggagagaagcagcactacctgctgtatgtgtggcagggcagccaggccagccaggatgagatcacagccagcgcctaccaggccgtcatcctggaccagaagtacaatggagagcctgtgcagatccgggtgcccatgggcaaggagcccccccacctgatgagcatcttcaagggccgcatggtggtgtaccagggcggcaccagcaggaccaacaacctggagaccggccccagcaccaggctcttccaggtgcagggcactggagccaacaacaccaaggcctttgaggtgcctgcccgggccaacttcctgaacagcaatgatgtgtttgtgctgaagacccagagctgctgctacctgtggtgtgggaagggctgcagcggagatgagcgggagatggccaagatggtggccgacaccatcagcaggacagagaagcaggtggtggtggagggccaggagcccgccaacttctggatggccctgggcggcaaggccccctatgccaacaccaagaggctgcaggaggagaacctggtgatcaccccccggctgtttgaatgtagcaacaagacaggccgcttcctggccacagagatcccagacttcaaccaggatgacctggaggaggatgatgtgttcctgctggatgtgtgggaccaggtgttcttctggattggcaagcacgccaatgaggaggagaagaaggccgccgccaccacagcccaggagtacctgaagacccaccccagcggccgggaccctgagacccccatcatcgtggtgaagcagggccacgagccccccaccttcaccggctggttcctggcctgggaccccttcaagtggagcaacaccaagagctatgaggacctgaaggccgagctgggcaacagccgggactggagccagatcacagctgaggtgaccagccccaaggtggatgtgttcaatgccaacagcaacctgagcagcggccccctgcccatcttccccctggagcagctggtgaacaagcctgtggaggagctgcctgagggcgtggaccccagcaggaaggaggagcacctgagcattgaggacttcacccaggccttcggcatgaccccagctgccttcagcgccctgccccgctggaagcagcagaacctgaagaaggagaagggcctcttctag

SEQ ID NO: 175866 - DNA, 1551 bp, synthetic construct
  misc_feature 1..1551: note = Description of Artificial Sequence: Synthetic coding sequence
  source 1..1551: mol_type = other DNA
atgagccacgccctgaacttcatcaaggccaagcagtacccacccagcacccaggtggaggtgcagaatgatggagctgagagcgctgtgttccagcagctgttccagaagtggacagccagcaacagaacatctggcctgggcaagacccacacagtgggctctgtggccaaggtggagcaggtgaagtttgatgccacctccatgcacgtgaagccccaggtggccgcccagcagaagatggtggatgatggcagcggggaggtgcaggtgtggagaattgagaacctggagctggtgcctgtggacagcaagtggctgggccacttctatggaggagactgctacctgctgctgtacacctacctgattggagagaagcagcactacctgctgtatgtgtggcagggcagccaggccagccaggatgagatcacagccagcgcctaccaggccgtcatcctggaccagaagtacaacggggagcctgtgcagatccgggtgcccatgggcaaggagcccccccacctgatgagcatcttcaagggccgcatggtggtgtaccagggcggcaccagcaggaccaacaacctggagaccggccccagcaccaggctcttccaggtgcagggcaccggggccaacaacaccaaggcctttgaggtgcctgcccgggccaacttcctgaacagcaatgatgtgtttgtgctgaagacccagagctgctgctacctgtggtgtgggaagggctgcagcggagatgagcgggagatggccaagatggtggccgacaccatcagcaggacagagaagcaggtggtggtggagggccaggagcccgccaacttctggatggccctgggcggcaaggccccctatgccaacaccaagaggctgcaggaggagaacctggtgatcaccccccggctgtttgagtgcagcaacaagacaggccgcttcctggccacagagatcccagacttcaaccaggatgacctggaggaggatgatgtgttcctgctggatgtgtgggaccaggtgttcttctggattggcaagcacgccaatgaggaggagaagaaggctgctgccaccacagcccaggagtacctgaagacccaccccagcggccgggaccctgagacccccatcatcgtggtgaagcagggccacgagccccccaccttcaccggctggttcctggcctgggaccccttcaagtggagcaacaccaagagctatgaggacctgaaggccgagctgggcaacagccgggactggagccagatcacagctgaggtgaccagccccaaggtggatgtgttcaatgccaacagcaacctgagcagcggccccctgcccatcttccccctggagcagctggtgaacaagcctgtggaggagctgcctgagggcgtggaccccagcaggaaggaggagcacctgagcattgaggacttcacccaggccttcggcatgaccccagctgccttcagcgccctgccccgctggaagcagcagaacctgaagaaggagaagggcctcttctag

SEQ ID NO: 175867 - DNA, 1266 bp, synthetic construct
  misc_feature 1..1266: note = Description of Artificial Sequence: Synthetic coding sequence
  source 1..1266: mol_type = other DNA
atgaccaagctgagcgcccaggtgaagggcagcctgaacatcaccaccccaggcctgcagatctggagaattgaggccatgcagatggtgcctgtgcccagcagcaccttcggcagcttctttgatggagactgctacatcatcctggccatccacaagacagccagcagcctgtcctatgacatccactactggattggccaggacagcagcctggatgagcagggcgccgccgccatctacaccacccagatggatgacttcctgaagggccgggctgtgcagcaccgggaggtgcagggcaatgaaagtgaggccttccggggctacttcaagcagggcctggtgatcagaaaaggaggagtggccagcggcatgaagcacgtggagaccaacagctatgatgtgcagaggctgctgcacgtgaagggcaagagaaatgtggtggccggggaggtggagatgtcctggaagagcttcaacagaggagatgtgttcctgctggacctgggcaagctgatcatccagtggaatggacctgagagcaccaggatggagcggctgcggggcatgaccctggccaaggagatccgggaccaggagcggggcggccgcacctacgtgggcgtggtggatggagaaaatgagctggccagccccaagctgatggaggtgatgaaccacgtgctgggcaagagaagagagctgaaggctgctgtgcctgacacagtggtggagcccgccctgaaggccgccctgaagctgtaccacgtgtctgattctgagggcaacctggtggtgcgggaggtggccacccggcccctgacccaggacctgctgagccatgaggactgctacatcctggaccagggcggcctgaagatctacgtgtggaagggcaagaaggccaatgagcaggagaagaagggggccatgagccacgccctgaacttcatcaaggccaagcagtacccacccagcacccaggtggaggtgcagaatgatggagctgagagcgctgtgttccagcagctgttccagaagtggacagccagcaacagaaccagcggcctgggcaagacccacacagtgggctctgtgggggagggccaggccggggctgtgcgggagcccggcagccgctcctgggcccggcgggccacctggagcaccacccacccccccagcctgacctgcatcttcaatgaagacttctacgccggcagcggcctggtgctggctgatggagatgtggacaagctgtag

SEQ ID NO: 175868 - DNA, 576 bp, synthetic construct
  misc_feature 1..576: note = Description of Artificial Sequence: Synthetic coding sequence
  source 1..576: mol_type = other DNA
atgggcaagcagaacagcaagctggcccctgaggtgatggaggacctggtgaagagcacagagttcaatgaacatgagctgaagcagtggtacaagggcttcctgaaggactgccccagcggccgcctgaacctggaggagttccagcagctgtatgtgaagttcttcccctatggagatgccagcaagtttgcccagcacgccttccgcacctttgacaagaatggagatggcaccatcgacttccgggagttcatctgtgccctgagcatcaccagccggggcagctttgagcagaagctgaactgggccttcaacatgtatgacctggatggagatggcaagatcaccagggtggagatgctggagatcatcgaggccatctacaagatggtgggcaccgtcatcatgatgaagatgaatgaagatggcctgaccccagagcagagggtggacaagatcttcagcaagatggacaagaacaaggatgaccagatcaccctggatgagttcaaggaggccgccaagagtgaccccagcatcgtgctgctgctgcagtgtgacatccagaagtag

SEQ ID NO: 175869 - DNA, 576 bp, synthetic construct; identical to SEQ ID NO: 175868
  misc_feature 1..576: note = Description of Artificial Sequence: Synthetic coding sequence
  source 1..576: mol_type = other DNA

SEQ ID NO: 175870 - DNA, 576 bp, synthetic construct; identical to SEQ ID NO: 175868
  misc_feature 1..576: note = Description of Artificial Sequence: Synthetic coding sequence
  source 1..576: mol_type = other DNA

SEQ ID NO: 175871 - DNA, 315 bp, synthetic construct
  misc_feature 1..315: note = Description of Artificial Sequence: Synthetic coding sequence
  source 1..315: mol_type = other DNA
atgggcaagcagaacagcaagctggcccctgaggtgatggaggacctggtgaagagcacagagttcaatgaacatgagctgaagcagtggtacaagggcttcctgaaggactgccccagcggccgcctgaacctggaggagttccagcagctgtatgtgaagttcttcccctatggagatgccagcaagtttgcccagcacgccttccgcacctttgacaagaatggagatggcaccatcgacttccgggagttcatctgtgccctgagcatcaccagccggggcagctttgagcagaagctgaactgggcctag

SEQ ID NO: 175872 - DNA, 357 bp, synthetic construct
  misc_feature 1..357: note = Description of Artificial Sequence: Synthetic coding sequence
  source 1..357: mol_type = other DNA
atgggcaagcagaacagcaagctggcccctgaggtgatggaggacctggtgaagagcacagagttcaatgaacatgagctgaagcagtggtacaagggcttcctgaaggactgccccagcggccgcctgaacctggaggagttccagcagctgtatgtgaagttcttcccctatggagatgccagcaagtttgcccagcacgccttccgcacctttgacaagaatggagatggcaccatcgacttccgggagttcatctgtgccctgagcatcaccagccggggcagctttgagcagaagctgaactgggccttcaacatgtatgacctggatggagatggcaagatcaccaggtag

SEQ ID NO: 175873 - DNA, 720 bp, synthetic construct
  misc_feature 1..720: note = Description of Artificial Sequence: Synthetic coding sequence
  source 1..720: mol_type = other DNA
atgacaggccgggacagcctgagtgatggccgcaccagcagccgggccctggtgcctgggggcagcccccggggcagccggccccggggctttgccatcacagacctgctgggcctggaggccgagctgcctgccccagctggccctggccagggcagcggctgtgagggccctgctgtggccccctgccccggccctggcctggatggcagcagcctggcccggggggccctgcccctgggcctgggcctgctgtgtggcttcggcacccagcccccagctgctgcccgggccccctgcctgctgctggctgatgtgcccttcctgcccccccggggccctgagcctgctgcccccctggcccccagcaggcctcctccagccctgggccggcagaagagaagtgacagcgtgtccaccagtgatgaggacagccagagcgaggacagaaatgacctgaaggccagccccaccctgggcaagaggaagaagagaagacacaggacagtgttcaccgcccaccagctggaggagctggagaaggccttcagcgaggcccactacccagatgtgtatgcccgggagatgctggccgtgaagacagagctgcctgaagatcgcatccaggtgtctggagtgcccttcctgcggagcaaggacaccacagaaaatgtgtccttcccccacagcgtgtcccagagcgctgtgcccagcctgtag

SEQ ID NO: 175874 - DNA, 1098 bp, synthetic construct
  misc_feature 1..1098: note = Description of Artificial Sequence: Synthetic coding sequence
  source 1..1098: mol_type = other DNA
atgacaggccgggacagcctgagtgatggccgcaccagcagccgggccctggtgcctgggggcagcccccggggcagccggccccggggctttgccatcacagacctgctgggcctggaggccgagctgcctgccccagctggccctggccagggcagcggctgtgagggccctgctgtggccccctgccccggccctggcctggatggcagcagcctggcccggggggccctgcccctgggcctgggcctgctgtgtggcttcggcacccagcccccagctgctgcccgggccccctgcctgctgctggctgatgtgcccttcctgcccccccggggccctgagcctgctgcccccctggcccccagcaggcctcctccagccctgggccggcagaagagaagtgacagcgtgtccaccagtgatgaggacagccagagcgaggacagaaatgacctgaaggccagccccaccctgggcaagaggaagaagagaagacacaggacagtgttcaccgcccaccagctggaggagctggagaaggccttcagcgaggcccactacccagatgtgtatgcccgggagatgctggccgtgaagacagagctgcctgaagatcgcatccaggtgtggttccagaacagaagagccaagtggaggaagcgggagaagcgctggggcggcagctctgtgatggccgagtatggcctgtatggagccatggtgcgccactgcatccccctgcctgattctgtgctgaacagcgctgagggcggcctgctgggcagctgtgccccctggctgctgggcatgcacaagaagtccatgggcatgatcaggaagccaggcagcgaggacaagctggccggcctgtggggcagtgaccacttcaaggagggcagcagccagagcgagagcggcagccagaggggcagtgacaaggtgtccccagaaaatggcctggaggatgtggccatcgacctgagcagcagcgcccggcaggagaccaagaaggtgcaccctggagctggggcccagggcggcagcaacagcacagccctggagggcccccagcccgggaaggtgggcgccacctag

SEQ ID NO: 175875 - DNA, 432 bp, synthetic construct
  misc_feature 1..432: note = Description of Artificial Sequence: Synthetic coding sequence
  source 1..432: mol_type = other DNA
atgacaggccgggacagcctgagtgatggccgcaccagcagccgggccctggtgcctgggggcagcccccggggcagccggccccggggctttgccatcacagacctgctgggcctggaggccgagctgcctgccccagctggccctggccagggcagcggctgtgagggccctgctgtggccccctgccccggccctggcctggatggcagcagcctggcccggggggccctgcccctgggcctgggcctgctgtgtggcttcggcacccagcccccagctgctgcccgggccccctgcctgctgctggctgatgtgcccttcctgcccccccggggccctgagcctgctgcccccctggcccccagcaggcctcctccagccctgggccggcagaagagaagtgacagcgtgtccaccagcgccatgtag

SEQ ID NO: 175876 - DNA, 843 bp, synthetic construct
  misc_feature 1..843: note = Description of Artificial Sequence: Synthetic coding sequence
  source 1..843: mol_type = other DNA
atgacaggccgggacagcctgagtgatggccgcaccagcagccgggccctggtgcctgggggcagcccccggggcagccggccccggggctttgccatcacagacctgctgggcctggaggccgagctgcctgccccagctggccctggccagggcagcggctgtgagggccctgctgtggccccctgccccggccctggcctggatggcagcagcctggcccggggggccctgcccctgggcctgggcctgctgtgtggcttcggcacccagcccccagctgctgcccgggccccctgcctgctgctggctgatgtgcccttcctgcccccccggggccctgagcctgctgcccccctggcccccagcaggcctcctccagccctgggccggcagaagagaagtgacagcgtgtccaccagtgatgaggacagccagagcgaggacagaaatgacctgaaggccagccccaccctgggcaagaggaagaagagaagacacaggacagtgttcaccgcccaccagctggaggagctggagaaggccttcagcgaggcccactacccagatgtgtatgcccgggagatgctggccgtgaagacagagctgcctgaagatcgcatccaggtgtggttccagaacagaagagccaagtggaggaagcgggagaagcgctggggcggcagctctgtgatggccgagtatggcctgtatggagccatggtgcgccactgcatccccctgcctgattctgtgctgaacagcgctgagggcggcctgctgggcagctgtgccccctggctgctggagggggagaccctgggctgccgggagatgaagtag

SEQ ID NO: 175877 - DNA, 657 bp, synthetic construct
  misc_feature 1..657: note = Description of Artificial Sequence: Synthetic coding sequence
  source 1..657: mol_type = other DNA
atgacaggccgggacagcctgagtgatggccgcaccagcagccgggccctggtgcctgggggcagcccccggggcagccggccccggggctttgccatcacagacctgctgggcctggaggccgagctgcctgccccagctggccctggccagggcagcggctgtgagggccctgctgtggccccctgccccggccctggcctggatggcagcagcctggcccggggggccctgcccctgggcctgggcctgctgtgtggcttcggcacccagcccccagctgctgcccgggccccctgcctgctgctggctgatgtgcccttcctgcccccccggggccctgagcctgctgcccccctggcccccagcaggcctcctccagccctgggccggcagaagagaagtgacagcgtgtccaccagtgatgaggacagccagagcgaggacagaaatgacctgaaggccagccccaccctgggcaagaggaagaagagaagacacaggacagtgttcaccgcccaccagctggaggagctggagaaggccttcagcgaggcccactacccagatgtgtatgcccgggagatgctggccgtgaagacagagctgcctgaagatcgcatccagagggtgcgccactgggccgctgagaagtag

SEQ ID NO: 175878 - DNA, 906 bp, synthetic construct
  misc_feature 1..906: note = Description of Artificial Sequence: Synthetic coding sequence
  source 1..906: mol_type = other DNA
atgacaggccgggacagcctgagtgatggccgcaccagcagccgggccctggtgcctgggggcagcccccggggcagccggccccggggctttgccatcacagacctgctgggcctggaggccgagctgcctgccccagctggccctggccagggcagcggctgtgagggccctgctgtggccccctgccccggccctggcctggatggcagcagcctggcccggggggccctgcccctgggcctgggcctgctgtgtggcttcggcacccagcccccagctgctgcccgggccccctgcctgctgctggctgatgtgcccttcctgcccccccggggccctgagcctgctgcccccctggcccccagcaggcctcctccagccctgggccggcagaagagaagtgacagcgtgtccaccagtgatgaggacagccagagcgaggacagaaatgacctgaaggccagccccaccctgggcaagaggaagaagagaagacacaggacagtgttcaccgcccaccagctggaggagctggagaaggccttcagcgaggcccactacccagatgtgtatgcccgggagatgctggccgtgaagacagagctgcctgaagatcgcatccaggtgtggttccagaacagaagagccaagtggaggaagcgggagaagcgctggggcggcagctctgtgatggccgagtatggcctgtatggagccatggtgcgccactgcatccccctgcctgattctgtgctgaacagcgctgagggcggcctgctgggcagctgtgccccctggctgctggtgcagaccagcgcccctgggggcagccgcagcctggactttgctggggacacccaggccccccagaccccctggtggtgcctgatgaccttctcctag

SEQ ID NO: 175879 - DNA, 711 bp, synthetic construct
  misc_feature 1..711: note = Description of Artificial Sequence: Synthetic coding sequence
  source 1..711: mol_type = other DNA
atgacaggccgggacagcctgagtgatggccgcaccagcagccgggccctggtgcctgggggcagcccccggggcagccggccccggggctttgccatcacagacctgctgggcctggaggccgagctgcctgccccagctggccctggccagggcagcggctgtgagggccctgctgtggccccctgccccggccctggcctggatggcagcagcctggcccggggggccctgcccctgggcctgggcctgctgtgtggcttcggcacccagcccccagctgctgcccgggccccctgcctgctgctggctgatgtgcccttcctgcccccccggggccctgagcctgctgcccccctggcccccagcaggcctcctccagccctgggccggcagaagagaagtgacagcgtgtccaccagtgatgaggacagccagagcgaggacagaaatgacctgaaggccagccccaccctgggcaagaggaagaagagaagacacaggacagtgttcaccgcccaccagctggaggagctggagaaggccttcagcgaggcccactacccagatgtgtatgcccgggagatgctggccgtgaagacagagctgcctgaagatcgcatccagtgcaagctgctgctgctggaggcccctgtgcactggaccctgcaggagacccaccggctgccccggccccggggcggggcctag

SEQ ID NO: 175880 - DNA, 1110 bp, synthetic construct
  misc_feature 1..1110: note = Description of Artificial Sequence: Synthetic coding sequence
  source 1..1110: mol_type = other DNA
atgagggcctgcatcagcctggtgctggccgtgctgtgtggcctggcctgggccgaggaccacaaggagagcgagcccctgccccagctggaggaggagacagaggaggccctggccagcaacctgtacagcgcccccaccagctgccagggccgctgctatgaggcctttgacaagcaccaccagtgccactgcaatgcccgctgccaggagtttggaaactgctgcaaggactttgagagcctgtgcagcgaccacgaggtgagccacagcagtgatgccatcaccaaggaggagatccagagcatcagcgagaagatctacagagctgacaccaacaaggcccagaaggaggacatcgtgctgaacagccagaactgcatcagccccagcgagaccaggaaccaggtggaccgctgccccaagcccctcttcacctacgtgaatgagaagctgttcagcaagcccacctatgctgccttcatcaacctgctgaacaactaccagagggccaccggccacggggagcacttcagcgcccaggagctggccgagcaggatgccttcctgcgggagatcatgaagacagctgtgatgaaggagctgtacagcttcctgcaccaccagaacagatatggcagcgagcaggagtttgtggatgacctgaagaacatgtggtttggcctgtacagcagaggaaatgaggagggggacagcagcggctttgagcacgtgttttctggagaggtgaagaagggcaaggtgacaggcttccacaactggatccgcttctacctggaggagaaggagggcctggtggactactacagccacatctatgatggcccctgggacagctacccagatgtgctggccatgcagttcaactgggatggctactacaaggaggtgggcagcgccttcatcggcagcagccctgagtttgaatttgccctgtacagcctgtgcttcatcgcccggcctgggaaggtgtgccagctgagcctgggcggctaccccctggccgtgaggacctacacctgggacaagagcacctatggaaatggcaagaagtacatcgccacagcctacatcgtgagcagcacctag

SEQ ID NO: 175881 - DNA, 1284 bp, synthetic construct; identical to SEQ ID NO: 152896
  misc_feature 1..1284: note = Description of Artificial Sequence: Synthetic coding sequence
  source 1..1284: mol_type = other DNA

SEQ ID NO: 175882 - DNA, 1188 bp, synthetic construct
  misc_feature 1..1188: note = Description of Artificial Sequence: Synthetic coding sequence
  source 1..1188: mol_type = other DNA
atgtccatggagcacgccgccctgacagccactggagctgggggctcctggaggtccatgaagaggaaggccctcttcacctgccccttcaatggagactgccgcatcaccaaggacaacagaagacactgccaggcctgccgcctgaagagatgtgtggacatcggcatgatgaaggagttcatcctgacagatgaggaggtgcagaggaagcgggagatgatcctgaagaggaaggaggaggaggccctgaaggacagcctgcggcccaagctgtctgaggagcagcagaggatcatcgccatcctgctggatgcccaccacaagacctatgaccccacctacagcgacttctgccagttccggccccctgtgcgggtgaatgatggcggcggcagccaccccagccggcccaacagccgccacacccccagcttcagcggggacagcagcagcagctgcagcgaccactgcatcaccagcagtgacatgatggacagcagcagcttcagcaacctggacctgtctgaggaggacagtgatgaccccagcgtgaccctggagctgagccagctgtccatgctgccccacctggccgacctggtgtcctacagcatccagaaggtgattggatttgccaagatgatccctggcttccgggacctgaccagcgaggaccagatcgtgctgctgaagagcagcgccatcgaggtgatcatgctgcggagcaatgaaagcttcaccatggatgacatgtcctggacctgtggcaaccaggactacaagtacagagtgtctgatgtgaccaaggccggccacagcctggagctgattgagcccctcatcaagttccaggtgggcctgaagaagctgaacctgcacgaggaggagcacgtgctgctgatggccatctgcatcgtgtccccagacaggcctggggtgcaggatgctgccctgattgaggccatccaggaccggctgagcaacaccctgcagacctacatccgctgccgccaccccccacctggcagccacctgctgtatgccaagatgatccagaagctggccgacctgcggagcctgaatgaggagcacagcaagcagtaccgctgcctgtccttccagccagaatgttccatgaagctgacccccctggtgctggaggtgtttggaaatgagatctcctag

SEQ ID NO: 175883 - DNA, 753 bp, synthetic construct
  misc_feature 1..753: note = Description of Artificial Sequence: Synthetic coding sequence
  source 1..753: mol_type = other DNA
atggaggccatggccgccagcaccagcctgcctgaccccggggactttgacagaaatgtgccccgcatctgtggggtgtgtggggaccgggccaccggcttccacttcaatgccatgacctgtgagggctgcaagggcttcttcagaagatccatgaagaggaaggccctcttcacctgccccttcaatggagactgccgcatcaccaaggacaacagaagacactgccaggcctgccgcctgaagagatgtgtggacatcggcatgatgaaggagttcatcctgacagatgaggaggtgcagaggaagcgggagatgatcctgaagaggaaggaggaggaggccctgaaggacagcctgcggcccaagctgtctgaggagcagcagaggatcatcgccatcctgctggatgcccaccacaagacctatgaccccacctacagcgacttctgccagttccggccccctgtgcgggtgaatgatggcggcggcagccaccccagccggcccaacagccgccacacccccagcttcagcggggacagcagcagcagctgcagcgaccactgcatcaccagcagtgacatgatggacagcagcagcttcagcaacctggacctgtctgaggaggacagtgatgaccccagcgtgaccctggagctgagccagctgtccatgctgccccacctggccgacctggtgtcctacagcatccagaaggtgattggatttgccaagatgatccctggatag

SEQ ID NO: 175884 - DNA, 306 bp, synthetic construct
  misc_feature 1..306: note = Description of Artificial Sequence: Synthetic coding sequence
  source 1..306: mol_type = other DNA
atggaggccatggccgccagcaccagcctgcctgaccccggggactttgacagaaatgtgccccgcatctgtggggtgtgtggggaccgggccaccggcttccacttcaatgccatgacctgtgagggctgcaagggcttcttcagaagatccatgaagaggaaggccctcttcacctgccccttcaatggagactgccgcatcaccaaggacaacagaagacactgccaggcctgccgcctgaagagatgtgtggacatcggcatgatgaaggagttcatcctgacagatgaggaggtgcagtag

SEQ ID NO: 175885 - DNA, 1284 bp, synthetic construct; identical to SEQ ID NO: 152896
  misc_feature 1..1284: note = Description of Artificial Sequence: Synthetic coding sequence
  source 1..1284: mol_type = other DNA

SEQ ID NO: 175886 - DNA, 321 bp, synthetic construct
  misc_feature 1..321: note = Description of Artificial Sequence: Synthetic coding sequence
  source 1..321: mol_type = other DNA
atggaggccatggccgccagcaccagcctgcctgaccccggggactttgacagaaatgtgccccgcatctgtggggtgtgtggggaccgggccaccggcttccacttcaatgccatgacctgtgagggctgcaagggcttcttcagaagatccatgaagaggaaggccctcttcacctgccccttcaatggagactgccgcatcaccaaggacaacagaagacactgccaggcctgccgcctgaagagatgtgtggacatcggcatgatgaaggagttcatcctgacagatgaggaggtgcagaggaagcgggagatgtag

SEQ ID NO: 175887 - DNA, 1434 bp, synthetic construct
  misc_feature 1..1434: note = Description of Artificial Sequence: Synthetic coding sequence
  source 1..1434: mol_type = other DNA
atggagtggaggaacaagaagagaagtgactggctgtccatggtgctgaggacagctggggtggaggaggcctttggaagtgaggtgtctgtgcggccccacagaagagcccccctgggcagcacctacctgcccccagcccccagcggcatggaggccatggccgccagcaccagcctgcctgaccccggggactttgacagaaatgtgccccgcatctgtggggtgtgtggggaccgggccaccggcttccacttcaatgccatgacctgtgagggctgcaagggcttcttcagaagatccatgaagaggaaggccctcttcacctgccccttcaatggagactgccgcatcaccaaggacaacagaagacactgccaggcctgccgcctgaagagatgtgtggacatcggcatgatgaaggagttcatcctgacagatgaggaggtgcagaggaagcgggagatgatcctgaagaggaaggaggaggaggccctgaaggacagcctgcggcccaagctgtctgaggagcagcagaggatcatcgccatcctgctggatgcccaccacaagacctatgaccccacctacagcgacttctgccagttccggccccctgtgcgggtgaatgatggcggcggcagccaccccagccggcccaacagccgccacacccccagcttcagcggggacagcagcagcagctgcagcgaccactgcatcaccagcagtgacatgatggacagcagcagcttcagcaacctggacctgtctgaggaggacagtgatgaccccagcgtgaccctggagctgagccagctgtccatgctgccccacctggccgacctggtgtcctacagcatccagaaggtgattggatttgccaagatgatccctggcttccgggacctgaccagcgaggaccagatcgtgctgctgaagagcagcgccatcgaggtgatcatgctgcggagcaatgaaagcttcaccatggatgacatgtcctggacctgtggcaaccaggactacaagtacagagtgtctgatgtgaccaaggccggccacagcctggagctgattgagcccctcatcaagttccaggtgggcctgaagaagctgaacctgcacgaggaggagcacgtgctgctgatggccatctgcatcgtgtccccagacaggcctggggtgcaggatgctgccctgattgaggccatccaggaccggctgagcaacaccctgcagacctacatccgctgccgccaccccccacctggcagccacctgctgtatgccaagatgatccagaagctggccgacctgcggagcctgaatgaggagcacagcaagcagtaccgctgcctgtccttccagccagaatgttccatgaagctgacccccctggtgctggaggtgtttggaaatgagatctcctag

SEQ ID NO: 175888 - DNA, 279 bp, synthetic construct
  misc_feature 1..279: note = Description of Artificial Sequence: Synthetic coding sequence
  source 1..279: mol_type = other DNA
atgggcagcacctggggcagccctggctgggtgcggctggccctgtgcctgaccggcctggtgctgagcctgtatgccctgcacgtgaaggccgcccgggcccgggaccgggactaccgggccctgtgtgatgtgggcacagccatcagctgcagcagggtcttcagcagccggctgcctgctgacaccctgggcctgtgcccagatgctgctgagctgcccggggtgagccgctggttctgcctgcccggcctggaccctgtgctgcgggccctgtag

SEQ ID NO: 175889 - DNA, 492 bp, synthetic construct
  misc_feature 1..492: note = Description of Artificial Sequence: Synthetic coding sequence
  source 1..492: mol_type = other DNA
atgggcagcacctggggcagccctggctgggtgcggctggccctgtgcctgaccggcctggtgctgagcctgtatgccctgcacgtgaaggccgcccgggcccgggaccgggactaccgggccctgtgtgatgtgggcacagccatcagctgcagcagggtcttcagcagccgctggggccggggcttcggcctggtggagcacgtgctgggccaggacagcatcctgaaccagagcaacagcatcttcggctgcatcttctacaccctgcagctgctgctgggctgcctgcggacccgctgggcctctgtgctgatgctgctgagcagcctggtgtccctggccggctctgtgtacctggcctggatcctcttctttgtgctgtatgacttctgcatcgtgtgcatcaccacctacgccatcaacgtgtccctgatgtggctgtccttcaggaaggtgcaggagccccagggcaaggccaagaggcactag

SEQ ID NO: 175890 - DNA, 5823 bp, synthetic construct; identical to SEQ ID NO: 160770
  misc_feature 1..5823: note = Description of Artificial Sequence: Synthetic coding sequence
  source 1..5823: mol_type = other DNA

SEQ ID NO: 175891 - DNA, 357 bp, synthetic construct
  misc_feature 1..357: note = Description of Artificial Sequence: Synthetic coding sequence
  source 1..357: mol_type = other DNA
atggcccccctgcggcccctgctgatcctggccctgctggcctgggtggccctggccgaccaggagagctgcaagggccgctgcacagagggcttcaacgtggacaagaagtgccagtgtgatgagctgtgcagctactaccagagctgctgcacagactacacagctgagtgcaagccccaggtgaccagaggagatgtgttcaccatgccagaagatgagtacacagtgtatgatgatggagaggagaagaacaatgccaccgtgcatgagcaggtgggcggccccagcctgaccagtgacctgcaggcccagagcaaaggaaatcctgagcagacccctgtgctgaagccctag

SEQ ID NO: 175892 - DNA, 495 bp, synthetic construct
  misc_feature 1..495: note = Description of Artificial Sequence: Synthetic coding sequence
  source 1..495: mol_type = other DNA
atgtctgtggaccccctgagcagcaaggccctgaagatcaagcgggagctgtctgagaacaccccccacctgagtgatgaggccctgatgggcctgtctgtgcgggagctgaacagacacctgcggggcctgtctgctgaggaggtgacccggctgaagcagaggaggaggaccctgaagaacagaggctatgctgccagctgccgggtgaagagggtgtgccagaaggaggagctgcagaagcagaagtctgagctggagcgggaggtggacaagctggcccgggagaatgctgccatgaggctggagctggatgccctgcggggcaaatgtgaggccctgcagggctttgcccggtctgtggccgccgcccggggccctgccaccctggtggccccagccagcgtcatcaccatcgtgaagagcaccccaggcagcggcagcggccctgcccacggccctgaccctgcccacggccctgccagctgcagctag

SEQ ID NO: 175893 - DNA, 495 bp, synthetic construct; identical to SEQ ID NO: 175892
  misc_feature 1..495: note = Description of Artificial Sequence: Synthetic coding sequence
  source 1..495: mol_type = other DNA

SEQ ID NO: 175894 - DNA, 381 bp, synthetic construct
  misc_feature 1..381: note = Description of Artificial Sequence: Synthetic coding sequence
  source 1..381: mol_type = other DNA
atgtctgtggaccccctgagcagcaaggccctgaagatcaagcgggagctgtctgagaacaccccccacctgagtgatgaggccctgatgggcctgtctgtgcgggagctgaacagacacctgcggggcctgtctgctgaggaggtgacccggctgaagcagaggaggaggaccctgaagaacagaggctatgctgccagctgccgggtgaagagggtgtgccagaaggaggagctgcagaagcagaagtctgagctggagcgggaggtggacaagctggcccgggagaatgctgccatgaggctggagctggatgccctgcggggcaaatgtgaggccctgcagggctttgcccggtctgtggccgccgcccggggctag

SEQ ID NO: 175895 - DNA, 495 bp, synthetic construct; identical to SEQ ID NO: 175892
  misc_feature 1..495: note = Description of Artificial Sequence: Synthetic coding sequence
  source 1..495: mol_type = other DNA

SEQ ID NO: 175896 - DNA, 282 bp, synthetic construct
  misc_feature 1..282: note = Description of Artificial Sequence: Synthetic coding sequence
  source 1..282: mol_type = other DNA
atgggcctgtctgtgcgggagctgaacagacacctgcggggcctgtctgctgaggaggtgacccggctgaagcagaggaggaggaccctgaagaacagaggctacgccgccagctgccgggtgaagagggtgtgccagaaggaggagctgcagaagcagaagtctgagctggagcgggaggtggacaagctggccagagaaaatgctgccatgaggctggagctggatgccctgcggggcaaatgtgaggccctgcagggctttgcccggtctgtggcctag

SEQ ID NO: 175897 - DNA, 495 bp, synthetic construct; identical to SEQ ID NO: 175892
  misc_feature 1..495: note = Description of Artificial Sequence: Synthetic coding sequence
  source 1..495: mol_type = other DNA

SEQ ID NO: 175898 - DNA, 408 bp, synthetic construct
  misc_feature 1..408: note = Description of Artificial Sequence: Synthetic coding sequence
  source 1..408: mol_type = other DNA
atgggcctgtctgtgcgggagctgaacagacacctgcggggcctgtctgctgaggaggtgacccggctgaagcagaggaggaggaccctgaagaacagaggctacgccgccagctgccgggtgaagagggtgtgccagaaggaggagctgcagaagcagaagtctgagctggagcgggaggtggacaagctggccagagaaaatgctgccatgaggctggagctggatgccctgcggggcaaatgtgaggccctgcagggctttgcccggtctgtggccgccgcccggggccctgccaccctggtggccccagccagcgtcatcaccatcgtgaagagcaccccaggcagcggcagcggccctgcccacggccctgaccctgcccacggccctgccagctgcagctag

SEQ ID NO: 175899 - DNA, 489 bp, synthetic construct
  misc_feature 1..489: note = Description of Artificial Sequence: Synthetic coding sequence
  source 1..489: mol_type = other DNA
atgaccacccccaacaagggcaacaaggccctgaaggtgaagcgggagcctggagaaaatggcaccagcctgacagatgaggagctggtgaccatgtctgtgcgggagctgaaccagcacctgcggggcctgagcaaggaggagatcgtgcagctgaagcagaggaggaggaccctgaagaacagaggctatgctgccagctgccgggtgaagagggtgacccagaaggaggagctggagaagcagaaggccgagctgcagcaggaggtggagaagctggcctctgaaaatgcctccatgaagctggagctggatgccctgcggagcaaatatgaggccctgcagacctttgccaggacagtggcccggagccctgtggccccagcccggggccccctggccgccggcctgggccccctggtgcctgggaaggtggccgccaccagcgtcatcaccatcgtgaagagcaagacagatgcccggagctag

SEQ ID NO: 175900 - DNA, 489 bp, synthetic construct; identical to SEQ ID NO: 175899
  misc_feature 1..489: note = Description of Artificial Sequence: Synthetic coding sequence
  source 1..489: mol_type = other DNA

SEQ ID NO: 175901 - DNA, 471 bp, synthetic construct
  misc_feature 1..471: note = Description of Artificial Sequence: Synthetic coding sequence
  source 1..471: mol_type = other DNA
atgaccaccaaccccaagcccaacaaggccctgaaggtgaagaaggaggccggagaaaatgcccctgtgctgagtgatgatgagctggtgtccatgtctgtgcgggagctgaaccagcacctgcggggcctgaccaaggaggaggtgacccggctgaagcagaggaggaggaccctgaagaacagaggctatgctgccagctgccgcatcaagagggtgacccagaaggaggagctggagcggcagagggtggagctgcagcaggaggtggagaagctggcccgggagaacagctccatgaggctggagctggatgccctgcggagcaaatatgaggccctgcagacctttgccaggacagtggcccggggccctgtggcccccagcaaggtggccaccaccagcgtcatcaccatcgtgaagagcacagagctgagcagcacctctgtgcccttctctgctgccagctag

SEQ ID NO: 175902 - DNA, 471 bp, synthetic construct; identical to SEQ ID NO: 175901
  misc_feature 1..471: note = Description of Artificial Sequence: Synthetic coding sequence
  source 1..471: mol_type = other DNA

SEQ ID NO: 175903 - DNA, 471 bp, synthetic construct; identical to SEQ ID NO: 175901
  misc_feature 1..471: note = Description of Artificial Sequence: Synthetic coding sequence
  source 1..471: mol_type = other DNA

SEQ ID NO: 175904 - DNA, 1041 bp, synthetic construct
  misc_feature 1..1041: note = Description of Artificial Sequence: Synthetic coding sequence
  source 1..1041: mol_type = other DNA
atgcccagccccctggccctgcggccctacctgcggtctgagttcagccccagcgtggatgcccggccctgcagcagccccagcgagctgcctgccaagctgctgctgggcgccaccctgccccgggccccccggctgccccggcggctggcctggtgcagcattgactgggagcaggtgtgcctgctgcagaggctgggcgctgggggctttggatctgtgtacaaggccacctacagaggagtgcctgtggccatcaagcaggtgaacaagtgcaccaagaaccggctggccagccgccgctccttctgggccgagctgaatgtggcccggctgcggcatgacaacatcgtgcgggtggtggccgccagcaccaggaccccagctggcagcaacagcctgggcaccatcatcatggagtttggaggaaatgtgaccctgcaccaggtgatctacggggctgctggccacccagaaggagatgctggggagccccactgcaggactggaggccagctgagcctgggcaagtgcctgaagtacagcctggatgtggtgaatggcctgctcttcctgcacagccagagcatcgtgcacctggacctgaagccagccaacatcctgatcagcgagcaggatgtgtgcaagatcagtgactttggctgcagcgagaagctggaggacctgctgtgcttccagacccccagctaccccctgggcggcacctacacccaccgggcccctgagctgctgaagggggagggcgtgacccccaaggctgacatctacagctttgccatcaccctgtggcagatgaccaccaagcaggccccctacagcggggagcggcagcacatcctgtatgctgtggtggcctatgacctgcggcccagcctgtctgctgctgtgtttgaggacagcctgcccggccagaggctgggagatgtgatccagcgctgctggaggcccagcgctgcccagaggcccagcgcccggctgctgctggtggacctgaccagcctgaaggccgagctgggctag

SEQ ID NO: 175905 - DNA, 1839 bp, synthetic construct
  misc_feature 1..1839: note = Description of Artificial Sequence: Synthetic coding sequence
  source 1..1839: mol_type = other DNA
atggcccggcggcccaggcacagcatctacagcagtgatgaagatgatgaagattttgagatgtgtgaccatgactatgatggcctgctgcccaagagcggcaagaggcacctgggcaagacccgctggacccgggaggaggatgagaagctgaagaagctggtggagcagaatggaacagatgactggaaggtgattgccaactacctgcccaacagaacagatgtgcagtgccagcaccgctggcagaaggtgctgaaccctgagctgatcaagggcccctggaccaaggaggaggaccagagggtcatcgagctggtgcagaagtatggccccaagcgctggagcgtcatcgccaagcacctgaagggccgcatcggcaagcagtgccgggagcgctggcacaaccacctgaaccctgaggtgaagaagacctcctggacagaggaggaggaccgcatcatctaccaggcccacaagaggctgggcaaccgctgggccgagatcgccaagctgctgcccggccgcacagacaatgccatcaagaaccactggaacagcaccatgaggaggaaggtggagcaggagggctacctgcaggagagcagcaaggccagccagcctgctgtggccaccagcttccagaagaacagccacctgatgggctttgcccaggccccacccacagcccagctgcctgccaccggccagcccaccgtgaacaatgactacagctactaccacatcagcgaggcccagaatgtgagcagccacgtgccctaccctgtggccctgcacgtgaacatcgtgaatgtgccccagcctgctgctgctgccatccagaggcactacaatgatgaagatcctgagaaggagaagaggatcaaggagctggagctgctgctgatgagcacagaaaatgagctgaagggccagcaggtgctgcccacccagaaccacacctgcagctacccaggctggcacagcaccaccatcgctgaccacacccggccccatggagacagcgcccctgtgtcctgcctgggggagcaccacagcacccccagcctgcctgctgaccccggcagcctgcctgaggagagcgccagccctgcccgctgcatgattgtgcaccagggcaccatcctggacaacgtgaagaacctgctggagtttgctgagaccctgcagttcatcgacagcttcctgaacaccagcagcaaccacgagaacagcgacctggagatgcccagcctgaccagcacccccctgattggccacaagctgactgtgaccacccccttccaccgggaccagacagtgaagacccagaaggagaacacagtgttccgcaccccagccatcaagaggagcatcctggagagcagccccaggacccccacccccttcaagcacgccctggccgcccaggagatcaagtatggccccctgaagatgctgccccagacccccagccacctggtggaggacctgcaggacgtcatcaagcaggagagtgatgaaagtggcatcgtggccgagttccaggagaatggcccccccctgctgaagaagatcaagcaggaggtggagagccccacagacaagagcggcaacttcttctgcagccaccactgggagggggacagcctgaacacccagctgttcacccagaccagccctgtggctgatgcccccaacatcctgaccagctctgtgctgatggccccagcctctgaagatgaggacaacgtgctgaaggccttcaccgtgcccaagaacagaagcctggccagccccctgcaggccaccaaggcccagaggctcttccagttctag

SEQ ID NO: 175906 - DNA, 2181 bp, synthetic construct
  misc_feature 1..2181: note = Description of Artificial Sequence: Synthetic coding sequence
  source 1..2181: mol_type = other DNA
atggcccggcggcccaggcacagcatctacagcagtgatgaagatgatgaagattttgagatgtgtgaccatgactatgatggcctgctgcccaagagcggcaagaggcacctgggcaagacccgctggacccgggaggaggatgagaagctgaagaagctggtggagcagaatggaacagatgactggaaggtgattgccaactacctgcccaacagaacagatgtgcagtgccagcaccgctggcagaaggtgctgaaccctgagctgatcaagggcccctggaccaaggaggaggaccagagggtcatcgagctggtgcagaagtatggccccaagcgctggagcgtcatcgccaagcacctgaagggccgcatcggcaagcagtgccgggagcgctggcacaaccacctgaaccctgaggtgaagaagacctcctggacagaggaggaggaccgcatcatctaccaggcccacaagaggctgggcaaccgctgggccgagatcgccaagctgctgcccggccgcacagacaatgccatcaagaaccactggaacagcaccatgaggaggaaggtggagcaggagggctacctgcaggagagcagcaaggccagccagcctgctgtggccaccagcttccagaagaacagccacctgatgggctttgcccaggccccacccacagcccagctgcctgccaccggccagcccaccgtgaacaatgactacagctactaccacatcagcgaggcccagaatgtgagcagccacgtgccctaccctgtggccctgcacgtgaacatcgtgaatgtgccccagcctgctgctgctgccatccagaggcactacaatgatgaagatcctgagaaggagaagaggatcaaggagctggagctgctgctgatgagcacagaaaatgagctgaagggccagcaggtgctgcccacccagaaccacacctgcagctacccaggctggcacagcaccaccatcgctgaccacacccggccccatggagacagcgcccctgtgtcctgcctgggggagcaccacagcacccccagcctgcctgctgaccccggcagcctgcctgaggagagcgccagccctgcccgctgcatgattgtgcaccagggcaccatcctggacaacgtgaagaacctgctggagtttgctgagaccctgcagttcatcgacagcttcctgaacaccagcagcaaccacgagaacagcgacctggagatgcccagcctgaccagcacccccctgattggccacaagctgactgtgaccacccccttccaccgggaccagacagtgaagacccagaaggagaacacagtgttccgcaccccagccatcaagaggagcatcctggagagcagccccaggacccccacccccttcaagcacgccctggccgcccaggagatcaagtatggccccctgaagatgctgccccagacccccagccacctggtggaggacctgcaggacgtcatcaagcaggagagtgatgaaagtggcatcgtggccgagttccaggagaatggcccccccctgctgaagaagatcaagcaggaggtggagagccccacagacaagagcggcaacttcttctgcagccaccactgggagggggacagcctgaacacccagctgttcacccagaccagccctgtggctgatgcccccactggagtgcagtggcatgactttggcagcctgcagcccctgcccccaggcttcaagcgcttcagctgcctgagcctgcccaggtcctgggactaccgccaccccccacccaggcctgccaactttgagttcctggtggagaccggcttcctgcacgtgggccaggccggcctggagctgctgaccagcggggacctgcctgccagcgccagccagagcgcccgcatcactggagtgagccaccgggcccggccagacaacatcctgaccagctctgtgctgatggccccagcctctgaagatgaggacaacgtgctgaaggccttcaccgtgcccaagaacagaagcctggccagccccctgcagccctgcagcagcacctgggagcccgccagctgtgggaagatggaggagcagatgaccagcagcagccaggccaggaaatatgtgaatgccttcagcgcccggaccctggtgatgtag

SEQ ID NO: 175907 - DNA, 2286 bp, synthetic construct
  misc_feature 1..2286: note = Description of Artificial Sequence: Synthetic coding sequence
  source 1..2286: mol_type = other DNA
atggcccggcggcccaggcacagcatctacagcagtgatgaagatgatgaagattttgagatgtgtgaccatgactatgatggcctgctgcccaagagcggcaagaggcacctgggcaagacccgctggacccgggaggaggatgagaagctgaagaagctggtggagcagaatggaacagatgactggaaggtgattgccaactacctgcccaacagaacagatgtgcagtgccagcaccgctggcagaaggtgctgaaccctgagctgatcaagggcccctggaccaaggaggaggaccagagggtcatcgagctggtgcagaagtatggccccaagcgctggagcgtcatcgccaagcacctgaagggccgcatcggcaagcagtgccgggagcgctggcacaaccacctgaaccctgaggtgaagaagacctcctggacagaggaggaggaccgcatcatctaccaggcccacaagaggctgggcaaccgctgggccgagatcgccaagctgctgcccggccgcacagacaatgccatcaagaaccactggaacagcaccatgaggaggaaggtggagcaggagggctacctgcaggagagcagcaaggccagccagcctgctgtggccaccagcttccagaagaacagccacctgatgggctttgcccaggccccacccacagcccagctgcctgccaccggccagcccaccgtgaacaatgactacagctactaccacatcagcgaggcccagaatgtgagcagccacgtgccctaccctgtggccctgcacgtgaacatcgtgaatgtgccccagcctgctgctgctgccatccagaggcactacaatgatgaagatcctgagaaggagaagaggatcaaggagctggagctgctgctgatgagcacagaaaatgagctgaagggccagcaggtgctgcccacccagaaccacacctgcagctacccaggctggcacagcaccaccatcgctgaccacacccggccccatggagacagcgcccctgtgtcctgcctgggggagcaccacagcacccccagcctgcctgctgaccccggcagcctgcctgaggagagcgccagccctgcccgctgcatgattgtgcaccagggcaccatcctggacaacgtgaagaacctgctggagtttgctgagaccctgcagttcatcgacagcgacagcagctcctggtgtgacctgagcagctttgagttctttgaggaggccgacttcagccccagccagcaccacacaggcaaggccctgcagctgcagcagcgggagggcaatggcaccaagccagctggggagcccagcccccgggtgaacaagaggatgctgtctgagagcagcctggacccccccaaggtgctgcccccagcccggcacagcaccatccccctggtgatcctgaggaagaagaggggccaggccagccccctggccaccggggactgcagcagcttcatctttgctgatgtgagcagcagcacccccaagaggagccctgtgaagagcctgcccttcagccccagccagttcctgaacaccagcagcaaccatgaaaattctgacctggagatgcccagcctgaccagcacccccctcatcggccacaagctgactgtgaccacccccttccaccgggaccagacagtgaagacccagaaggaaaatacagtgttccgcaccccagccatcaagaggagcatcctggagagcagccccaggacccccacccccttcaagcacgccctggccgcccaggagatcaagtatggccccctgaagatgctgccccagacccccagccacctggtggaggacctgcaggatgtgatcaagcaggagagtgatgagagcggcatcgtggccgagttccaggagaatggaccacccctgctgaagaagatcaagcaggaggtggagagccccacagacaagagcggcaacttcttctgcagccaccactgggagggggacagcctgaacacccagctgttcacccagaccagccctgtggctgatgcccccaacatcctgaccagctctgtgctgatggccccagcctctgaagatgaagataatgtgctgaaggccttcaccgtgcccaagaacagaagcctggccagccccctgcagccctgcagcagcacctgggagcccgccagctgtgggaagatggaggagcagatgaccagcagcagccaggccaggaaatatgtgaatgccttcagcgcccggaccctggtgatgtag

SEQ ID NO: 175908 - DNA, 1923 bp, synthetic construct
  misc_feature 1..1923: note = Description of Artificial Sequence: Synthetic coding sequence
  source 1..1923: mol_type = other DNA
atggcccggcggcccaggcacagcatctacagcagtgatgaagatgatgaagattttgagatgtgtgaccatgactatgatggcctgctgcccaagagcggcaagaggcacctgggcaagacccgctggacccgggaggaggatgagaagctgaagaagctggtggagcagaatggaacagatgactggaaggtgattgccaactacctgcccaacagaacagatgtgcagtgccagcaccgctggcagaaggtgctgaaccctgagctgatcaagggcccctggaccaaggaggaggaccagagggtcatcgagctggtgcagaagtatggccccaagcgctggagcgtcatcgccaagcacctgaagggccgcatcggcaagcagtgccgggagcgctggcacaaccacctgaaccctgaggtgaagaagacctcctggacagaggaggaggaccgcatcatctaccaggcccacaagaggctgggcaaccgctgggccgagatcgccaagctgctgcccggccgcacagacaatgccatcaagaaccactggaacagcaccatgaggaggaaggtggagcaggagggctacctgcaggagagcagcaaggccagccagcctgctgtggccaccagcttccagaagaacagccacctgatgggctttgcccaggccccacccacagcccagctgcctgccaccggccagcccaccgtgaacaatgactacagctactaccacatcagcgaggcccagaatgtgagcagccacgtgccctaccctgtggccctgcacgtgaacatcgtgaatgtgccccagcctgctgctgctgccatccagaggcactacaatgatgaagatcctgagaaggagaagaggatcaaggagctggagctgctgctgatgagcacagaaaatgagctgaagggccagcaggtgctgcccacccagaaccacacctgcagctacccaggctggcacagcaccaccatcgctgaccacacccggccccatggagacagcgcccctgtgtcctgcctgggggagcaccacagcacccccagcctgcctgctgaccccggcagcctgcctgaggagagcgccagccctgcccgctgcatgattgtgcaccagggcaccatcctggacaacgtgaagaacctgctggagtttgctgagaccctgcagttcatcgacagcttcctgaacaccagcagcaaccacgagaacagcgacctggagatgcccagcctgaccagcacccccctgattggccacaagctgactgtgaccacccccttccaccgggaccagacagtgaagacccagaaggagaacacagtgttccgcaccccagccatcaagaggagcatcctggagagcagccccaggacccccacccccttcaagcacgccctggccgcccaggagatcaagtatggccccctgaagatgctgccccagacccccagccacctggtggaggacctgcaggacgtcatcaagcaggagagtgatgaaagtggcatcgtggccgagttccaggagaatggcccccccctgctgaagaagatcaagcaggaggtggagagccccacagacaagagcggcaacttcttctgcagccaccactgggagggggacagcctgaacacccagctgttcacccagaccagccctgtggctgatgcccccaacatcctgaccagctctgtgctgatggccccagcctctgaagatgaggacaacgtgctgaaggccttcaccgtgcccaagaacagaagcctggccagccccctgcagccctgcagcagcacctgggagcccgccagctgtgggaagatggaggagcagatgaccagcagcagccaggccaggaaatatgtgaatgccttcagcgcccggaccctggtgatgtag

SEQ ID NO: 175909 - DNA, 1914 bp, synthetic construct
  misc_feature 1..1914: note = Description of Artificial Sequence: Synthetic coding sequence
  source 1..1914: mol_type = other DNA
atggcccggcggcccaggcacagcatctacagcagtgatgaagatgatgaagattttgagatgtgtgaccatgactatgatggcctgctgcccaagagcggcaagaggcacctgggcaagacccgctggacccgggaggaggatgagaagctgaagaagctggtggagcagaatggaacagatgactggaaggtgattgccaactacctgcccaacagaacagatgtgcagtgccagcaccgctggcagaaggtgctgaaccctgagctgatcaagggcccctggaccaaggaggaggaccagagggtcatcgagctggtgcagaagtatggccccaagcgctggagcgtcatcgccaagcacctgaagggccgcatcggcaagcagtgccgggagcgctggcacaaccacctgaaccctgaggtgaagaagacctcctggacagaggaggaggaccgcatcatctaccaggcccacaagaggctgggcaaccgctgggccgagatcgccaagctgctgcccggccgcacagacaatgccatcaagaaccactggaacagcaccatgaggaggaaggtggagcaggagggctacctgcaggagagcagcaaggccagccagcctgctgtggccaccagcttccagaagaacagccacctgatgggctttgcccaggccccacccacagcccagctgcctgccaccggccagcccaccgtgaacaatgactacagctactaccacatcagcgaggcccagaatgtgagcagccacgtgccctaccctgtggccctgcacgtgaacatcgtgaatgtgccccagcctgctgctgctgccatccagaggcactacaatgatgaagatcctgagaaggagaagaggatcaaggagctggagctgctgctgatgagcacagaaaatgagctgaagggccagcagacccagaaccacacctgcagctacccaggctggcacagcaccaccatcgctgaccacacccggccccacggggacagcgcccctgtgtcctgcctgggggagcaccacagcacccccagcctgcctgctgaccccggcagcctgcctgaggagagcgccagccctgcccgctgcatgattgtgcaccagggcaccatcctggacaacgtgaagaacctgctggagtttgctgagaccctgcagttcatcgacagcttcctgaacaccagcagcaaccatgaaaattctgacctggagatgcccagcctgaccagcacccccctcatcggccacaagctgactgtgaccacccccttccaccgggaccagacagtgaagacccagaaggaaaatacagtgttccgcaccccagccatcaagaggagcatcctggagagcagccccaggacccccacccccttcaagcacgccctggccgcccaggagatcaagtatggccccctgaagatgctgccccagacccccagccacctggtggaggacctgcaggatgtgatcaagcaggagagtgatgagagcggcatcgtggccgagttccaggagaatggaccacccctgctgaagaagatcaagcaggaggtggagagccccacagacaagagcggcaacttcttctgcagccaccactgggagggggacagcctgaacacccagctgttcacccagaccagccctgtggctgatgcccccaacatcctgaccagctctgtgctgatggccccagcctctgaagatgaagataatgtgctgaaggccttcaccgtgcccaagaacagaagcctggccagccccctgcagccctgcagcagcacctgggagcccgccagctgtgggaagatggaggagcagatgaccagcagcagccaggccaggaaatatgtgaatgccttcagcgcccggaccctggtgatgtag

SEQ ID NO: 175910 - DNA, 240 bp, synthetic construct
  misc_feature 1..240: note = Description of Artificial Sequence: Synthetic coding sequence
  source 1..240: mol_type = other DNA
atggcccggcggcccaggcacagcatctacagcagtgatgaagatgatgaagattttgagatgtgtgaccatgactatgatggcctgctgcccaagagcggcaagaggcacctgggcaagacccgctggacccgggaggagaacagaacagatgtgcagtgccagcaccgctggcagaaggtgctgaaccctgagctgatcaagggcccctggaccaaggaggaggaccagaggaactag

SEQ ID NO: 175911 - DNA, 312 bp, synthetic construct
  misc_feature 1..312: note = Description of Artificial Sequence: Synthetic coding sequence
  source 1..312: mol_type = other DNA
atggcccggcggcccaggcacagcatctacagcagtgatgaagatgatgaagattttgagatgtgtgaccatgactatgatggcctgctgcccaagagcggcaagaggcacctgggcaagacccgctggacccgggaggaggatgagaagctgaagaagctggtggagcagaatggaacagatgactggaaggtgattgccaactacctgcccaacagaacagatgtgcagtgccagcaccgctggcagaaggtgctgaaccctgagctgatcaagggcccctggaccaaggaggaggaccagaggaactag

SEQ ID NO: 175912 - DNA, 1818 bp, synthetic construct
  misc_feature 1..1818: note = Description of Artificial Sequence: Synthetic coding sequence
  source 1..1818: mol_type = other DNA
atggcccggcggcccaggcacagcatctacagcagtgatgaagatgatgaagattttgagatgtgtgaccatgactatgatggcctgctgcccaagagcggcaagaggcacctgggcaagacccgctggacccgggaggaggatgagaagctgaagaagctggtggagcagaatggaacagatgactggaaggtgattgccaactacctgcccaacagaacagatgtgcagtgccagcaccgctggcagaaggtgctgaaccctgagctgatcaagggcccctggaccaaggaggaggaccagagggtcatcgagctggtgcagaagtatggccccaagcgctggagcgtcatcgccaagcacctgaagggccgcatcggcaagcagtgccgggagcgctggcacaaccacctgaaccctgaggtgaagaagacctcctggacagaggaggaggaccgcatcatctaccaggcccacaagaggctgggcaaccgctgggccgagatcgccaagctgctgcccggccgcacagacaatgccatcaagaaccactggaacagcaccatgaggaggaaggtggagcaggagggctacctgcaggagagcagcaaggccagccagcctgctgtggccaccagcttccagaagaacagccacctgatgggctttgcccaggccccacccacagcccagctgcctgccaccggccagcccaccgtgaacaatgactacagctactaccacatcagcgaggcccagaatgtgagcagccacgtgccctaccctgtggccctgcacgtgaacatcgtgaatgtgccccagcctgctgctgctgccatccagacccagaaccacacctgcagctacccaggctggcacagcaccaccatcgctgaccacacccggccccacggggacagcgcccctgtgtcctgcctgggggagcaccacagcacccccagcctgcctgctgaccccggcagcctgcctgaggagagcgccagccctgcccgctgcatgattgtgcaccagggcaccatcctggacaacgtgaagaacctgctggagtttgctgagaccctgcagttcatcgacagcttcctgaacaccagcagcaaccatgaaaattctgacctggagatgcccagcctgaccagcacccccctcatcggccacaagctgactgtgaccacccccttccaccgggaccagacagtgaagacccagaaggaaaatacagtgttccgcaccccagccatcaagaggagcatcctggagagcagccccaggacccccacccccttcaagcacgccctggccgcccaggagatcaagtatggccccctgaagatgctgccccagacccccagccacctggtggaggacctgcaggatgtgatcaagcaggagagtgatgagagcggcatcgtggccgagttccaggagaatggaccacccctgctgaagaagatcaagcaggaggtggagagccccacagacaagagcggcaacttcttctgcagccaccactgggagggggacagcctgaacacccagctgttcacccagaccagccctgtggctgatgcccccaacatcctgaccagctctgtgctgatggccccagcctctgaagatgaagataatgtgctgaaggccttcaccgtgcccaagaacagaagcctggccagccccctgcagccctgcagcagcacctgggagcccgccagctgtgggaagatggaggagcagatgaccagcagcagccaggccaggaaatatgtgaatgccttcagcgcccggaccctggtgatgtag

SEQ ID NO: 175913 - DNA, 717 bp, synthetic construct; identical to SEQ ID NO: 165822
  misc_feature 1..717: note = Description of Artificial Sequence: Synthetic coding sequence
  source 1..717: mol_type = other DNA

SEQ ID NO: 175914 - DNA, 2031 bp, synthetic construct
  misc_feature 1..2031: note = Description of Artificial Sequence: Synthetic coding sequence
  source 1..2031: mol_type = other DNA
atgagcaggaggacccgctgtgaggacctggatgagctgcactaccaggacacagacagtgatgtgcctgagcagagggacagcaagtgcaaggtgaagtggacccatgaggagaacagaacagaccagcagtgccagtaccgctggctgcgggtgctgaacccagacctggtgaagggcccctggaccaaggaggaggaccagaaggtgattgagctggtgaagaagtatggcaccaagcagtggaccctgattgccaagcacctgaagggccgcctgggcaagcagtgccgggagcgctggcacaaccacctgaaccctgaggtgaagaagagctgctggacagaggaggaggaccgcatcatctgtgaggcccacaaggtgctgggcaaccgctgggccgagatcgccaagatgctgcccggccgcacagacaatgctgtgaagaaccactggaacagcaccatcaagaggaaggtggacaccggcggcttcctgtctgagagcaaggactgcaagccccctgtgtacctgctgctggagctggaggacaaggatggcctgcagagcgcccagcccacagagggccagggcagcctgctgaccaactggcccagcgtgccccccaccatcaaggaggaggagaacagcgaggaggagctggccgccgccaccaccagcaaggagcaggagcccatcggcacagacctggatgctgtgaggaccccagagcccctggaggagttccccaagcgggaggaccaggagggcagccccccagagaccagcctgccctacaagtgggtggtggaggccgccaacctgctgatcccagctgtgggcagcagcctgtctgaggccctggacctgattgaaagtgaccctgatgcctggtgtgacctgagcaagtttgacctgcctgaggagcccagcgcagaagattccatcaacaacagcctggtgcagctgcaggccagccaccagcagcaggtgctgcccccccggcagcccagcgccctggtgcccagcgtgacagagtaccgcctggatggccacaccatcagtgacctgagccgcagcagcagaggagagctgatccccatcagccccagcacagaggtgggcggcagcggcatcggcaccccacccagcgtgctgaagaggcagaggaagagaagagtggccctgagccctgtgacagagaacagcaccagcctgtccttcctggacagctgcaacagcctgacccccaagagcacccctgtgaagaccctgcccttcagccccagccagttcctgaacttctggaacaagcaggacaccctggagctggagagccccagcctgaccagcacccctgtgtgcagccagaaggtggtggtgaccacccccctgcaccgggacaagacccccctgcaccagaagcatgctgcctttgtgaccccagaccagaagtacagcatggacaacaccccccacacccccacccccttcaagaatgccctggagaagtatggccccctgaagcccctgccccagaccccccacctggaggaggacctgaaggaggtgctgcggtctgaggccggcatcgagctgatcattgaagatgacatccggcctgagaagcagaagaggaagccaggcctgcggcgcagccccatcaagaaggtgaggaagagcctggccctggacatcgtggatgaagatgtgaagctgatgatgagcaccctgcccaagagcctgagcctgcccaccacagcccccagcaacagcagcagcctgaccctgagcggcatcaaggaggacaacagcctgctgaaccagggcttcctgcaggccaagccagagaaggctgctgtggcccagaagcccaggagccacttcaccaccccagcccccatgagcagcgcctggaagacagtggcctgtggcggcacccgggaccagctgttcatgcaggagaaggcccggcagctgctgggccgcctgaagcccagccacaccagcaggaccctcatcctgtcctag

SEQ ID NO: 175915 - DNA, 1395 bp, synthetic construct
  misc_feature 1..1395: note = Description of Artificial Sequence: Synthetic coding sequence
  source 1..1395: mol_type = other DNA
atgcccagctgcagcaccagcaccatgcctggcatgatctgcaagaacccagacctggagtttgacagcctgcagccctgcttctacccagatgaagatgacttctactttggaggccctgacagcaccccacctggagaggacatctggaagaagtttgagctgctgcccaccccacccctgagccccagccggggctttgctgagcacagcagcgagccccccagctgggtgacagagatgctgctggagaatgagctgtggggcagccctgctgaggaggatgccttcggcctgggcggcctgggcggcctgacccccaaccctgtgatcctgcaggactgcatgtggagcggcttcagcgcccgggagaagctggagagagctgtgtctgagaagctgcagcacggccggggccccccaacagctggcagcacagcccagagccctggggccggggccgccagccctgctggccggggccacggcggggccgccggggccggccgggccggggccgccctgcctgctgagctggcccaccctgctgctgaatgtgtggaccctgctgtggtgttccccttccctgtgaacaagcgggagcccgcccctgtgcctgctgccccagccagcgccccagctgctggccctgctgtggccagcggggccggcattgctgccccagctggggcccctggggtggccccacccaggcctgggggccggcagaccagcggcggggaccacaaggccctgagcaccagcggggaggacaccctgagtgacagtgatgatgaagatgatgaggaggaggatgaggaggaggagattgatgtggtgacagtggagaagagaagaagcagcagcaacaccaaggctgtgaccaccttcaccatcaccgtgcggcccaagaatgctgccctgggccctggccgggcccagagcagcgagctgatcctgaagcgctgcctgcccatccaccagcagcacaactatgctgcccccagcccctacgtggagagtgaagatgccccaccccagaagaagatcaagtctgaggccagcccccggcccctgaagagcgtcatcccccccaaggccaagagcctgagccccaggaacagcgacagcgaggacagcgagaggagaagaaaccacaacatcctggagcggcagaggagaaatgacctgcggagcagcttcctgaccctgcgggaccacgtgcctgagctggtgaagaatgagaaggccgccaaggtggtgatcctgaagaaggccacagaatatgtgcacagcctgcaggccgaggagcaccagctgctgctggagaaggagaagctgcaggcccggcagcagcagctgctgaagaagattgagcacgcccggacctgctag

SEQ ID NO: 175916 - DNA, 1149 bp, synthetic construct
  misc_feature 1..1149: note = Description of Artificial Sequence: Synthetic coding sequence
  source 1..1149: mol_type = other DNA
atgcccagctgcagcaccagcaccatgcctggcatgatctgcaagaacccagacctggagtttgacagcctgcagccctgcttctacccagatgaagatgacttctactttggaggccctgacagcaccccacctggagaggacatctggaagaagtttgagctgctgcccaccccacccctgagccccagccggggctttgctgagcacagcagcgagccccccagctgggtgacagagatgctgctggagaatgagctgtggggcagccctgctgaggaggatgccttcggcctgggcggcctgggcggcctgacccccaaccctgtgatcctgcaggactgcatgtggagcggcttcagcgcccgggagaagctggagagagctgtgtctgagaagctgcagcacggccggggccccccaacagctggcagcacagcccagagccctggggtggccccacccaggcctgggggccggcagaccagcggcggggaccacaaggccctgagcaccagcggggaggacaccctgagtgacagtgatgatgaagatgatgaggaggaggatgaggaggaggagattgatgtggtgacagtggagaagagaagaagcagcagcaacaccaaggctgtgaccaccttcaccatcaccgtgcggcccaagaatgctgccctgggccctggccgggcccagagcagcgagctgatcctgaagcgctgcctgcccatccaccagcagcacaactatgctgcccccagcccctacgtggagagtgaagatgccccaccccagaagaagatcaagtctgaggccagcccccggcccctgaagagcgtcatcccccccaaggccaagagcctgagccccaggaacagcgacagcgaggacagcgagaggagaagaaaccacaacatcctggagcggcagaggagaaatgacctgcggagcagcttcctgaccctgcgggaccacgtgcctgagctggtgaagaatgagaaggccgccaaggtggtgatcctgaagaaggccacagaatatgtgcacagcctgcaggccgaggagcaccagctgctgctggagaaggagaagctgcaggcccggcagcagcagctgctgaagaagattgagcacgcccggacctgctag

SEQ ID NO: 175917 - DNA, 852 bp, synthetic construct
  misc_feature 1..852: note = Description of Artificial Sequence: Synthetic coding sequence
  source 1..852: mol_type = other DNA
atggctgtgccccccacctacgccgacctgggcaagagcgccagagatgtgttcaccaagggctacggcttcggcctcatcaagctggacctgaagaccaagtcagaaaatggcctggagttcaccagcagcggcagcgccaacacagagaccaccaaggtgacaggcagcctggagaccaagtaccgctggacagaatatggcctgaccttcacagagaagtggaacacagacaacaccctgggcacagagatcaccgtggaggaccagctggcccggggcctgaagctgacctttgacagcagcttcagccccaacacaggcaagaagaatgccaagatcaagacaggctacaagcgggagcacatcaacctgggctgtgacatggactttgatattgctggccccagcatccggggggccctggtgctgggctatgagggctggctggccggctaccagatgaactttgaaacagccaagagccgggtgacccagagcaactttgctgtgggctacaagacagatgagttccagctgcacaccaacgtgaatgatggaacagaatttggaggcagcatctaccagaaggtgaacaagaagctggagacagctgtgaacctggcctggacagctggcaacagcaacaccaggtttggaattgctgccaagtaccagattgatcctgatgcctgcttcagcgccaaggtgaacaacagcagcctgattggcctgggctacacccagaccctgaagccaggcatcaagctgaccctgagcgccctgctggatggcaagaatgtgaatgctgggggccacaagctgggcctgggcctggagttccaggcctag

SEQ ID NO: 175918 - DNA, 852 bp, synthetic construct; identical to SEQ ID NO: 175917
  misc_feature 1..852: note = Description of Artificial Sequence: Synthetic coding sequence
  source 1..852: mol_type = other DNA

SEQ ID NO: 175919 - DNA, 852 bp, synthetic construct; identical to SEQ ID NO: 175917
  misc_feature 1..852: note = Description of Artificial Sequence: Synthetic coding sequence
  source 1..852: mol_type = other DNA

SEQ ID NO: 175920 - DNA, 849 bp, synthetic construct
  misc_feature 1..849: note = Description of Artificial Sequence: Synthetic coding sequence
  source 1..849: mol_type = other DNA
atggccacccacggccagacctgtgcccggcccatgtgcatccccccatcctatgctgacctgggcaaggccgcccgggacatcttcaacaagggctttggatttggcctggtgaagctggatgtgaagaccaagagctgcagcggcgtggagttcagcaccagcggcagcagcaacacagacaccgggaaggtgacaggcaccctggagaccaagtacaagtggtgtgaatatggcctgaccttcacagagaagtggaacacagacaacaccctgggcacagagatcgccatcgaggaccagatctgccagggcctgaagctgacctttgacaccaccttcagccccaacacaggcaagaagagcggcaagatcaagagcagctacaagcgggagtgcatcaacctgggctgtgatgtggactttgattttgctggccctgccatccacggcagcgctgtgtttggctatgagggctggctggccggctaccagatgacctttgacagcgccaagagcaagctgaccaggaacaactttgctgtgggctacagaactggagacttccagctgcacaccaacgtgaatgatggaacagaatttggaggcagcatctaccagaaggtgtgtgaggacctggacacctctgtgaacctggcctggaccagcggcaccaactgcacccgcttcggcattgctgccaagtaccagctggaccccacagccagcatcagcgccaaggtgaacaacagcagcctcatcggcgtgggctacacccagaccctgcggcctggggtgaagctgaccctgagcgccctggtggatggcaagagcatcaatgccggctag

SEQ ID NO: 175921 - DNA, 930 bp, synthetic construct
  misc_feature 1..930: note = Description of Artificial Sequence: Synthetic coding sequence
  source 1..930: mol_type = other DNA
atgtcctggtgcaatgagctgcggctgcctgccctgaagcagcacagcatcggccggggcctggagagccacatcaccatgtgcatcccccccagctatgctgacctgggcaaggccgcccgggacatcttcaacaagggcttcggcttcggcctggtgaagctggatgtgaagaccaagagctgcagcggcgtggagttcagcaccagcggcagcagcaacacagacaccgggaaggtgacaggcaccctggagaccaagtacaagtggtgtgaatatggcctgaccttcacagagaagtggaacacagacaacaccctgggcacagaaattgccatcgaggaccagatctgccagggcctgaagctgacctttgacaccaccttcagccccaacacaggcaagaagagcggcaagatcaagagcagctacaagcgggagtgcatcaacctgggctgtgatgtggactttgattttgctggccctgccatccacggcagcgctgtgtttggctatgagggctggctggccggctaccagatgacctttgattctgccaagagcaagctgaccaggaacaactttgctgtgggctacagaactggagacttccagctgcacaccaacgtgaatgatggaacagaatttggaggcagcatctaccagaaggtgtgtgaggacctggacacctctgtgaacctggcctggaccagcggcaccaactgcaccaggtttggaattgctgccaagtaccagctggaccccacagccagcatcagcgccaaggtgaacaacagcagcctgattggagtgggctacacccagaccctgcggcctggggtgaagctgaccctgagcgccctggtggatggcaagagcatcaatgctgggggccacaaggtgggcctggccctggagctggaggcctag

SEQ ID NO: 175922 - DNA, 885 bp, synthetic construct
  misc_feature 1..885: note = Description of Artificial Sequence: Synthetic coding sequence
  source 1..885: mol_type = other DNA
atggccacccacggccagacctgtgcccggcccatgtgcatccccccatcctatgctgacctgggcaaggccgcccgggacatcttcaacaagggctttggatttggcctggtgaagctggatgtgaagaccaagagctgcagcggcgtggagttcagcaccagcggcagcagcaacacagacaccgggaaggtgacaggcaccctggagaccaagtacaagtggtgtgaatatggcctgaccttcacagagaagtggaacacagacaacaccctgggcacagagatcgccatcgaggaccagatctgccagggcctgaagctgacctttgacaccaccttcagccccaacacaggcaagaagagcggcaagatcaagagcagctacaagcgggagtgcatcaacctgggctgtgatgtggactttgattttgctggccctgccatccacggcagcgctgtgtttggctatgagggctggctggccggctaccagatgacctttgacagcgccaagagcaagctgaccaggaacaactttgctgtgggctacagaactggagacttccagctgcacaccaacgtgaatgatggaacagaatttggaggcagcatctaccagaaggtgtgtgaggacctggacacctctgtgaacctggcctggaccagcggcaccaactgcacccgcttcggcattgctgccaagtaccagctggaccccacagccagcatcagcgccaaggtgaacaacagcagcctcatcggcgtgggctacacccagaccctgcggcctggggtgaagctgaccctgagcgccctggtggatggcaagagcatcaatgccggcggccacaaggtgggcctggccctggagctggaggcctag

SEQ ID NO: 175923 - DNA, 588 bp, synthetic construct
  misc_feature 1..588: note = Description of Artificial Sequence: Synthetic coding sequence
  source 1..588: mol_type = other DNA
atggccacccacggccagacctgtgcccggcccatgtgcatccccccatcctatgctgacctgggcaaggccgcccgggacatcttcaacaagggctttggatttggcctggtgaagctggatgtgaagaccaagagctgcagcggcgtggagttcagcaccagcggcagcagcaacacagacaccgggaaggtgacaggcaccctggagaccaagtacaagtggtgtgaatatggcctgaccttcacagagaagtggaacacagacaacaccctgggcacagagatcgccatcgaggaccagatctgccagggcctgaagctgacctttgacaccaccttcagccccaacacaggcaagaagagcggcaagatcaagagcagctacaagcgggagtgcatcaacctgggctgtgatgtggactttgattttgctggccctgccatccacggcagcgctgtgtttggctatgagggctggctggccggctaccagatgacctttgacagcgccaagagcaagctgaccaggaacaactttgctgtgggctacagaactggagacttccagctgcacaccaacgtgtag

SEQ ID NO: 175924 - DNA, 330 bp, synthetic construct
  misc_feature 1..330: note = Description of Artificial Sequence: Synthetic coding sequence
  source 1..330: mol_type = other DNA
atgtcctggtgcaatgagctgcggctgcctgccctgaagcagcacagcatcggccggggcctggagagccacatcaccatgtgcatcccccccagctatgctgacctgggcaaggccgcccgggacatcttcaacaagggcttcggcttcggcctggtgaagctggatgtgaagaccaagagctgcagcggcgtggagttcagcaccagcggcagcagcaacacagacaccgggaaggtgacaggcaccctggagaccaagtacaagtggtgtgaatatggcctgaccttcacagagaagtggaacacagacaacaccctgggcacctag

SEQ ID NO: 175925 - DNA, 615 bp, synthetic construct
  misc_feature 1..615: note = Description of Artificial Sequence: Synthetic coding sequence
  source 1..615: mol_type = other DNA
atggccacccacggccagacctgtgcccggcccatgtgcatccccccatcctatgctgacctgggcaaggccgcccgggacatcttcaacaagggctttggatttggcctggtgaagctggatgtgaagaccaagagctgcagcggcgtggagttcagcaccagcggcagcagcaacacagacaccgggaaggtgacaggcaccctggagaccaagtacaagtggtgtgaatatggcctgaccttcacagagaagtggaacacagacaacaccctgggcacagagatcgccatcgaggaccagatctgccagggcctgaagctgacctttgacaccaccttcagccccaacacaggcaagaagagcggcaagatcaagagcagctacaagcgggagtgcatcaacctgggctgtgatgtggactttgattttgctggccctgccatccacggcagcgctgtgtttggctatgagggctggctggccggctaccagatgacctttgacagcgccaagagcaagctgaccaggaacaactttgctgtgggctacagaactggagacttccagctgcacaccaacgtgaatgatggaacagaatttggaggcagctag

SEQ ID NO: 175926 - DNA, 768 bp, synthetic construct
  misc_feature 1..768: note = Description of Artificial Sequence: Synthetic coding sequence
  source 1..768: mol_type = other DNA
atgctggtgatcccagccacccaggaggccgaggagttcagcaccagcggcagcagcaacacagacaccgggaaggtgacaggcaccctggagaccaagtacaagtggtgtgaatatggcctgaccttcacagagaagtggaacacagacaacaccctgggcacagaaattgccatcgaggaccagatctgccagggcctgaagctgacctttgacaccaccttcagccccaacacaggcaagaagagcggcaagatcaagagcagctacaagcgggagtgcatcaacctgggctgtgatgtggactttgattttgctggccctgccatccacggcagcgctgtgtttggctatgagggctggctggccggctaccagatgacctttgattctgccaagagcaagctgaccaggaacaactttgctgtgggctacagaactggagacttccagctgcacaccaacgtgaatgatggaacagaatttggaggcagcatctaccagaaggtgtgtgaggacctggacacctctgtgaacctggcctggaccagcggcaccaactgcaccaggtttggaattgctgccaagtaccagctggaccccacagccagcatcagcgccaaggtgaacaacagcagcctgattggagtgggctacacccagaccctgcggcctggggtgaagctgaccctgagcgccctggtggatggcaagagcatcaatgctgggggccacaaggtgggcctggccctggagctggaggcctag

SEQ ID NO: 175927 - DNA, 885 bp, synthetic construct; identical to SEQ ID NO: 175922
  misc_feature 1..885: note = Description of Artificial Sequence: Synthetic coding sequence
  source 1..885: mol_type = other DNA

SEQ ID NO: 175928 - DNA, 852 bp, synthetic construct
  misc_feature 1..852: note = Description of Artificial Sequence: Synthetic coding sequence
  source 1..852: mol_type = other DNA
atgtgcaacacccccacctactgtgacctgggcaaggccgccaaggatgtgttcaacaagggctacggcttcggcatggtgaagattgacctgaagaccaagagctgcagcggcgtggagttcagcaccagcggccacgcctacacagacaccgggaaggccagcggcaacctggagaccaagtacaaggtgtgcaactacggcctgaccttcacccagaagtggaacacagacaacaccctgggcacagagatctcctgggagaacaagctggccgagggcctgaagctgaccctggacaccatctttgtgcccaacacaggcaagaagagcggcaagctgaaggccagctacaagagggactgcttctctgtgggcagcaatgtggacatcgacttcagcggccccaccatctacggctgggccgtgctggcctttgagggctggctggccggctaccagatgagctttgacacagccaagagcaagctgagccagaacaactttgccctgggctacaaggctgctgacttccagctgcacacccacgtgaatgatggaacagaatttggaggcagcatctaccagaaggtgaatgagaagattgagaccagcatcaacctggcctggacagctggcagcaacaacaccaggtttggaattgctgccaagtacatgctggactgcaggaccagcctgagcgccaaggtgaacaatgccagcctgattggcctgggctacacccagaccctgcggcctggggtgaagctgaccctgagcgccctgattgatggcaagaacttctctgctgggggccacaaggtgggcctgggctttgagctggaggcctag

SEQ ID NO: 175929 - DNA, 855 bp, synthetic construct
  misc_feature 1..855: note = Description of Artificial Sequence: Synthetic coding sequence
  source 1..855: mol_type = other DNA
atgtgcaacacccccacctactgtgacctgggcaaggccgccaaggatgtgttcaacaagggctacggcttcggcatggtgaagattgacctgaagaccaagagctgcagcggcgtggtggagttcagcaccagcggccacgcctacacagacaccgggaaggccagcggcaacctggagaccaagtacaaggtgtgcaactacggcctgaccttcacccagaagtggaacacagacaacaccctgggcacagagatctcctgggagaacaagctggccgagggcctgaagctgaccctggacaccatctttgtgcccaacacaggcaagaagagcggcaagctgaaggccagctacaagagggactgcttctctgtgggcagcaatgtggacatcgacttcagcggccccaccatctacggctgggccgtgctggcctttgagggctggctggccggctaccagatgagctttgacacagccaagagcaagctgagccagaacaactttgccctgggctacaaggctgctgacttccagctgcacacccacgtgaatgatggaacagaatttggaggcagcatctaccagaaggtgaatgagaagattgagaccagcatcaacctggcctggacagctggcagcaacaacacccgcttcggcattgctgccaagtacatgctggactgcaggaccagcctgagcgccaaggtgaacaatgccagcctcatcggcctgggctacacccagaccctgcggcctggggtgaagctgaccctgagcgccctgattgatggcaagaacttctctgctgggggccacaaggtgggcctgggctttgagctggaggcctag

SEQ ID NO: 175930 - DNA, 498 bp, synthetic construct
  misc_feature 1..498: note = Description of Artificial Sequence: Synthetic coding sequence
  source 1..498: mol_type = other DNA
atgtgcaacacccccacctactgtgacctgggcaaggccgccaaggatgtgttcaacaagggctacggcttcggcatggtgaagattgacctgaagaccaagagctgcagcggcgtggagttcagcaccagcggccacgcctacacagacaccgggaaggccagcggcaacctggagaccaagtacaaggtgtgcaactacggcctgaccttcacccagaagtggaacacagacaacaccctgggcacagagatctcctgggagaacaagctggccgagggcctgaagctgaccctggacaccatctttgtgcccaacacaggcaagaagagcggcaagctgaaggccagctacaagagggactgcttctctgtgggcagcaatgtggacatcgacttcagcggccccaccatctacggctgggccgtgctggcctttgagggctggctggccggctaccagatgagctttgacacagccaagagcaagctgtcctag

SEQ ID NO: 175931 - DNA, 855 bp, synthetic construct
  misc_feature 1..855: note = Description of Artificial Sequence: Synthetic coding sequence
  source 1..855: mol_type = other DNA
atgtgcaacacccccacctactgtgacctgggcaaggccgccaaggatgtgttcaacaagggctacggcttcggcatggtgaagattgacctgaagaccaagagctgcagcggcgtgatggagttcagcaccagcggccacgcctacacagacaccgggaaggccagcggcaacctggagaccaagtacaaggtgtgcaactacggcctgaccttcacccagaagtggaacacagacaacaccctgggcacagagatctcctgggagaacaagctggccgagggcctgaagctgaccctggacaccatctttgtgcccaacacaggcaagaagagcggcaagctgaaggccagctacaagagggactgcttctctgtgggcagcaatgtggacatcgacttcagcggccccaccatctacggctgggccgtgctggcctttgagggctggctggccggctaccagatgagctttgacacagccaagagcaagctgagccagaacaactttgccctgggctacaaggctgctgacttccagctgcacacccacgtgaatgatggaacagaatttggaggcagcatctaccagaaggtgaatgagaagattgagaccagcatcaacctggcctggacagctggcagcaacaacacccgcttcggcattgctgccaagtacatgctggactgcaggaccagcctgagcgccaaggtgaacaatgccagcctcatcggcctgggctacacccagaccctgcggcctggggtgaagctgaccctgagcgccctgattgatggcaagaacttctctgctgggggccacaaggtgggcctgggctttgagctggaggcctag

SEQ ID NO: 175932 - DNA, 480 bp, synthetic construct
  misc_feature 1..480: note = Description of Artificial Sequence: Synthetic coding sequence
  source 1..480: mol_type = other DNA
atgtgcaacacccccacctactgtgacctgggcaaggccgccaaggatgtgttcaacaagggctacggcttcggcatggtgaagattgacctgaagaccaagagctgcagcggcgtggagttcagcaccagcggccacgcctacacagacaccgggaaggccagcggcaacctggagaccaagtacaaggtgtgcaactacggcctgaccttcacccagaagtggaacacagacaacaccctgggcacagagatctcctgggagaacaagctggccgagggcctgaagctgaccctggacaccatctttgtgcccaacacaggcaagaagagcggcaagctgaaggccagctacaagagggactgcttctctgtgggcagcaatgtggacatcgacttcagcggccccaccatctacggctgggccgtgctggcctttgagggctggctggccggctaccagatgagctttgacacctag

SEQ ID NO: 175933 - DNA, 1062 bp, synthetic construct
  misc_feature 1..1062: note = Description of Artificial Sequence: Synthetic coding sequence
  source 1..1062: mol_type = other DNA
atggtgggggacaccctgaagctgctgagccccctgatgacccgctacttcttcctgctcttctacagcacagacagcagtgacctgaatgaaaaccagcaccccctggactttgatgagatggccttcggcaaggtgaagagcggcatctccttcctgatccagacaggagtgggcatcctgggcaacagcttcctgctgtgcttctacaacctgatcctcttcaccggccacaagctgcggcccacagacctgatcctgagccagctggccctggccaacagcatggtgctcttcttcaagggcatcccccagaccatggccgccttcggcctgaagtacctgctgaatgacaccggctgcaagtttgtgttctactaccaccgggtgggcaccagggtgtccctgagcaccatctgcctgctgaatggcttccaggccatcaagctgaaccccagcatctgccgctggatggagatcaagatccgcagcccccgcttcatcgacttctgctgcctgctgtgctgggcccctcatgtgctgatgaatgcctctgtgctgctgctggtgaatggccccctgaacagcaagaacagcagcgccaagaacaactacggctactgcagctacaaggccagcaagcgcttcagcagcctgcatgctgtgctgtacttctccccagacttcatgagcctgggcttcatggtgtgggccagcggctccatggtgttcttcctgtaccgccacaagcagcaggtgcagcacaaccacagcaaccggctgagctgccggcccagccaggaggcccgggccacccacaccatcatggtgctggtgtcctccttctttgtgttctacagcgtgcacagcttcctgaccatctggaccaccgtggtggccaaccctggccagtggatcgtgaccaacagcgtgctggtggccagctgcttccctgcccggagcccctttgtgctgatcatgtctgacacccacatcagccagttctgctttgcctgcaggaccaggaagaccctcttccccaacctggtggtgatgccctag

SEQ ID NO: 175934 - DNA, 594 bp, synthetic construct
  misc_feature 1..594: note = Description of Artificial Sequence: Synthetic coding sequence
  source 1..594: mol_type = other DNA
atggctgctgtgaaggacagctgtgggaagggggagatggccactggaaatggaagaaggctgcacctgggcatccctgaggccgtgtttgtggaggatgtggacagcttcatgaagcagcctggaaatgaaacagctgacacagtgctgaagaagctggatgagcagtaccagaagtacaagttcatggagctgaacctggcccagaagaagaggcggctgaagggccagatccctgagatcaagcagaccctggagatcctgaagtacatgcagaagaagaaggagagcaccaacagcatggagacccgcttcctgctggccgacaacctgtactgcaaggcctctgtgcccccaacagacaagatgtgcctgtggctgggcgccaacgtgatgctggagtatgacattgatgaggcccaggccctgctggagaagaacctgagcacagccaccaagaacctggacagcctggaggaggacctggacttcctgcgggaccagttcaccaccacagaggtgaacatggcccgggtgtacaactgggatgtgaagagaagaaacaaggatgacagcaccaagaacaaggcctag

SEQ ID NO: 175935 - DNA, 579 bp, synthetic construct
  misc_feature 1..579: note = Description of Artificial Sequence: Synthetic coding sequence
  source 1..579: mol_type = other DNA
atggccccccagcccatgatccacacccagcagggcctgcggaccagcagccccagcacccccagccctgagcaccaggaggatgtggacagcttcatgaagcagcctggaaatgaaacagctgacacagtgctgaagaagctggatgagcagtaccagaagtacaagttcatggagctgaacctggcccagaagaagaggcggctgaagggccagatccctgagatcaagcagaccctggagatcctgaagtacatgcagaagaagaaggagagcaccaacagcatggagacccgcttcctgctggccgacaacctgtactgcaaggcctctgtgcccccaacagacaagatgtgcctgtggctgggcgccaacgtgatgctggagtatgacattgatgaggcccaggccctgctggagaagaacctgagcacagccaccaagaacctggacagcctggaggaggacctggacttcctgcgggaccagttcaccaccacagaggtgaacatggcccgggtgtacaactgggatgtgaagagaagaaacaaggatgacagcaccaagaacaaggcctag

SEQ ID NO: 175936 - DNA, 702 bp, synthetic construct
  misc_feature 1..702: note = Description of Artificial Sequence: Synthetic coding sequence
  source 1..702: mol_type = other DNA
atgaggccccagcagctgcacgccacagagatcaccagcagcggcttccggctggcctggccacccctgctgacagctgacagcggctactacgtgctggagctggtgcccagcgcccagcctggagctgcccggcggcagcagctgcctggaaatgccacagactggatctgggccggcctggaccctgacacagattatgatgtggccctggtgcctgagagcaatgtgcggctgctgcggccccagatcctgcgggtgaggaccaggcctggagaggccggccctggggccagcggccctgagagcggggccggccctgcccccacccagctggccgccctgcctgcccctgaggaggccggccctgagcgcatcgtcatcagccacgcccggcccaggagcctgcgggtgtcctgggccccagccctgggcagcgctgctgccctgggctaccacgtgcagtttggccccctgcggggcggggaggcccagagggtggaggtgcctgctggaagaaactgcaccaccctgcagggcctggcccctggaacagcctacctggtgacagtgacagctgccttccgcagcggccgggagagcgccctgagcgccaaggcctgcaccccagatggcccccggccccggcccaggcctgtgccccgggcccccaccccaggcacagccagccgggagccctag

SEQ ID NO: 175937 - DNA, 1338 bp, synthetic construct
  misc_feature 1..1338: note = Description of Artificial Sequence: Synthetic coding sequence
  source 1..1338: mol_type = other DNA
atgctgccctggacagccctgggcctggccctgagcctgcggctggccctggcccggagcggggctgagcggggccccccagccagcgcccccaggggggacctgatgttcctgctggacagcagcgcctctgtgagccactatgagttcagccgggtgcgggagtttgtgggccagctggtggcccccctgcccctgggcaccggggccctgcgggccagcctggtgcacgtgggcagccggccctacacagagttccccttcggccagcacagcagtggagaggccgcccaggatgctgtgcgggccagcgcccagaggatgggagacacccacacaggcctggccctggtgtatgccaaggagcagctgtttgctgaggccagcggggcccggcctggggtgcccaaggtgctggtgtgggtgacagatggcggcagcagtgaccctgtgggcccccccatgcaggagctgaaggacctgggcgtgaccgtcttcatcgtgtccacaggccggggcaacttcctggagctgtctgctgctgccagcgccccagctgagaagcacctgcactttgtggatgtggatgacctgcacatcatcgtgcaggagctgcggggcagcatcctggatgccatgaggccccagcagctgcacgccacagagatcaccagcagcggcttccggctggcctggccacccctgctgacagctgacagcggctactacgtgctggagctggtgcccagcgcccagcctggagctgcccggcggcagcagctgcctggaaatgccacagactggatctgggccggcctggaccctgacacagattatgatgtggccctggtgcctgagagcaatgtgcggctgctgcggccccagatcctgcgggtgaggaccaggcctggagaggccggccctggggccagcggccctgagagcggggccggccctgcccccacccagctggccgccctgcctgcccctgaggaggccggccctgagcgcatcgtcatcagccacgcccggcccaggagcctgcgggtgtcctgggccccagccctgggcagcgctgctgccctgggctaccacgtgcagtttggccccctgcggggcggggaggcccagagggtggaggtgcctgctggaagaaactgcaccaccctgcagggcctggcccctggaacagcctacctggtgacagtgacagctgccttccgcagcggccgggagagcgccctgagcgccaaggcctgcaccccagatggcccccggccccggcccaggcctgtgccccgggcccccaccccaggcacagccagccgggagccctag

SEQ ID NO: 175938 - DNA, 195 bp, synthetic construct
  misc_feature 1..195: note = Description of Artificial Sequence: Synthetic coding sequence
  source 1..195: mol_type = other DNA
atgctgccctggacagccctgggcctggccctgagcctgcggctggccctggcccggagcggggctgagcggggggcccagggccctggccgccaccgggtgcactgccagcaccggccccggcagctgcccggggctgtgagccgctgcctgagcccctgccgggaggccccagccctgtgtggccggggctag

SEQ ID NO: 175939 - DNA, 978 bp, synthetic construct
  misc_feature 1..978: note = Description of Artificial Sequence: Synthetic coding sequence
  source 1..978: mol_type = other DNA
atgcccagcagcacagccatggctgtgggcgccctgagcagcagcctgctggtgacctgctgcctgatggtggccctgtgcagccccagcatccccctggagaagctggcccaggcccctgagcagcccggccaggagaagcgggagcacgccagcagagatggccctggccgggtgaatgagctgggccgcccagccagagatgagggcggcagcggccgggactggaagagcaagagcggccggggcctggccggccgggagccctggagcaagctgaagcaggcctgggtgtcccagggcggcggggccaaggccggggacctgcaggtgcggcccaggggggacaccccccaggccgaggccctggccgccgccgcccaggatgccatcggccctgagctggcccccaccccagagcccccagaggagtatgtgtacccagactaccggggcaagggctgtgtggatgaaagtggctttgtgtatgccatcggggagaagtttgcccctggccccagcgcctgcccctgcctgtgcacagaggagggccccctgtgtgcccagccagaatgtccccggctgcacccccgctgcatccacgtggacaccagccagtgctgcccccagtgcaaggagaggaagaactactgtgagttccggggcaagacctaccagaccctggaggagtttgtggtgagcccctgtgagcgctgccgctgtgaggccaacggggaggtgctgtgcaccgtgtctgcctgcccccagacagaatgtgtggaccctgtgtatgagccagaccagtgctgccccatctgcaagaatggccccaactgctttgctgagacagctgtgatcccagctggccgggaggtgaagacagatgagtgcaccatctgccactgcacctatgaggagggcacctggagaattgagcggcaggccatgtgcaccaggcatgaatgtcggcagatgtag

SEQ ID NO: 175940 - DNA, 750 bp, synthetic construct
  misc_feature 1..750: note = Description of Artificial Sequence: Synthetic coding sequence
  source 1..750: mol_type = other DNA
atgaccagcgagaccctgtggtggctgatcaccctgaagaagcagctgggggacaatgaggccatcacccaggagatcgtgggctgtgcccacctggagaactatgccctgaagatgttcctgtatgctgacaatgaagatagagctggccgcttccacaagaacatgatcaagagcttctacacagccagcctgctgattgatgtgatcaccgtgtttggagagctgacagatgaaaatgtgaagcacaggaaatatgcccgctggaaggccacctacatccacaactgcctgaagaatggagagaccccccaggccggccctgtgggcattgaagaagataatgacattgaagaaaatgaagatgctggagctgccagcctgcccacccagcccacccagcccagcagcagcagcacctatgaccccagcaacatgcccagcggcaactacacaggcatccagatccccccaggggcccacgccccagccaacaccccagctgaggtgccccacagcactggagtggccagcaacaccatccagcccaccccccagaccatcccagccattgatcctgccctcttcaacaccatcagccagggagatgtgcggctgaccccagaagattttgcccgggcccagaagtactgcaagtatgccggcagcgccctgcagtatgaagatgtgtccacagctgtgcagaacctgcagaaggccctgaagctgctgaccaccggccgggagtag

SEQ ID NO: 175941 - DNA, 924 bp, synthetic construct
  misc_feature 1..924: note = Description of Artificial Sequence: Synthetic coding sequence
  source 1..924: mol_type = other DNA
atggccgccctggcccccctgccccccctgcctgcccagttcaagagcatccagcaccacctgaggacagcccaggagcatgacaagagggaccctgtggtggcctactactgccgcctgtatgccatgcagacaggcatgaagattgacagcaagaccccagaatgtaggaagttcctgagcaagctgatggaccagctggaggccctgaagaagcagctgggggacaatgaggccatcacccaggagatcgtgggctgtgcccacctggagaactatgccctgaagatgttcctgtatgctgacaatgaagatagagctggccgcttccacaagaacatgatcaagagcttctacacagccagcctgctgattgatgtgatcaccgtgtttggagagctgacagatgaaaatgtgaagcacaggaaatatgcccgctggaaggccacctacatccacaactgcctgaagaatggagagaccccccaggccggccctgtgggcattgaagaagataatgacattgaagaaaatgaagatgctggagctgccagcctgcccacccagcccacccagcccagcagcagcagcacctatgaccccagcaacatgcccagcggcaactacacaggcatccagatccccccaggggcccacgccccagccaacaccccagctgaggtgccccacagcactggagtggccagcaacaccatccagcccaccccccagaccatcccagccattgatcctgccctcttcaacaccatcagccagggagatgtgcggctgaccccagaagattttgcccgggcccagaagtactgcaagtatgccggcagcgccctgcagtatgaagatgtgtccacagctgtgcagaacctgcagaaggccctgaagctgctgaccaccggccgggagtag

SEQ ID NO: 175942 - DNA, 663 bp, synthetic construct
  misc_feature 1..663: note = Description of Artificial Sequence: Synthetic coding sequence
  source 1..663: mol_type = other DNA
gagatggccgccctggcccccctgccccccctgcctgcccagttcaagagcatccagcaccacctgaggacagcccaggagcatgacaagagggaccctgtggtggcctactactgccgcctgtatgccatgcagacaggcatgaagattgacagcaagaccccagagtgcaggaagttcctgagcaagctgatggaccagctggaggccctgaagaagcagctgggggacaatgaggccatcacccaggagatcgtgggctgtgcccacctggagaactatgccctgaagatgttcctgtatgctgacaatgaagatcgggccggccgcttccacaagaacatgatcaagagcttctacacagccagcctgctgattgatgtgatcaccgtgtttggagagctgacagatgaaaatgtgaagcacaggaaatatgcccgctggaaggccacctacatccacaactgcaaggagtggggagacagcagcagccggccctgctggctgaagaagatcatgatcctgaagaagatgaagatgctggagcagcccctgtgccccctgagccagctgagccaccaccacctgcagctgatgacccagcacgccatccggcagctgtactggaacacagacagcagcggctgcaccaggagcagctag

SEQ ID NO: 175943 - DNA, 669 bp, synthetic construct
  misc_feature 1..669: note = Description of Artificial Sequence: Synthetic coding sequence
  source 1..669: mol_type = other DNA
atgaccagcgagaccctgtggtggctgatcaccctgaagaagcagctgggggacaatgaggccatcacccaggagatcgtgggctgtgcccacctggagaactatgccctgaagatgttcctgtatgctgacaatgaagatagagctggccgcttccacaagaacatgatcaagagcttctacacagccagcctgctgattgatgtgatcaccgtgtttggagagctgacagatgaaaatgtgaagcacaggaaatatgcccgctggaaggccacctacatccacaactgcctgaagaatggagagaccccccaggccggccctgtgggcattgaagaagataatgacattgaagaaaatgaagatgctggagctgccagcctgcccacccagcccacccagcccagcagcagcagcacctatgaccccagcaacatgcccagcggcaactacacaggcatccagatccccccaggggcccacgccccagccaacaccccagctgaggtgccccacagcactggagatgtgcggctgaccccagaggactttgcccgggcccagaagtactgcaagtatgccggcagcgccctgcagtatgaagatgtgtccacagctgtgcagaacctgcagaaggccctgaagctgctgaccaccggccgggagtag

SEQ ID NO: 175944 - DNA, 621 bp, synthetic construct
  misc_feature 1..621: note = Description of Artificial Sequence: Synthetic coding sequence
  source 1..621: mol_type = other DNA
atggccgccaacaagcccaagggccagaacagcctggccctgcacaaggtgatcatggtgggcagcggcggcgtgggcaagagcgccctgaccctgcagttcatgtatgatgaatttgtggaggactatgagcccaccaaggctgacagctacaggaagaaggtggtgctggatggagaggaggtgcagattgacatcctggacacagctggccaggaggactatgctgccatccgggacaactacttccgctctggagagggcttcctgtgtgtgttcagcatcacagagatggagagctttgctgccacagctgacttccgggagcagatcctgcgggtgaaggaggatgaaaatgtgcccttcctgctggtgggcaacaagagtgacctggaggacaagaggcaggtgtctgtggaggaggccaagaacagagctgagcagtggaatgtgaactacgtggagaccagcgccaagacccgggccaacgtggacaaggtgttctttgacctgatgagggagatccgggccaggaagatggaggacagcaaggagaagaatggcaagaagaagaggaagagcctggccaagaggatccgggagcgctgctgcatcctgtag

SEQ ID NO: 175945 - DNA, 306 bp, synthetic construct
  misc_feature 1..306: note = Description of Artificial Sequence: Synthetic coding sequence
  source 1..306: mol_type = other DNA
atggccgccaacaagcccaagggccagaacagcctggccctgcacaaggtgatcatggtgggcagcggcggcgtgggcaagagcgccctgaccctgcagttcatgtatgatgaatttgtggaggactatgagcccaccaaggctgacagctacaggaagaaggtggtgctggatggagaggaggtgcagattgacatcctggacacagctggccaggaggactatgctgccatccgggacaactacttccgctctggagagggcttcctgtgtgtgttcagcatcacagagatggagagcttctag

SEQ ID NO: 175946 - DNA, 621 bp, synthetic construct
  misc_feature 1..621: note = Description of Artificial Sequence: Synthetic coding sequence
  source 1..621: mol_type = other DNA
atggccgccaacaagagcaagggccagagcagcctggccctgcacaaggtgatcatggtgggcagcggcggcgtgggcaagagcgccctgaccctgcagttcatgtatgatgaatttgtggaggactatgagcccaccaaggctgacagctacaggaagaaggtggtgctggatggagaggaggtgcagattgacatcctggacacagctggccaggaggactatgctgccatccgggacaactacttccgctctggagagggcttcctgctggtgttcagcatcacagagcacgagagcttcaccgccacagctgagttccgggagcagatcctgcgggtgaaggccgaggaggacaagatccccctgctggtggtgggcaacaagagtgacctggaggagcggcggcaggtgcctgtggaggaggcccggagcaaggccgaggagtggggcgtgcagtatgtggagaccagcgccaagacccgggccaacgtggacaaggtgttctttgacctgatgagggagatccgcaccaagaagatgtctgagaacaaggacaagaatggcaagaagagcagcaagaacaagaagagcttcaaggagcgctgctgcctgctgtag

SEQ ID NO: 175947 - DNA, 684 bp, synthetic construct
  misc_feature 1..684: note = Description of Artificial Sequence: Synthetic coding sequence
  source 1..684: mol_type = other DNA
atggccgccaacaagagcaagggccagagcagcctggccctgcacaaggtgatcatggtgggcagcggcggcgtgggcaagagcgccctgaccctgcagttcatgaatgtgtccaagagcctggcctatgacaagaagaagtacacagccaacaagaaggtggagggcatcctggagtttgtggaggactatgagcccaccaaggctgacagctacaggaagaaggtggtgctggatggagaggaggtgcagattgacatcctggacacagctggccaggaggactatgctgccatccgggacaactacttccgcagcggggagggcttcctgctggtgttcagcatcacagaacatgagagcttcaccgccacagctgagttccgggagcagatcctgcgggtgaaggccgaggaggacaagatccccctgctggtggtgggcaacaagagtgacctggaggagcggcggcaggtgcctgtggaggaggcccggagcaaggccgaggagtggggcgtgcagtatgtggagaccagcgccaagacccgggccaacgtggacaaggtgttctttgacctgatgagggagatccgcaccaagaagatgtctgagaacaaggacaagaatggcaagaagagcagcaagaacaagaagagcttcaaggagcgctgctgcctgctgtag

SEQ ID NO: 175948 - DNA, 504 bp, synthetic construct
  misc_feature 1..504: note = Description of Artificial Sequence: Synthetic coding sequence
  source 1..504: mol_type = other DNA
atggccgccaacaagagcaagggccagagcagcctggccctgcacaaggtgatcatggtgggcagcggcggcgtgggcaagagcgccctgaccctgcagttcatgtatgatgaatttgtggaggactatgagcccaccaaggctgacagctacaggaagaaggtggtgctggatggagaggaggtgcagattgacatcctggacacagctggccaggaggactatgctgccatccgggacaactacttccgctctggagagggcttcctgctggtgttcagcatcacagagcacgagagcttcaccgccacagctgagttccgggagcagatcctgcgggtgaaggccgaggaggacaagatccccctgctggtggtgggcaacaagagtgacctggaggagcggcggcaggtgcctgtggaggaggcccggagcaaggccgaggagtggggcgtgcagtatgtggagaccagcgccaagacccgggccaacgtggacaagtag

SEQ ID NO: 175949 - DNA, 621 bp, synthetic construct; identical to SEQ ID NO: 175946
  misc_feature 1..621: note = Description of Artificial Sequence: Synthetic coding sequence
  source 1..621: mol_type = other DNA

SEQ ID NO: 175950 - DNA, 687 bp, synthetic construct
  misc_feature 1..687: note = Description of Artificial Sequence: Synthetic coding sequence
  source 1..687: mol_type = other DNA
atgaagcagaggcagagcgccctgcagtgggtgatctgtgtgtcccagccccagaagaccagcgagatggccgccaacaagagcaagggccagagcagcctggccctgcacaaggtgatcatggtgggcagcggcggcgtgggcaagagcgccctgaccctgcagttcatgtatgatgaatttgtggaggactatgagcccaccaaggctgacagctacaggaagaaggtggtgctggatggagaggaggtgcagattgacatcctggacacagctggccaggaggactatgctgccatccgggacaactacttccgctctggagagggcttcctgctggtgttcagcatcacagagcacgagagcttcaccgccacagctgagttccgggagcagatcctgcgggtgaaggccgaggaggacaagatccccctgctggtggtgggcaacaagagtgacctggaggagcggcggcaggtgcctgtggaggaggcccggagcaaggccgaggagtggggcgtgcagtatgtggagaccagcgccaagacccgggccaacgtggacaaggtgttctttgacctgatgagggagatccgcaccaagaagatgtctgagaacaaggacaagaatggcaagaagagcagcaagaacaagaagagcttcaaggagcgctgctgcctgctgtag

SEQ ID NO: 175951 - DNA, 1860 bp, synthetic construct
  misc_feature 1..1860: note = Description of Artificial Sequence: Synthetic coding sequence
  source 1..1860: mol_type = other DNA
atggccagcggggcctacaacccctacatcgagatcatcgagcagccccggcagaggggcatgaggttccgctacaagtgtgagggccgctctgctggcagcatccctggagagcacagcacagacaacaacagaacctaccccagcatccagatcatgaactactacggcaagggcaaggtgcgcatcaccctggtgaccaagaatgacccctacaagccccacccccatgacctggtgggcaaggactgcagagatggctactatgaagctgagtttggccaggagcggcggcccctcttcttccagaacctgggcatccgctgtgtgaagaagaaggaggtgaaggaggccatcatcacccgcatcaaggccggcatcaaccccttcaacgtgcctgagaagcagctgaatgacatcgaggactgtgacctgaatgtggtgcggctgtgcttccaggtgttcctgcctgatgagcacggcaacctgaccacagccctgccccctgtggtgagcaaccccatctatgacaacagagcccccaacacagctgagctgcgcatctgccgggtgaacaagaactgtggctctgtgagaggaggagatgagatcttcctgctgtgtgacaaggtgcagaaggatgacatcgaggtgcgctttgtgctgaatgactgggaggccaagggcatcttcagccaggctgatgtgcaccggcaggtggccatcgtgttcaagaccccaccctactgcaaggccatcacagagcctgtgacagtgaagatgcagctgcggcggcccagcgaccaggaggtgtctgagagcatggacttccgctacctgcctgatgagaaggacacctacggcaacaaggccaagaagcagaagaccaccctgctcttccagaagctgtgccaggaccacgtggagaccggcttccgccacgtggaccaggacggcctggagctgctgaccagcggggacccccccaccctggccagccagagcgctggcatcaccgtgaacttccctgagcggccccggcccggcctgctgggcagcatcggggagggccgctacttcaagaaggagcccaacctcttcagccatgatgctgtggtgcgggagatgcccaccggggtgagcagccaggccgagagctactaccccagccctggccccatcagcagcggcctgagccaccacgcctccatggcccccctgcccagcagctcctggagctctgtggcccaccccacccccaggagcggcaacaccaaccccctgagcagcttcagcaccaggaccctgcccagcaacagccagggcatcccccccttcctgcgcatccctgtgggcaatgacctgaatgccagcaatgcctgcatctacaacaatgctgatgacatcgtgggcatggaggccagctccatgcccagcgctgacctgtatggcatcagtgaccccaacatgctgagcaactgcagcgtgaacatgatgaccaccagcagtgacagcatgggagaaacagacaacccccggctgctgtccatgaacctggagaaccccagctgcaacagcgtgctggacccccgggacctgcggcagctgcaccagatgagcagcagctccatgtctgctggggccaacagcaacaccaccgtgtttgtgtcccagagtgatgcctttgagggcagtgacttcagctgtgccgacaacagcatgatcaatgaaagtggccccagcaacagcaccaaccccaacagccacggctttgtgcaggacagccagtacagcggcatcggctccatgcagaatgagcagctgagtgacagcttcccctatgagttcttccaggtgtag

SEQ ID NO: 175952 - DNA, 1764 bp, synthetic construct
  misc_feature 1..1764: note = Description of Artificial Sequence: Synthetic coding sequence
  source 1..1764: mol_type = other DNA
atggccagcggggcctacaacccctacatcgagatcatcgagcagccccggcagaggggcatgaggttccgctacaagtgtgagggccgctctgctggcagcatccctggagagcacagcacagacaacaacagaacctaccccagcatccagatcatgaactactacggcaagggcaaggtgcgcatcaccctggtgaccaagaatgacccctacaagccccacccccatgacctggtgggcaaggactgcagagatggctactatgaagctgagtttggccaggagcggcggcccctcttcttccagaacctgggcatccgctgtgtgaagaagaaggaggtgaaggaggccatcatcacccgcatcaaggccggcatcaaccccttcaacgtgcctgagaagcagctgaatgacatcgaggactgtgacctgaatgtggtgcggctgtgcttccaggtgttcctgcctgatgagcacggcaacctgaccacagccctgccccctgtggtgagcaaccccatctatgacaacagagcccccaacacagctgagctgcgcatctgccgggtgaacaagaactgtggctctgtgagaggaggagatgagatcttcctgctgtgtgacaaggtgcagaaggatgacatcgaggtgcgctttgtgctgaatgactgggaggccaagggcatcttcagccaggctgatgtgcaccggcaggtggccatcgtgttcaagaccccaccctactgcaaggccatcacagagcctgtgacagtgaagatgcagctgcggcggcccagcgaccaggaggtgtctgagagcatggacttccgctacctgcctgatgagaaggacacctacggcaacaaggccaagaagcagaagaccaccctgctcttccagaagctgtgccaggaccacgtgaacttccctgagcggccccggcccggcctgctgggcagcatcggggagggccgctacttcaagaaggagcccaacctcttcagccatgatgctgtggtgcgggagatgcccaccggggtgagcagccaggccgagagctactaccccagccctggccccatcagcagcggcctgagccaccacgcctccatggcccccctgcccagcagctcctggagctctgtggcccaccccacccccaggagcggcaacaccaaccccctgagcagcttcagcaccaggaccctgcccagcaacagccagggcatcccccccttcctgcgcatccctgtgggcaatgacctgaatgccagcaatgcctgcatctacaacaatgctgatgacatcgtgggcatggaggccagctccatgcccagcgctgacctgtatggcatcagtgaccccaacatgctgagcaactgcagcgtgaacatgatgaccaccagcagtgacagcatgggagaaacagacaacccccggctgctgtccatgaacctggagaaccccagctgcaacagcgtgctggacccccgggacctgcggcagctgcaccagatgagcagcagctccatgtctgctggggccaacagcaacaccaccgtgtttgtgtcccagagtgatgcctttgagggcagtgacttcagctgtgccgacaacagcatgatcaatgaaagtggccccagcaacagcaccaaccccaacagccacggctttgtgcaggacagccagtacagcggcatcggctccatgcagaatgagcagctgagtgacagcttcccctatgagttcttccaggtgtag

SEQ ID NO: 175953 - DNA, 1647 bp, synthetic construct
  misc_feature 1..1647: note = Description of Artificial Sequence: Synthetic coding sequence
  source 1..1647: mol_type = other DNA
atggatgagctgttccccctcatcttccctgctgagcccgcccaggccagcggcccctacgtggagatcatcgagcagcccaagcagaggggcatgaggttccgctacaagtgtgagggccgctctgctggcagcatccctggagagaggagcacagacaccaccaagacccaccccaccatcaagatcaatggctacacaggccctggcaccgtgcgcatcagcctggtgaccaaggaccccccccaccggccccacccccatgagctggtgggcaaggactgcagagatggcttctatgaggccgagctgtgcccagaccgctgcatccacagcttccagaacctgggcatccagtgtgtgaagaagagggacctggagcaggccatcagccagaggatccagaccaacaacaaccccttccaggaggagcagagaggagactatgacctgaatgctgtgcggctgtgcttccaggtgacagtgcgggaccccagcggccggcccctgcggctgccccctgtgctgagccaccccatctttgacaacagagcccccaacacagctgagctgaagatctgccgggtgaacagaaacagcggcagctgcctgggcggagatgagatcttcctgctgtgtgacaaggtgcagaaggaggacatcgaggtgtacttcaccggccctggctgggaggcccggggcagcttcagccaggctgatgtgcaccggcaggtggccatcgtgttccgcaccccaccctatgctgaccccagcctgcaggcccctgtgcgggtgtccatgcagctgcggcggcccagcgaccgggagctgtctgagcccatggagttccagtacctgcctgacacagatgacagacacagaattgaggagaagaggaagaggacctatgagaccttcaagagcatcatgaagaagagccccttcagcggccccacagacccccggcccccacccaggagaattgctgtgcccagccgcagcagcgcctctgtgcccaagccagccccccagccctaccccttcaccagcagcctgagcaccatcaactatgatgagttccccaccatggtgttccccagcggccagatcagccaggccagcgccctggccccagccccaccccaggtgctgccccaggccccagccccagccccagccccagccatggtgtctgccctggcccaggccccagcccctgtgcctgtgctggcccctggccccccccaggccgtggcccccccagcccccaagcccacccaggccggggagggcaccctgtctgaggccctgctgcagctgcagtttgatgatgaggacctgggcgccctgctgggcaacagcacagatcctgctgtgttcacagacctggcctctgtggacaacagcgagttccagcagctgctgaaccagggcatccctgtggccccccacaccacagagcccatgctgatggagtacccagaggccatcacccggctggtgactggagcccagaggcccccagaccctgccccagcccccctgggcgcccctggcctgcccaacggcctgctgtctggagatgaggacttcagcagcattgctgacatggacttcagcgccctgctgagccagatcagcagctag

SEQ ID NO: 175954 - DNA, 1656 bp, synthetic construct
  misc_feature 1..1656: note = Description of Artificial Sequence: Synthetic coding sequence
  source 1..1656: mol_type = other DNA
atggatgagctgttccccctcatcttccctgctgagcccgcccaggccagcggcccctacgtggagatcatcgagcagcccaagcagaggggcatgaggttccgctacaagtgtgagggccgctctgctggcagcatccctggagagaggagcacagacaccaccaagacccaccccaccatcaagatcaatggctacacaggccctggcaccgtgcgcatcagcctggtgaccaaggaccccccccaccggccccacccccatgagctggtgggcaaggactgcagagatggcttctatgaggccgagctgtgcccagaccgctgcatccacagcttccagaacctgggcatccagtgtgtgaagaagagggacctggagcaggccatcagccagaggatccagaccaacaacaaccccttccaggtgcccatcgaggagcagagaggagactatgacctgaatgctgtgcggctgtgcttccaggtgacagtgcgggaccccagcggccggcccctgcggctgccccctgtgctgagccaccccatctttgacaacagagcccccaacacagctgagctgaagatctgccgggtgaacagaaattctggcagctgcctgggcggagatgagatcttcctgctgtgtgacaaggtgcagaaggaggacatcgaggtgtacttcaccggccctggctgggaggcccggggcagcttcagccaggctgatgtgcaccggcaggtggccatcgtgttccgcaccccaccctatgctgaccccagcctgcaggcccctgtgcgggtgtccatgcagctgcggcggcccagcgaccgggagctgtctgagcccatggagttccagtacctgcctgacacagatgacagacaccgcatcgaggagaagaggaagaggacctatgagaccttcaagagcatcatgaagaagagccccttcagcggccccacagacccccggcccccaccaagaagaattgctgtgcccagccgcagcagcgcctctgtgcccaagccagccccccagccctaccccttcaccagcagcctgagcaccatcaactatgatgagttccccaccatggtgttccccagcggccagatcagccaggccagcgccctggccccagccccaccccaggtgctgccccaggccccagccccagccccagccccagccatggtgtctgccctggcccaggccccagcccctgtgcctgtgctggcccctggccccccccaggccgtggcccccccagcccccaagcccacccaggccggggagggcaccctgtctgaggccctgctgcagctgcagtttgatgatgaggacctgggcgccctgctgggcaacagcacagatcctgctgtgttcacagacctggcctctgtggacaacagcgagttccagcagctgctgaaccagggcatccctgtggccccccacaccacagagcccatgctgatggagtacccagaggccatcacccggctggtgactggagcccagaggcccccagaccctgccccagcccccctgggcgcccctggcctgcccaacggcctgctgtctggagatgaggacttcagcagcattgctgacatggacttcagcgccctgctgagccagatcagcagctag

SEQ ID NO: 175955 - DNA, 741 bp, synthetic construct
  misc_feature 1..741: note = Description of Artificial Sequence: Synthetic coding sequence
  source 1..741: mol_type = other DNA
atggatgagctgttccccctcatcttccctgctgagcccgcccaggccagcggcccctacgtggagatcatcgagcagcccaagcagaggggcatgaggttccgctacaagtgtgagggccgctctgctggcagcatccctggagagaggagcacagacaccaccaagacccaccccaccatcaagatcaatggctacacaggccctggcaccgtgcgcatcagcctggtgaccaaggaccccccccaccggccccacccccatgagctggtgggcaaggactgcagagatggcttctatgaggccgagctgtgcccagaccgctgcatccacagcttccagaacctgggcatccagtgtgtgaagaagagggacctggagcaggccatcagccagaggatccagaccaacaacaaccccttccaggtgcccatcgaggagcagagaggagactatgacctgaatgctgtgcggctgtgcttccaggtgacagtgcgggaccccagcggccggcccctgcggctgccccctgtgctgagccaccccatctttgacaacagagcccccaacacagctgagctgaagatctgccgggtgaacagaaattctggcagctgcctgggcggagatgagatcttcctgctgtgtgacaaggtgcagaaggaggacatcgaggtgtgcccccaggccagcaccccagccctgagcctgtatgtgattcctgagcaccaccagctgtag

SEQ ID NO: 175956 - DNA, 1134 bp, synthetic construct
  misc_feature 1..1134: note = Description of Artificial Sequence: Synthetic coding sequence
  source 1..1134: mol_type = other DNA
atggatgagctgttccccctcatcttccctgctgagcccgcccaggccagcggcccctacgtggagatcatcgagcagcccaagcagaggggcatgaggttccgctacaagtgtgagggccgctctgctggcagcatccctggagagaggagcacagacaccaccaagacccaccccaccatcaagatcaatggctacacaggccctggcaccgtgcgcatcagcctggtgaccaaggaccccccccaccggccccacccccatgagctggtgggcaaggactgcagagatggcttctatgaggccgagctgtgcccagaccgctgcatccacagcttccagaacctgggcatccagtgtgtgaagaagagggacctggagcaggccatcagccagaggatccagaccaacaacaaccccttccaggtgcccatcgaggagcagagaggagactatgacctgaatgctgtgcggctgtgcttccaggtgacagtgcgggaccccagcggccggcccctgcggctgccccctgtgctgagccaccccatctttgacaacagagcccccaacacagctgagctgaagatctgccgggtgaacagaaattctggcagctgcctgggcggagatgagatcttcctgctgtgtgacaaggtgcagaaggaggacatcgaggtgtacttcaccggccctggctgggaggcccggggcagcttcagccaggctgatgtgcaccggcaggtggccatcgtgttccgcaccccaccctatgctgaccccagcctgcaggcccctgtgcgggtgtccatgcagctgcggcggcccagcgaccgggagctgtctgagcccatggagttccagtacctgcctgacacagatgacagacaccgcatcgaggagaagaggaagaggacctatgagaccttcaagagcatcatgaagaagagccccttcagcggccccacagacccccggcccccaccaagaagaattgctgtgcccagccgcagcagcgcctctgtgcccaagccaggcaaggacttcctgctgagccactggaatgaccgcttcagctctgtgcagctgcggagcagtggagatgaggacagctgggcccccctgcagacctactag

SEQ ID NO: 175957 - DNA, 714 bp, synthetic construct
  misc_feature 1..714: note = Description of Artificial Sequence: Synthetic coding sequence
  source 1..714: mol_type = other DNA
atggatgagctgttccccctcatcttccctgctgagcccgcccaggccagcggcccctacgtggagatcatcgagcagcccaagcagaggggcatgaggttccgctacaagtgtgagggccgctctgctggcagcatccctggagagaggagcacagacaccaccaagacccaccccaccatcaagatcaatggctacacaggccctggcaccgtgcgcatcagcctggtgaccaaggaccccccccaccggccccacccccatgagctggtgggcaaggactgcagagatggcttctatgaggccgagctgtgcccagaccgctgcatccacagcttccagaacctgggcatccagtgtgtgaagaagagggacctggagcaggccatcagccagaggatccagaccaacaacaaccccttccaggtgcccatcgaggagcagagaggagactatgacctgaatgctgtgcggctgtgcttccaggtgacagtgcgggaccccagcggccggcccctgcggctgccccctgtgctgagccaccccatctttgacaacagagcccccaacacagctgagctgaagatctgccgggtgaacagaaattctggcagctgcctgggcggagatgagatcttcctgctgtgtgacaaggtgcagaaggcccacggcatccctgtgcctgcccgctaccgccgcagcagcccagactag

SEQ ID NO: 175958 - DNA, 1278 bp, synthetic construct
  misc_feature 1..1278: note = Description of Artificial Sequence: Synthetic coding sequence
  source 1..1278: mol_type = other DNA
atggatgagctgttccccctcatcttccctgctgagcccgcccaggccagcggcccctacgtggagatcatcgagcagcccaagcagaggggcatgaggttccgctacaagtgtgagggccgctctgctggcagcatccctggagagaggagcacagacaccaccaagacccaccccaccatcaaggtgtggatgagcggccccctgtacttcggccagatcaatggctacacaggccctggcaccgtgcgcatcagcctggtgaccaaggaccccccccaccggccccacccccatgagctggtgggcaaggactgcagagatggcttctatgaagctgagctgtgcccagaccgctgcatccacagcttccagaacctgggcatccagtgtgtgaagaagagggacctggagcaggccatcagccagaggatccagaccaacaacaaccccttccaggtgcccatcgaggagcagagaggagactatgacctgaatgctgtgcggctgtgcttccaggtgacagtgcgggaccccagcggccggcccctgcggctgccccctgtgctgagccaccccatctttgacaacagagcccccaacacagctgagctgaagatctgccgggtgaacagaaacagcggcagctgcctgggcggagatgagatcttcctgctgtgtgacaaggtgcagaaggaggacatcgaggtgtacttcaccggccctggctgggaggcccggggcagcttcagccaggctgatgtgcaccggcaggtggccatcgtgttccgcaccccaccctatgctgaccccagcctgcaggcccctgtgcgggtgtccatgcagctgcggcggcccagcgaccgggagctgtctgagcccatggagttccagtacctgcctgacacagatgacagacacagaattgaggagaagaggaagaggacctatgagaccttcaagagcatcatgaagaagagccccttcagcggccccacagacccccggcccccacccaggagaattgctgtgcccagccgcagcagcgcctctgtgcccaagccagccccccagccctaccccttcaccagcagcctgagcaccatcaactatgatgagttccccaccatggtgttccccagcggccagatcagccaggccagcgccctggccccagccccaccccaggtgctgccccaggccccagccccagccccagccccagccatggtgtctgccctggcccaggcccctgagcactgggtggccggggactag

SEQ ID NO: 175959 - DNA, 1314 bp, synthetic construct
  misc_feature 1..1314: note = Description of Artificial Sequence: Synthetic coding sequence
  source 1..1314: mol_type = other DNA
atgacccagttcctgccccccaacctgctggccctgtttgccccccgggaccccatcccctacctgccccccctggagaagctgccccatgagaagcaccacaaccagccctactgcggcatcgccccctacatccgggagtttgaggaccccagagatgcccccccacccaccagggctgagacccgggaggagaggatggagaggaagagaagagagaagattgaaagacggcagcaggaggtggagacagagctgaagatgtgggacccccacaatgaccccaatgcccagggagatgccttcaagaccctgtttgtggcccgggtgaactatgacaccacagagagcaagctgcggcgggagtttgaggtgtatggccccatcaagaggatccacatggtgtacagcaagaggtctgggaagccccggggctacgccttcattgaatatgaacatgagcgggacatgcacagcgcctacaagcatgctgatggcaagaagattgatggccggcgggtgctggtggatgtggagcggggccgcacagtgaagggctggaggccccggcggctgggcggcggcctgggcggcacccggcggggcggcgcagatgtgaacatccgccacagcggcagagatgacaccagccgctatgatgagaggcctggccccagccccctgccccaccgggaccgggaccgggaccgggagcgggagcggcgggagaggagccgggagcgggacaaggagcgggagaggagaagaagccgcagccgggacagaagaagaagaagccgcagccgggacaaggaggagaggagaagaagccgggagaggagcaaggacaaggaccgggacaggaagaggaggagcagccgcagccgggagcgggcccggcgggagcgggagaggaaggaggagctgcggggcggcggcggggacatggccgagcccagcgaggccggagatgcccccccagatgatggccccccaggagagctgggcccagatggcccagatggccctgaggagaagggccgggaccgggaccgggagaggagaagaagccacaggtctgagcgggagaggagaagagaccgggaccgggaccgggaccgggaccgggagcacaagagaggagagcggggcagcgagcggggcagagatgaggcccggggcggcggcggcggccaggacaatggcctggagggcctgggcaatgacagccgggacatgtacatggagagcgagggcggagatggctacctggccccagaaaatggctacctgatggaggccgcccctgagtag

SEQ ID NO: 175960 - DNA, 1731 bp, synthetic construct
  misc_feature 1..1731: note = Description of Artificial Sequence: Synthetic coding sequence
  source 1..1731: mol_type = other DNA
atgctgcggagcggccctgccagcggccccagcgtgcccaccggccgggccatgcccagcagaagagtggcccggcccccagctgcccctgagctgggcgccctgggcagcccagacctgagcagcctgagcctggccgtgagccgcagcacagagatcattgatgagtacatcaaggaaaatggatttggcctggatggcggccagcccggccctggagagggcctgccccggctggtgtccagaggagctgccagcctgagcacagtgaccctgggccctgtggcccccccagccaccccaccaccctggggctgccccctgggccgcctggtgtccccagcccctggccctggcccccagccccacctggtgatcacagagcagcccaagcagaggggcatgaggttccgctatgaatgtgagggccgctctgctggcagcatcctgggggagagcagcacagaggccagcaagaccctgcctgccatcgagctgcgggactgtggcggcctgcgggaggtggaggtgacagcctgcctggtgtggaaggactggccccaccgggtgcacccccacagcctggtgggcaaggactgcacagatggcatctgccgggtgcggctgcggccccacgtgagccccaggcacagcttcaacaacctgggcatccagtgtgtgaggaagaaggagattgaggccgccatcgagaggaagatccagctgggcatcgacccctacaatgccggcagcctgaagaaccaccaggaggtggacatgaatgtggtgcgcatctgcttccaggccagctacagagaccagcagggccagatgaggaggatggaccctgtgctgtctgagcctgtgtatgacaagaagagcaccaacaccagcgagctgcgcatctgccgcatcaacaaggagagcggcccctgcacaggaggagaggagctgtacctgctgtgtgacaaggtgcagaaggaggacatctctgtggtgttcagccgggcctcctgggagggccgggctgacttcagccaggctgatgtgcaccggcagatcgccatcgtgttcaagaccccaccctatgaggacctggagatcgtggagcctgtgacagtgaatgtgttcctgcagaggctgacagatggagtgtgcagcgagcccctgcccttcacctacctgccccgggaccatgacagctatggagtggacaagaagaggaagaggggcatgccagatgtgctgggggagctgaacagcagtgacccccatggaattgagagcaagaggaggaagaagaagccagccatcctggaccacttcctgcccaaccacggcagcggccccttcctgcccccatctgccctgctgcctgaccctgacttcttctctggaacagtgtccctgcccggcctggagcccccaggcggccctgacctgctggatgatggctttgcctatgaccccacagcccccaccctcttcaccatgctggacctgctgcccccagccccaccccacgccagcgctgtggtgtgcagcggcggggccggggctgtggtgggggagaccccaggccctgagcccctgaccctggacagctaccaggcccctggccctggagatggcggcacagccagcctggtgggcagcaacatgttccccaaccactaccgggaggccgccttcggcggcggcctgctgagccctggccctgaggccacctag

SEQ ID NO: 175961 - DNA, 1740 bp, synthetic construct
  misc_feature 1..1740: note = Description of Artificial Sequence: Synthetic coding sequence
  source 1..1740: mol_type = other DNA
atgctgcggagcggccctgccagcggccccagcgtgcccaccggccgggccatgcccagcagaagagtggcccggcccccagctgcccctgagctgggcgccctgggcagcccagacctgagcagcctgagcctggccgtgagccgcagcacagatgagctggagatcattgatgagtacatcaaggaaaatggcttcggcctggatggcggccagcccggccctggagagggcctgccccggctggtgtccagaggagctgccagcctgagcacagtgaccctgggccctgtggcccccccagccaccccaccaccctggggctgccccctgggccgcctggtgtccccagcccctggccctggcccccagccccacctggtgatcacagagcagcccaagcagaggggcatgaggttccgctatgaatgtgagggccgctctgctggcagcatcctgggggagagcagcacagaggccagcaagaccctgcctgccatcgagctgcgggactgtggcggcctgcgggaggtggaggtgacagcctgcctggtgtggaaggactggccccaccgggtgcacccccacagcctggtgggcaaggactgcacagatggcatctgccgggtgcggctgcggccccacgtgagccccaggcacagcttcaacaacctgggcatccagtgtgtgaggaagaaggagattgaagctgccattgaaaggaagatccagctgggcatcgacccctacaatgccggcagcctgaagaaccaccaggaggtggacatgaatgtggtgcgcatctgcttccaggccagctacagagaccagcagggccagatgaggaggatggaccctgtgctgtctgagcctgtgtatgacaagaagagcaccaacaccagcgagctgcgcatctgccgcatcaacaaggagagcggcccctgcaccggcggggaggagctgtacctgctgtgtgacaaggtgcagaaggaggacatctctgtggtgttcagccgggcctcctgggagggccgggctgacttcagccaggctgatgtgcaccggcagatcgccatcgtgttcaagaccccaccctatgaggacctggagatcgtggagcctgtgacagtgaatgtgttcctgcagaggctgacagatggagtgtgcagcgagcccctgcccttcacctacctgccccgggaccatgacagctatggagtggacaagaagaggaagaggggcatgccagatgtgctgggggagctgaacagcagtgacccccacggcatcgagagcaagaggaggaagaagaagccagccatcctggaccacttcctgcccaaccacggcagcggccccttcctgccccccagcgccctgctgcctgaccctgacttcttcagcggcaccgtgtccctgcccggcctggagcccccaggcggccctgacctgctggatgatggctttgcctatgaccccacagcccccaccctcttcaccatgctggacctgctgcccccagcccctcctcatgccagcgctgtggtgtgcagcggcggggccggggctgtggtgggggagaccccaggccctgagcccctgaccctggacagctaccaggcccctggccctggagatggcggcacagccagcctggtgggcagcaacatgttccccaaccactaccgggaggccgcctttggaggcggcctgctgagccctggccctgaggccacctag

SEQ ID NO: 175962 - DNA, 2187 bp, synthetic construct
  misc_feature 1..2187: note = Description of Artificial Sequence: Synthetic coding sequence
  source 1..2187: mol_type = other DNA
atggaggccgctgctgggggccggggctgcttccagccccaccctggcctgcagaagaccctggagcagttccacctgagctccatgagcagcctgggcggccctgctgccttcagcgcccgctgggcccaggaggcctacaagaaggagagcgccaaggaggccggggctgctgctgtgcctgcccctgtgcctgctgccacagagcccccacctgtgctgcacctgcctgccatccagcccccacctcctgtgctgcccggccccttcttcatgcccagcgacaggagcacagagcgctgtgaaacagtgctggagggggagaccatcagctgctttgtggtgggcggggagaagaggctgtgcctgccccagatcctgaacagcgtgctgcgggacttcagcctgcagcagatcaatgctgtgtgtgatgagctgcacatctactgcagccgctgcacagctgaccagctggagatcctgaaggtgatgggcatcctgcccttcagcgcccccagctgtggcctcatcaccaagacagatgctgagcggctgtgcaatgccctgctgtatggaggagcctaccccccaccctgcaagaaggagctggccgccagcctggccctgggcctggagctgtctgagaggtctgtgcgggtgtaccatgaatgttttggaaaatgtaaaggcctgctggtgcctgagctgtacagcagccccagcgctgcctgcatccagtgcctggactgccgcctgatgtacccaccccacaagtttgtggtgcacagccacaaggccctggagaacagaacctgccactggggctttgacagcgccaactggagggcctacatcctgctgagccaggactacaccgggaaggaggagcaggcccggctgggccgctgcctggatgatgtgaaggagaagtttgattatggcaacaagtacaagagaagagtgccccgggtgagcagcgagcccccagccagcatccggcccaagacagatgacaccagcagccagagccctgcccccagcgagaaggacaagcccagctcctggctgcggaccctggccggcagcagcaacaagagcctgggctgtgtgcacccccggcagaggctgagcgccttccggccctggagccctgctgtgtctgccagcgagaaggagctgagcccccacctgcctgccctgatccgggacagcttctacagctacaagagctttgaaacagctgtggcccccaacgtggccctggcccccccagcccagcagaaggtggtgagcagccccccctgtgccgctgctgtgtcccgggcccctgagcccctggccacctgcacccagcccaggaagaggaagctgactgtggacacccctggggcccctgagaccctggcccctgtggccgcccctgaggaggacaaggacagcgaggccgaggtggaggtggagagccgggaggagttcaccagcagcctgagcagcctgagcagccccagcttcaccagcagcagcagcgccaaggacctgggcagccctggggcccgggccctgcccagcgctgtgcctgatgctgctgccccagcagatgcccccagcggcctggaggccgagctggagcacctgcggcaggccctggagggcggcctggacaccaaggaggccaaggagaagttcctgcacgaggtggtgaagatgagggtgaagcaggaggagaagctgtctgctgccctgcaggccaagaggagcctgcaccaggagctggagttcctgcgggtggccaagaaggagaagctgcgggaggccacagaggccaagaggaacctgaggaaggagattgaaaggctgcgggcagaaaatgagaagaagatgaaggaggccaatgaaagccggctgcggctgaagcgggagctggagcaggcccggcaggcccgggtgtgtgacaagggctgtgaggccggccgcctgcgggccaagtacagcgcccagatcgaggacctgcaggtgaagctgcagcacgccgaggccgaccgggagcagctgcgggctgacctgctgcgggagcgggaggcccgggagcacctggagaaggtggtgaaggagctgcaggagcagctgtggccccgggcccggcctgaggccgccggcagcgagggcgctgctgagctggagccctag

SEQ ID NO: 175963 - DNA, 1632 bp, synthetic construct
  misc_feature 1..1632: note = Description of Artificial Sequence: Synthetic coding sequence
  source 1..1632: mol_type = other DNA
atgggctgcatcaagagcaaggagaacaagagccctgccatcaagtacagacctgagaacaccccagagcctgtgtccacctctgtgagccactacggggctgagcccaccaccgtgagcccctgccccagcagcagcgccaagggcacagctgtgaacttcagcagcctgtccatgaccccatttggaggcagcagcggcgtgaccccatttggaggagccagcagcagcttctctgtggtgcccagcagctacccagctggcctgaccggcggcgtgaccatctttgtggccctgtatgactatgaggcccggaccacagaggacctgtccttcaagaagggggagcgcttccagatcatcaacaacacagaaggagactggtgggaggcccggagcatcgccaccgggaagaatggctacatccccagcaactacgtggccccagctgacagcatccaggccgaggagtggtactttgggaagatgggcaggaaggatgctgagcggctgctgctgaaccctggcaaccagaggggcatcttcctggtgcgggagagcgagaccaccaagggggcctacagcctgagcatccgggactgggatgagatccggggggacaacgtgaagcactacaagatcaggaagctggacaatggaggctactacatcaccacccgggcccagtttgacaccctgcagaagctggtgaagcactacacagaacatgctgatggcctgtgccacaagctgaccaccgtgtgccccaccgtgaagccccagacccagggcctggccaaggatgcctgggagatcccccgggagagcctgcggctggaggtgaagctgggccagggctgcttcggggaggtgtggatgggcacctggaatggcaccaccaaggtggccatcaagaccctgaagccaggcaccatgatgcctgaggccttcctgcaggaggcccagatcatgaagaagctgcggcatgacaagctggtgcccctgtatgctgtggtgtctgaggagcccatctacatcgtgacagagttcatgagcaagggcagcctgctggacttcctgaaggagggagatggcaagtacctgaagctgccccagctggtggacatggccgcccagattgctgatggcatggcctacattgaaagaatgaactacatccaccgggacctgcgggccgccaacatcctggtgggggagaacctggtgtgcaagattgctgactttggcctggcccggctgattgaggacaatgagtacacagcccggcagggcgccaagttccccatcaagtggacagcccctgaggccgccctgtatggccgcttcaccatcaagagtgatgtgtggagctttggcatcctgcagacagagctggtgaccaagggccgggtgccctacccaggcatggtgaaccgggaggtgctggagcaggtggagcggggctacaggatgccctgcccccagggctgcccagagagcctgcacgagctgatgaacctgtgctggaagaaggaccctgatgagcggcccacctttgagtacatccagagcttcctggaggactacttcaccgccacagagccccagtaccagcctggagagaacctgtag

SEQ ID NO: 175964 - DNA, 1632 bp, synthetic construct; identical to SEQ ID NO: 175963
  misc_feature 1..1632: note = Description of Artificial Sequence: Synthetic coding sequence
  source 1..1632: mol_type = other DNA

SEQ ID NO: 175965 - DNA, 1632 bp, synthetic construct; identical to SEQ ID NO: 175963
  misc_feature 1..1632: note = Description of Artificial Sequence: Synthetic coding sequence
  source 1..1632: mol_type = other DNA

SEQ ID NO: 175966 - DNA, 1539 bp, synthetic construct
  misc_feature 1..1539: note = Description of Artificial Sequence: Synthetic coding sequence
  source 1..1539: mol_type = other DNA
atgggctgcatcaagagcaagggcaaggacagcctgagtgatgatggagtggacctgaagacccagcctgtgaggaacacagagaggaccatctacgtgcgggaccccaccagcaacaagcagcagaggcctgtgcctgagagccagctgctgcccggccagcgcttccagaccaaggaccctgaggagcagggcgacatcgtggtggccctgtacccctatgatggcatccacccagatgacctgtccttcaagaagggggagaagatgaaggtgctggaggagcacggggagtggtggaaggccaagagcctgctgaccaagaaggagggcttcatccccagcaactacgtggccaagctgaacaccctggagacagaggagtggttcttcaaggacatcaccaggaaggatgctgagcggcagctgctggcccctggcaacagcgctggggccttcctgatccgggagagcgagaccctgaagggcagcttcagcctgtctgtgcgggactttgatcctgtgcatggagatgtgatcaagcactacaagatccgcagcctggacaatggaggctactacatcagcccccgcatcaccttcccctgcatcagtgacatgatcaagcactaccagaagcaggctgatggcctgtgccggcggctggagaaggcctgcatcagccccaagccccagaagccctgggacaaggatgcctgggagatcccccgggagagcatcaagctggtgaagaggctgggcgccggccagtttggagaggtgtggatgggctactacaacaacagcaccaaggtggccgtgaagaccctgaagccaggcaccatgtctgtgcaggccttcctggaggaggccaacctgatgaagaccctgcagcacgacaagctggtgcggctgtatgctgtggtgacccgggaggagcccatctacatcatcacagagtacatggccaagggcagcctgctggacttcctgaagagtgatgagggcggcaaggtgctgctgcccaagctgattgacttcagcgcccagattgctgagggcatggcctacatcgagaggaagaactacatccaccgggacctgcgggccgccaacgtgctggtgtctgagagcctgatgtgcaagattgctgactttggcctggcccgggtgattgaagataatgagtacacagcccgggagggcgccaagttccccatcaagtggacagcccctgaggccatcaactttggctgcttcaccatcaagagtgatgtgtggagctttggcatcctgctgtatgagatcgtgacctacggcaagatcccctacccaggccgcaccaatgctgatgtgatgacagccctgagccagggctacaggatgccccgggtggagaactgcccagatgagctgtatgacatcatgaagatgtgctggaaggagaaggccgaggagcggcccacctttgactacctgcagagcgtgctggatgacttctacacagccacagagggccagtaccagcagcagccctag

SEQ ID NO: 175967 - DNA, 453 bp, synthetic construct
  misc_feature 1..453: note = Description of Artificial Sequence: Synthetic coding sequence
  source 1..453: mol_type = other DNA
atgggctgcatcaagagcaagggcaaggacagcctgagtgatgatggagtggacctgaagacccagcctgtgaggaacacagagaggaccatctacgtgcgggaccccaccagcaacaagcagcagaggcctgtgcctgagagccagctgctgcccggccagcgcttccagaccaaggaccctgaggagcagggcgacatcgtggtggccctgtacccctatgatggcatccacccagatgacctgtccttcaagaagggggagaagatgaaggtgctggaggagcacggggagtggtggaaggccaagagcctgctgaccaagaaggagggcttcatccccagcaactacgtggccaagctgaacaccctggagacagaggagtggttcttcaaggacatcaccaggaaggatgctgagcggcagctgctggcccctggcaacagcgcctag

SEQ ID NO: 175968 - DNA, 1476 bp, synthetic construct
  misc_feature 1..1476: note = Description of Artificial Sequence: Synthetic coding sequence
  source 1..1476: mol_type = other DNA
atgggctgcatcaagagcaagggcaaggacagcctgagtgatgatggagtggacctgaagacccagcctgtgcctgagagccagctgctgcccggccagcgcttccagaccaaggaccctgaggagcagggcgacatcgtggtggccctgtacccctatgatggcatccacccagatgacctgtccttcaagaagggggagaagatgaaggtgctggaggagcacggggagtggtggaaggccaagagcctgctgaccaagaaggagggcttcatccccagcaactacgtggccaagctgaacaccctggagacagaggagtggttcttcaaggacatcaccaggaaggatgctgagcggcagctgctggcccctggcaacagcgctggggccttcctgatccgggagagcgagaccctgaagggcagcttcagcctgtctgtgcgggactttgatcctgtgcatggagatgtgatcaagcactacaagatccgcagcctggacaatggaggctactacatcagcccccgcatcaccttcccctgcatcagtgacatgatcaagcactaccagaagcaggctgatggcctgtgccggcggctggagaaggcctgcatcagccccaagccccagaagccctgggacaaggatgcctgggagatcccccgggagagcatcaagctggtgaagaggctgggcgccggccagtttggagaggtgtggatgggctactacaacaacagcaccaaggtggccgtgaagaccctgaagccaggcaccatgtctgtgcaggccttcctggaggaggccaacctgatgaagaccctgcagcacgacaagctggtgcggctgtatgctgtggtgacccgggaggagcccatctacatcatcacagagtacatggccaagggcagcctgctggacttcctgaagagtgatgaaggaggcaaggtgctgctgcccaagctgattgacttcagcgcccagattgctgagggcatggcctacattgaaaggaagaactacatccaccgggacctgcgggccgccaacgtgctggtgtctgagagcctgatgtgcaagattgctgactttggcctggcccgggtgattgaggacaatgagtacacagcccgggagggcgccaagttccccatcaagtggacagcccctgaggccatcaactttggctgcttcaccatcaagagtgatgtgtggagctttggcatcctgctgtatgaaattgtgacctacggcaagatcccctacccaggccgcaccaatgctgatgtgatgacagccctgagccagggctacaggatgccccgggtggagaactgcccagatgagctgtatgacatcatgaagatgtgctggaaggagaaggccgaggagcggcccacctttgactacctgcagagcgtgctggatgacttctacacagccacagagggccagtaccagcagcagccctag

SEQ ID NO: 175969 - DNA, 993 bp, synthetic construct
  misc_feature 1..993: note = Description of Artificial Sequence: Synthetic coding sequence
  source 1..993: mol_type = other DNA
atggctgctgtggacagcttctacctgctgtaccgggagatcgcccggagctgcaactgctacatggaggccctggccctggtgggcgcctggtacacagccaggaagagcatcaccgtcatctgtgacttctacagcctcatccggctgcacttcatcccccggctgggcagcagagctgacctgatcaagcagtatggccgctgggccgtggtgtctggggccacagatggcatcggcaaggcctatgcagaggagctggccagccggggcctgaacatcatcctgatcagcagaaatgaggagaagctgcaggtggtggccaaggacattgctgacacctacaaggtggagacagacatcatcgtggccgacttcagcagcggccgggagatctacctgcccatccgggaggccctgaaggacaaggatgtgggcatcctggtgaacaacgtgggcgtcttctacccctacccccagtacttcacccagctgtctgaggacaagctgtgggacatcatcaacgtgaacattgctgctgccagcctgatggtgcacgtggtgctgcccggcatggtggagaggaagaagggggccatcgtgaccatcagcagcggcagctgctgcaagcccaccccccagctggccgccttcagcgccagcaaggcctacctggaccacttcagccgggccctgcagtatgaatatgccagcaagggcatctttgtgcagagcctcatccccttctacgtggccacctccatgacagcccccagcaacttcctgcaccgctgctcctggctggtgcccagccccaaggtgtatgcccaccacgctgtgtccaccctgggcatcagcaagaggaccaccggctactggagccacagcatccagttcctgtttgcccagtacatgcctgagtggctgtgggtgtggggcgccaacatcctgaacagaagcctgaggaaggaggccctgagctgcacagcctag

SEQ ID NO: 175970 - DNA, 336 bp, synthetic construct
  misc_feature 1..336: note = Description of Artificial Sequence: Synthetic coding sequence
  source 1..336: mol_type = other DNA
atgggcagcagcagcttcctggtgctgatggtgtccctggtgctggtgaccctggtggccgtggagggcgtgaaggagggcatcgagaaggccggcgtgtgcccagctgacaacgtgcgctgcttcaagagtgaccccccccagtgccacacagaccaggactgcctgggggagaggaagtgctgctacctgcactgcggcttcaagtgtgtgattcctgtgaaggagctggaggagggcggcaacaaggatgaagatgtgtcccggccctacccagagcccggctgggaggccaagtgccccggcagcagcagcacccgctgcccccagaagtag

SEQ ID NO: 175971 - DNA, 675 bp, synthetic construct
  misc_feature 1..675: note = Description of Artificial Sequence: Synthetic coding sequence
  source 1..675: mol_type = other DNA
atgaggacccagagcctgctgctgctgggcgccctgctggccgtgggcagccagctgcctgctgtgtttggaaggaagaagggggagaagagcggcggctgccccccagatgatggcccctgcctgctgtctgtgcctgaccagtgtgtggaggacagccagtgccccctgaccaggaagtgctgctaccgggcctgcttccggcagtgtgtgccccgggtgtctgtgaagctgggcagctgcccagaggaccagctgcgctgcctgagccccatgaaccacctgtgccacaaggacagcgactgcagcggcaagaagcgctgctgccacagcgcctgtggccgggactgccgggaccctgcccggggcacagcccctggctgccccggccaggccaacagcgacctgggctctgtggccctgcacctgtcctggggccccacagagcgggtgcatgatggccggcctggggccctgcctgctggccagcactacctgtaccagcgctggttccagcccagcgacaaccactggccagctgacaccagcctgcagcccatccacccctggttcctgctgctgggcgtgaaggtgcacagcctgagcagcgaggagggcctgtgcatcacccctgtgctgtgcaccacagccatccgggccagccaccccagctag

SEQ ID NO: 175972 - DNA, 372 bp, synthetic construct
  misc_feature 1..372: note = Description of Artificial Sequence: Synthetic coding sequence
  source 1..372: mol_type = other DNA
atgaggacccagagcctgctgctgctgggcgccctgctggccgtgggcagccagctgcctgctgtgtttggaaggaagaagggggagaagagcggcggctgccccccagatgatggcccctgcctgctgtctgtgcctgaccagtgtgtggaggacagccagtgccccctgaccaggaagtgctgctaccgggcctgcttccggcagtgtgtgccccgggtgtctgtgaagctgggcagctgcccagaggaccagctgcgctgcctgagccccatgaaccacctgtgccacaaggacagcgactgcagcggcaagaagcgctgctgccacagcgcctgtggccgggactgccgggaccctgcccggggctag

SEQ ID NO: 175973 - DNA, 1647 bp, synthetic construct
  misc_feature 1..1647: note = Description of Artificial Sequence: Synthetic coding sequence
  source 1..1647: mol_type = other DNA
atgcctgccctgcggcccctgctgcccctgctgctgctgctgcggctgaccagcggggccggcctgctgcccggcctgggcagccaccctggggtgtgccccaaccagctgagccccaacctgtgggtggatgcccagagcacctgtgagcgggagtgcagccgggaccaggactgtgccgctgctgagaagtgctgcatcaacgtgtgtggcctgcacagctgtgtggccgcccgcttccctggcagccctgctgcccccaccacagctgccagctgtgagggctttgtgtgcccccagcagggcagtgactgtgacatctgggatggccagcctgtgtgccgctgccgggacagatgtgagaaggagcccagcttcacctgtgccagtgatggcctgacctactacaaccgctgctacatggatgctgaggcctgcctgcggggcctgcacctgcacatcgtgccctgcaagcacgtgctgtcctggccacccagcagccctggccccccagagaccacagcccggcccaccccaggagctgcccctgtgcccccagccctgtacagcagccccagcccccaggccgtgcaggtgggcggcacagccagcctgcactgtgatgtgtctggccggcccccacctgctgtgacctgggagaagcagagccaccagagagaaaatctcatcatgaggccagaccagatgtatggaaatgtggtggtgaccagcatcggccagctggtgctgtacaatgcccggccagaagatgctggcctgtacacctgcacagccagaaatgctgctggcctgctgcgggctgacttccccctgtctgtggtgcagcgggagcccgccagagatgctgcccccagcatcccagccccagctgagtgcctgcctgatgtgcaggcctgcaccggccccaccagcccccacctggtgctgtggcactatgacccccagaggggcggctgcatgaccttccctgcccggggctgtgatggagctgcccggggctttgagacctatgaggcctgccagcaggcctgtgcccggggccctggagatgcctgtgtgctgcctgctgtgcagggcccctgccggggctgggagccccgctgggcctacagccccctgctgcagcagtgccacccctttgtgtatggaggctgtgagggcaatggaaacaacttccacagccgggagagctgtgaagatgcctgccctgtgcccaggaccccaccctgccgggcctgccgcctgcggagcaagctggccctgagcctgtgccgcagtgactttgccatcgtgggccgcctgacagaggtgctggaggagcctgaggccgccggcggcatcgcccgggtggccctggaggatgtgctgaaggatgacaagatgggcctgaagttcctgggcaccaagtacctggaggtgaccctgagcggcatggactgggcctgcccctgccccaacatgacagctggagatggccccctggtgatcatgggagaggtgagagatggagtggccgtgctggatgctggcagctatgtgcgggccgccagcgagaagagggtgaagaagatcctggagctgctggagaagcaggcctgtgagctgctgaaccgcttccaggactag

SEQ ID NO: 175974 - DNA, 1731 bp, synthetic construct
  misc_feature 1..1731: note = Description of Artificial Sequence: Synthetic coding sequence
  source 1..1731: mol_type = other DNA
atgtgggccccccgctgccgccgcttctggagccgctgggagcaggtggccgccctgctgctgctgctgctgctgctgggcgtgcccccaagaagcctggccctgccccccatccgctacagccatgctggcatctgccccaatgacatgaaccccaacctgtgggtggatgcccagagcacctgcagaagagaatgtgaaacagaccaggagtgtgagacctatgagaagtgctgccccaacgtgtgtggcaccaagagctgtgtggccgcccgctacatggatgtgaagggcaagaagggccctgtgggcatgcccaaggaggccacctgtgaccacttcatgtgcctgcagcagggctctgaatgtgacatctgggatggccagcctgtgtgcaagtgcaaggacagatgtgagaaggagcccagcttcacctgtgccagtgatggcctgacctactacaaccgctgctacatggatgctgaggcctgcagcaagggcatcaccctggccgtggtgacctgccgctaccacttcacctggcccaacaccagccccccacctcctgagaccaccatgcaccccaccacagccagccctgagaccccagagctggacatggccgccccagccctgctgaacaaccctgtgcaccagagcgtgaccatgggagagaccgtgtccttcctgtgtgatgtggtgggccggcccaggcctgagatcacctgggagaagcagctggaggacagagaaaatgtggtgatgaggcccaaccacgtgagaggaaatgtggtggtgaccaacatcgcccagctggtgatctacaatgcccagctgcaggatgctggcatctacacctgcacagccagaaatgtggccggcgtgctgcgggctgacttccccctgtctgtggtgcggggccaccaggccgccgccaccagcgagagcagccccaatggaacagccttccctgctgctgaatgtctgaagcccccagacagcgaggactgtggggaggagcagacccgctggcactttgatgcccaggccaacaactgcctgaccttcaccttcggccactgccacaggaacctgaaccactttgagacctatgaggcctgcatgctggcctgcatgagcggccccctggccgcctgcagcctgcctgccctgcagggcccctgcaaggcctatgccccccgctgggcctacaacagccagacaggccagtgccagagctttgtgtatggaggctgtgagggcaatggaaacaactttgagagccgggaggcctgtgaggagagctgccccttcccccggggcaaccagcgctgccgggcctgcaagccccggcagaagctggtgaccagcttctgccgcagtgactttgtgatcctgggccgggtgtctgagctgacagaggagccagacagcggccgggccctggtgacagtggatgaggtgctgaaggatgagaagatgggcctgaagttcctgggccaggagcccctggaggtgaccctgctgcacgtggactgggcctgcccctgccccaacgtgacagtgtctgagatgcccctcatcatcatgggagaggtggatggcggcatggccatgctgcggccagacagctttgtgggcgccagcagcgcccggcgggtgaggaagctgcgggaggtgatgcacaagaagacctgtgatgtgctgaaggagttcctgggcctgcactag

SEQ ID NO: 175975 - DNA, 849 bp, synthetic construct
  misc_feature 1..849: note = Description of Artificial Sequence: Synthetic coding sequence
  source 1..849: mol_type = other DNA
atggatgtgaagggcaagaagggccctgtgggcatgcccaaggaggccacctgtgaccacttcatgtgcctgcagcagggctctgaatgtgacatctgggatggccagcctgtgtgcaagtgcaaggacagatgtgagaaggagcccagcttcacctgtgcccaggccaacaactgcctgaccttcaccttcggccactgccacaggaacctgaaccactttgagacctatgaggcctgcatgctggcctgcatgagcggccccctggccgcctgcagcctgcctgccctgcagggcccctgcaaggcctatgccccccgctgggcctacaacagccagacaggccagtgccagagctttgtgtatggaggctgtgagggcaatggaaacaactttgagagccgggaggcctgtgaggagagctgccccttcccccggggcaaccagcgctgccgggcctgcaagccccggcagaagctggtgaccagcttctgccgcagtgactttgtgatcctgggccgggtgtctgagctgacagaggagccagacagcggccgggccctggtgacagtggatgaggtgctgaaggatgagaagatgggcctgaagttcctgggccaggagcccctggaggtgaccctgctgcacgtggactgggcctgcccctgccccaacgtgacagtgtctgagatgcccctcatcatcatgggagaggtggatggcggcatggccatgctgcggccagacagctttgtgggcgccagcagcgcccggcgggtgaggaagctgcgggaggtgatgcacaagaagacctgtgatgtgctgaaggagttcctgggcctgcactag

SEQ ID NO: 175976 - DNA, 1509 bp, synthetic construct
  misc_feature 1..1509: note = Description of Artificial Sequence: Synthetic coding sequence
  source 1..1509: mol_type = other DNA
atgcccctggtgaagaggaacatcgagcccaggcacctgtgccgcggggccctgcctgagggcatcaccagcgagctggagtgtgtgaccaacagcaccctggccgccatcatccggcagctgagcagcctgagcaagcatgctgaggacatctttggagagctgttcaatgaggccaacaacttctacatccgggccaacagcctgcaggacagaattgaccggctggccgtgaaggtgacccagctggacagcacagtggaggaggtgtccctgcaggacatcaacatgaagaaggccttcaagagcagcacagtgcaggaccagcaggtggtgtccaagaacagcatccccaaccctgtggccgacatctacaaccagagcgacaagcccccacccctgaacatcctgaccccctacagagatgacaagaaggatggcctgaagttctacacagaccccagctacttctttgacctgtggaaggagaagatgctgcaggacacagaggacaagaggaaggagaagaggcggcagaaggagcagaagagaattgatggcaccacccgggaggtgaagaaggtgaggaaggccaggaacagacggcaggagtggaacatgatggcctatgacaaggagctgcggccagacaaccggctgagccagagcgtgtaccacggggccagcagcgagggcagcctgagcccagacaccaggagccacgccagtgatgtgacagactacagctacccagccacccccaaccacagcctgcacccccagcctgtgacccccagctatgctgctggagatgtgccccctcatggccctgccagccaggccgctgagcacgagtaccggccccccagcgccagcgcccggcacatggccctgaaccggccccagcagcccccacctcctcctccaccccaggcccctgagggcagccaggccagcgcccccatggccccagctgactatggcatgctgcctgcccagatcatcgagtactacaaccccagcggccccccacctcctcctcctcctcctgtgatccccagcgcccagacagcctttgtgagccccctgcagatgcccatgcagccccccttccctgccagcgccagcagcacccacgccgccccaccccacccccccagcacaggcctgctggtgacagcccctcctcctcctggccccccacctcctcctcctggccccccaggccctggcagcagcctgagcagcagccccatgcacggcccccctgtggccgaggccaagaggcaggagcccgcccagccccccatcagtgatgcccggagtgacctgctggccgccatccgcatgggcatccagctgaagaaggtgcaggagcagcgggagcaggaggccaagcgggagcctgtgggcaatgatgtggccaccatcctgagcagaagaattgctgtggagtacagcgacagtgatgatgattctgaatttgatgaaaatgactggagcgactag

SEQ ID NO: 175977 - DNA, 1500 bp, synthetic construct
  misc_feature 1..1500: note = Description of Artificial Sequence: Synthetic coding sequence
  source 1..1500: mol_type = other DNA
atgcccctggtgaagaggaacatcgagcccaggcacctgtgccgcggggccctgcctgagggcatcaccagcgagctggagtgtgtgaccaacagcaccctggccgccatcatccggcagctgagcagcctgagcaagcatgctgaggacatctttggagagctgttcaatgaggccaacaacttctacatccgggccaacagcctgcaggacagaattgaccggctggccgtgaaggtgacccagctggacagcacagtggaggaggtgtccctgcaggacatcaacatgaagaaggccttcaagagcagcacagtgcaggaccagcaggtggtgtccaagaacagcatccccaaccctgtggccgacatctacaaccagagcgacaagcccccacccctgaacatcctgaccccctacagagatgacaagaaggatggcctgaagttctacacagaccccagctacttctttgacctgtggaaggagaagatgctgcaggacacagaggacaagaggaaggagaagaggcggcagaagcgggagaagcacaagctgaaccccaacagaaaccagcaggtgaatgtgaggaaggtgaggaccaggaaggaggagtgggagaggaggaagatgggcatcgagttcatgtctgatgccaagaagctggagcaggccggcagcgccaaggaggacagagtgcccagcggcagccacgccagtgatgtgacagactacagctacccagccacccccaaccacagcctgcacccccagcctgtgacccccagctatgctgctggagatgtgcccccccacggccctgccagccaggccgctgagcacgagtacagacctccttctgccagcgcccggcacatggccctgaaccggccccagcagcccccacctcctcctccaccccaggcccctgagggcagccaggccagcgcccccatggccccagctgactatggcatgctgcctgcccagatcatcgagtactacaaccccagcggccccccacctcctcctcctcctcctgtgatccccagcgcccagacagcctttgtgagccccctgcagatgcccatgcagccccccttccctgccagcgccagcagcacccatgctgccccaccccacccccccagcacaggcctgctggtgacagcccctcctcctcctggccccccacctcctcctcctggccccccaggccctggcagcagcctgagcagcagccccatgcacggcccccctgtggccgaggccaagaggcaggagcccgcccagccccccatcagtgatgcccggagtgacctgctggccgccatccgcatgggcatccagctgaagaaggtgcaggagcagcgggagcaggaggccaagcgggagcctgtgggcaatgatgtggccaccatcctgagcagaagaattgctgtggagtacagcgacagtgatgatgacagcgagtttgatgaaaatgactggagcgactag

SEQ ID NO: 175978 - DNA, 786 bp, synthetic construct
  misc_feature 1..786: note = Description of Artificial Sequence: Synthetic coding sequence
  source 1..786: mol_type = other DNA
atggagggcggcctgggccgggctgtgtgcctgctgactggagccagccggggctttggaagaaccctggcccccctgctggccagcctgctgagccctggctctgtgctggtgctgagcgccagaaatgatgaggccctgcggcagctggaggccgagctgggcgctgagaggagcggcctgcgggtggtgcgggtgcctgctgacctgggcgctgaggccggcctgcagcagctgctgggcgccctgcgggagctgccccggcccaagggcctgcagaggctgctgctgatcaacaatgccggcagcctgggagatgtgtccaaaggatttgtggacctgagtgacagcacccaggtgaacaactactgggccctgaacctgacctccatgctgtgcctgaccagctctgtgctgaaggccttcccagacagccctggcctgaacagaacagtggtgaacatcagcagcctgtgtgccctgcagcccttcaagggctgggccctgtactgtgccggcaaggccgcccgggacatgctgttccaggtgctggccctggaggagcccaacgtgcgggtgctgaactatgcccctggccccctggacacagacatgcagcagctggcccgggagacctctgtggaccctgacatgaggaagggcctgcaggagctgaaggccaagggcaagctggtggactgcaaggtgtctgcccagaagctgctgagcctgctggagaaggatgagttcaagagcggggcccacgtggacttctatgacaagtag

SEQ ID NO: 175979 - DNA, 2430 bp, synthetic construct
  misc_feature 1..2430: note = Description of Artificial Sequence: Synthetic coding sequence
  source 1..2430: mol_type = other DNA
atggaggatgagcagcctgacagcctggagggctgggtgcctgtgcgggagggcctgtttgctgagcctgagcggcaccggctgcgcttcctggtggcctggaatggagctgagggcaagtttgctgtgacctgccacgacagaacagcccagcagaggcggctgcgggagggcgcccggctgggccctgagcctgagcccaagccagaggccgctgtgagccccagctcctgggccggcctgctgtctgctgctggcctgcggggggcccaccggcagctggccgccctgtggccacccctggagcgctgcttcccccggctgcccccagagctggatgtgggcggcggcggggcctggggcctgggcctgggcctgtgggccctgctgtggcccaccagggctggccctggagaggccgccctgcaggagctgtgtggccagctggagcgctacctgggcgctgctgctgatggctgcggcggggccaccgtgagagatgccctcttccctgctgagggcggcgctgctgactgtgagagcccccgggagttccgggagcgggccctgcgggcccgctgggtggaggctgatgcccggctgcggcaggtgatccagggccacggcaaggccaacaccatggtggccctgatgaatgtgtaccaggaggaggatgaggcctaccaggagctggtgacagtggccaccatgttcttccagtacctgctgcagcccttccgggccatgagggaggtggccaccctgtgcaagctggacatcctgaagagcctggatgaagatgacctgggcccccggcgggtggtggccctggagaaggaggccgaggagtggacccggcgggcagaggaggccgtggtgtccatccaggacatcaccgtgaactacttcaaggagaccgtgaaggccctggccggcatgcagaaggagatggagcaggatgccaagcgcttcggccaggccgcctgggccacagccatcccccggctggagaagctgcagctgatgctggcccgggagaccctgcagctgatgagggccaaggagctgtgcctgaaccacaagagagctgagatccagggcaagatggaggacctgcctgagcaggagaagaacaccaacgtggtggatgagctggagatccagttctatgagatccagctggagctgtatgaggtgaagtttgagatcctgaagaatgaggagatcctgctgaccacccagctggacagcctgaagaggctcatcaaggagaagcaggatgaggtggtgtactatgacccctgtgagaaccctgaggagctgaaggtgattgactgtgtggtgggcctgcaggatgacaagaacctggaggtgaaggagctgcggcggcagtgccagcagctggagagcaagaggggccgcatctgtgccaagagggccagcctgcggagcaggaaggaccagtgcaaggagaaccaccgcttccggctgcagcaggccgaggagagcatccgctacagccggcagcaccacagcatccagatgaagagggacaagatcaaggaggaggagcagaagaagaaggagtggatcaaccaggagcggcagaagaccctgcagaggctgcggagcttcaaggacaagaggctggcccagagcgtgaggaacaccagcggcagcgagcctgtggcccccaacctgcccagcgacctgagccagcagatgtgcctgcctgccagccatgctgtgtctgtcatccaccccagcagcaggaagacccggggcgtgcccctgtctgaggccggaaatgtgaagagccccaagtgccagaactgccacggcaacatccctgtgcaggtgtttgtgcctgtgggggaccagacccacagcaagagcagcgaggagctgagcctgcccccacctcctcctcctcctcctcctcctcctcctcctcctcctcctcctcctccacccctgcgggccctgagcagcagcagccaggccgccacccaccagaacctgggcttccgggcccctgtgaaggatgaccagccccggcccctggtgtgtgagagccctgctgagcggccccgggacagcctggagagcttcagctgccccggctccatggatgaggtgctggccagcctgcggcacggccgggcccccctgaggaaggtggaggtgcctgctgtgcggcccccccacgccagcatcaatgagcacatcctggccgccatccggcagggcgtgaagctgaagaaggtgcacccagacctgggccccaaccccagcagcaagcccaccagcaacagaaggaccagtgacctggagaggagcatcaaggccgccctgcagaggatcaagagggtgtctgctgacagtgaagaagattctgatgagcaggaccccggccagtgggatggatag

SEQ ID NO: 175980 - DNA, 1452 bp, synthetic construct
  misc_feature 1..1452: note = Description of Artificial Sequence: Synthetic coding sequence
  source 1..1452: mol_type = other DNA
atgcctgtgcccccacctcctcctccacccctgcccccacctcctccacccctgggcgcccctcctcctcctcctccttctgcccctcctgtgtccacagacaccagcagcctgcggcgggctgaccccaagggccgcagcgccctgctggccgacatccagcagggcacccggctgaggaaggtgacccagatcaatgacagaagtgccccccagatcgagagcagcaagggcaccaacaaggagggcggcggcagcgccaacaccaggggggccagcaccccacccaccctgggggacctgtttgctgggggcttccctgtgctgcggcctgctggccagagagatgtggccggcggcaagacaggccagggccctggcagccgggcccccagcccccggctgcccaacaagaccatcagcggccccctcatccccccagccagcccccggctgggcaacaccagcgaggcccatggagctgccaggacagccccaccccggcccaacgtgcctgcccctcctccacccaccccacctcctcctcctccacccctgcccccacccctgcccagcagcagccccatcaagacccccctggtgtccccacctggccccctgaccaagggcaacctgcctgtggtggcccctcctgtgccctgtgcccctcctcctcctcctcctcctcctccacccaccccaccacccctgcccccagcctctgtgctgagtgacaaggctgtgaagccccagctggcccccctgcacctgccccccatccccccacccctgcccctgctgcccccctgtggctacccaggcctgaaggccgagcccgccagccctgcccaggatgcccaggagcccccagcccctcctccacccctgcccccctatgccagctgcagcccccgggccagcctgcctgccccacccctgcccggggtgaacagcagcagcgagaccccaccacccctgccccccaagagccccagcttccaggccccaccccagaaggccggggcccaggccctgcctgcccccccagcccctcctggcagccagcccttcctgcagaagaagagacatggccggcctggggccggcggcggcaagctgaaccccccaccagcccccccagcccggagccccaccacagagctgagcagcaagagccagcaggccacagcctggacccccacccagcagcccggcggccagctgagaaatggcagcctgcacatcattgatgactttgagagcaagttcaccttccacagcgtggaggacttccccccaccagatgagtacaagccctgccagaagatctaccccagcaagatccccaggagcaggaccccaggcccctggctgcaggccgaggccgtgggccagagcagtgatgacatcaagggcaggaacagccagctgagcctgaagaccctgaggtag

SEQ ID NO: 175981 - DNA, 1452 bp, synthetic construct
  misc_feature 1..1452: note = Description of Artificial Sequence: Synthetic coding sequence
  source 1..1452: mol_type = other DNA
atgcctgtgcccccacctcctcctccacccctgcccccacctcctccacccctgggcgcccctcctcctcctcctccttctgcccctcctgtgtccacagacaccagcagcctgcggcgggctgaccccaagggccgcagcgccctgctggccgacatccagcagggcacccggctgaggaaggtgacccagatcaatgacagaagtgccccccagatcgagagcagcaagggcaccaacaaggagggcggcggcagcgccaacaccaggggggccagcaccccacccaccctgggggacctgtttgctgggggcttccctgtgctgcggcctgctggccagagagatgtggccggcggcaagacaggccagggccctggcagccgggcccccagcccccggctgcccaacaagaccatcagcggccccctcatccccccagccagcccccggctgggcaacaccagcgaggcccatggagctgccaggacagccccaccccggcccaacgtgcctgcccctcctccacccaccccacctcctcctcctccacccctgcccccacccctgcccagcagcagccccatcaagacccccctggtgtccccacctggccccctgaccaagggcaacctgcctgtggtggcccctcctgtgccctgtgcccctcctcctcctcctcctcctcctccacccaccccaccacccctgcccccagcctctgtgctgagtgacaaggctgtgaagccccagctggcccccctgcacctgccccccatccccccacccctgcccctgctgcccccctgtggctacccaggcctgaaggccgagcccgccagccctgcccaggatgcccaggagcccccagcccctcctccacccctgcccccctatgccagctgcagcccccgggccagcctgcctgccccacccctgcccggggtgaacagcagcagcgagaccccaccacccctgccccccaagagccccagcttccaggccccaccccagaaggccggggcccaggccctgcctgcccccccagcccctcctggcagccagcccttcctgcagaagaagagacatggccggcctggggccggcggcggcaagctgaaccccccaccagcccccccagcccggagccccaccacagagctgagcagcaagagccagcaggccacagcctggacccccacccagcagcccggcggccagctgagaaatggcagcctgcacatcattgatgactttgagagcaagttcaccttccacagcgtggaggacttccccccaccagatgagtacaagccctgccagaagatctaccccagcaagatccccaggagcaggaccccaggcccctggctgcaggccgaggccgtgggccagagcagtgatgacatcaagggcaggaacagccaggtgacccaggccagctgcctgtag

SEQ ID NO: 175982 - DNA, 1452 bp, synthetic construct; identical to SEQ ID NO: 175981
  misc_feature 1..1452: note = Description of Artificial Sequence: Synthetic coding sequence
  source 1..1452: mol_type = other DNA

SEQ ID NO: 175983 - DNA, 930 bp, synthetic construct
  misc_feature 1..930: note = Description of Artificial Sequence: Synthetic coding sequence
  source 1..930: mol_type = other DNA
atggctgtgaaccagagccacacagaaaatagaagaggagccctgatccccaacggggagagcctgctgaagaggagccccaacgtggagctgtccttcccccagaggtctgagggcagcaatgtgttcagcggcaggaagacaggcaccctcttcctgaccagctacagagtcatcttcatcaccagctgcagcatcagtgaccccatgctgtccttcatgatgccctttgacctgatgaccaacctgactgtggagcagcctgtgtttgctgccaacttcatcaagggcaccatccaggccgccccctacggcggctgggagggccaggccaccttcaagctggtgttcagaaatggagatgccattgaatttgcccagctgatggtgaaggccgccagcgctgctgcccggggcttccccctgcggaccctgaatgactggttcagctccatgggcatctacgtgatcaccggggagggcaacatgtgcaccccccagatgccctgcagcgtgattgtgtatggagcccccccagctggctacggggcccctcctcctggctatggagcccccccagctggctacggggcccagcctgtgggcaatgaaggcccccctgtgggctaccgggccagccctgtgcgctatggagccccacccctgggctacggggcccctcctgctggctatggagccccacccctgggctacggggccccacccctgggctacggcaccccacccctgggctacggggccccacccctgggctatggagcccccccagctggaaatgaaggacctcctgctggctaccgggccagccctgctggcagcggggcccggccccaggagagcacagctgcccaggccccagaaaatgaggccagcctgcccagcgccagcagcagccaggtgcacagctag

SEQ ID NO: 175984 - DNA, 930 bp, synthetic construct; identical to SEQ ID NO: 175983
  misc_feature 1..930: note = Description of Artificial Sequence: Synthetic coding sequence
  source 1..930: mol_type = other DNA

SEQ ID NO: 175985 - DNA, 930 bp, synthetic construct; identical to SEQ ID NO: 175983
  misc_feature 1..930: note = Description of Artificial Sequence: Synthetic coding sequence
  source 1..930: mol_type = other DNA

SEQ ID NO: 175986 - DNA, 708 bp, synthetic construct
  misc_feature 1..708: note = Description of Artificial Sequence: Synthetic coding sequence
  source 1..708: mol_type = other DNA
atgccctttgacctgatgaccaacctgactgtggagcagcctgtgtttgctgccaacttcatcaagggcaccatccaggccgccccctacggcggctgggagggccaggccaccttcaagctggtgttcagaaatggagatgccattgaatttgcccagctgatggtgaaggccgccagcgctgctgcccggggcttccccctgcggaccctgaatgactggttcagctccatgggcatctacgtgatcaccggggagggcaacatgtgcaccccccagatgccctgcagcgtgattgtgtatggagcccccccagctggctacggggcccctcctcctggctatggagcccccccagctggctacggggcccagcctgtgggcaatgaaggcccccctgtgggctaccgggccagccctgtgcgctatggagccccacccctgggctacggggcccctcctgctggctatggagccccacccctgggctacggggccccacccctgggctacggcaccccacccctgggctacggggccccacccctgggctatggagcccccccagctggaaatgaaggacctcctgctggctaccgggccagccctgctggcagcggggcccggccccaggagagcacagctgcccaggccccagaaaatgaggccagcctgcccagcgccagcagcagccaggtgcacagctag

SEQ ID NO: 175987 - DNA, 1401 bp, synthetic construct
  misc_feature 1..1401: note = Description of Artificial Sequence: Synthetic coding sequence
  source 1..1401: mol_type = other DNA
atgccctatgagatcaagaaggtgtttgccagcctgccccaggtggagcggggcgtgtccaagatcattggaggagaccccaagggcaacaacttcctgtacaccaacgggaaatgtgtgatcctgagaaatattgatgaccacagcagatttgtgaactgtgtgcgcttctccccagatggcaacagatttgccacagccagcgcagatggccagatctacatctatgatggcaagacaggagagaaggtgtgtgccctgggcggcagcaaggcccatgatggcggcatctatgccatctcctggagcccagacagcacccacctgctgagcgccagcggggacaagaccagcaagatctgggatgtgtctgtgaacagcgtggtgtccaccttccccatgggcagcacagtgctggaccagcagctgggctgcctgtggcagaaggaccacctgctgtctgtgtccctgagcggctacatcaactacctggacaggaacaaccccagcaagcccctgcacgtgatcaagggccacagcaagagcatccagtgcctgactgtgcacaagaatggaggcaagagctacatctacagcggcagccatgatggccacatcaactactgggacagcgagactggagaaaatgacagctttgctgggaagggccacaccaaccaggtgtccaggatgacagtggatgagagcggccagctgatcagctgcagcatggatgacacagtgcgctacaccagcctgatgctgcgggactacagcggccagggcgtggtgaagctggatgtgcagcccaagtgtgtggccgtgggccctgggggctatgctgtggtggtgtgcatcggccagatcgtgctgctgaaggaccagaggaagtgcttcagcattgacaaccctggctatgagcctgaggtggtggccgtgcaccctggaggagacacagtggccatcggcggcgtggatggaaatgtgcggctgtacagcatcctgggcaccaccctgaaggatgagggcaagctgctggaggccaagggccctgtgacagatgtggcctacagccatgatggagccttcctggccgtgtgtgatgccagcaaggtggtgaccgtcttctctgtggctgatggctacagcgagaacaacgtgttctacggccaccacgccaagatcgtgtgcctggcctggagcccagacaatgagcactttgccagcggcggcatggacatgatggtgtatgtgtggaccctgagtgaccctgagaccagggtgaagatccaggatgcccaccggctgcaccacgtgagcagcctggcctggctggatgagcacaccctggtgaccaccagccatgatgcctctgtgaaggagtggaccatcacctactag

SEQ ID NO: 175988 - DNA, 1821 bp, synthetic construct
  misc_feature 1..1821: note = Description of Artificial Sequence: Synthetic coding sequence
  source 1..1821: mol_type = other DNA
atgccctatgagatcaagaaggtgtttgccagcctgccccaggtggagcggggcgtgtccaagatcattggaggagaccccaagggcaacaacttcctgtacaccaacgggaaatgtgtgatcctgagaaatattgacaacccagccctggccgacatctacacagaacatgcccaccaggtggtggtggccaagtatgcccccagcggcttctacatcgccagcggagatgtgtctgggaagctgcgcatctgggacaccacccagaaggagcacctgctgaagtatgagtaccagccctttgctgggaagatcaaggacatcgcctggacagaggacagcaagagaattgctgtggtgggggagggccgggagaagtttggagctgtgttcctgtgggacagcggcagctctgtgggggagatcaccggccacaacaaggtgatcaacagcgtggacatcaagcagagccggccctaccgcctggccaccggcagtgatgacaactgtgccgccttctttgagggcccccccttcaagttcaagttcaccatcggggaccacagcagatttgtgaactgtgtgcgcttctccccagatggcaacagatttgccacagccagcgcagatggccagatctacatctatgatggcaagacaggagagaaggtgtgtgccctgggcggcagcaaggcccatgatggcggcatctatgccatctcctggagcccagacagcacccacctgctgagcgccagcggggacaagaccagcaagatctgggatgtgtctgtgaacagcgtggtgtccaccttccccatgggcagcacagtgctggaccagcagctgggctgcctgtggcagaaggaccacctgctgtctgtgtccctgagcggctacatcaactacctggacaggaacaaccccagcaagcccctgcacgtgatcaagggccacagcaagagcatccagtgcctgactgtgcacaagaatggaggcaagagctacatctacagcggcagccatgatggccacatcaactactgggacagcgagactggagaaaatgacagctttgctgggaagggccacaccaaccaggtgtccaggatgacagtggatgagagcggccagctgatcagctgcagcatggatgacacagtgcgctacaccagcctgatgctgcgggactacagcggccagggcgtggtgaagctggatgtgcagcccaagtgtgtggccgtgggccctgggggctatgctgtggtggtgtgcatcggccagatcgtgctgctgaaggaccagaggaagtgcttcagcattgacaaccctggctatgagcctgaggtggtggccgtgcaccctggaggagacacagtggccatcggcggcgtggatggaaatgtgcggctgtacagcatcctgggcaccaccctgaaggatgagggcaagctgctggaggccaagggccctgtgacagatgtggcctacagccatgatggagccttcctggccgtgtgtgatgccagcaaggtggtgaccgtcttctctgtggctgatggctacagcgagaacaacgtgttctacggccaccacgccaagatcgtgtgcctggcctggagcccagacaatgagcactttgccagcggcggcatggacatgatggtgtatgtgtggaccctgagtgaccctgagaccagggtgaagatccaggatgcccaccggctgcaccacgtgagcagcctggcctggctggatgagcacaccctggtgaccaccagccatgatgcctctgtgaaggagtggaccatcacctactag

SEQ ID NO: 175989 - DNA, 1326 bp, synthetic construct
  misc_feature 1..1326: note = Description of Artificial Sequence: Synthetic coding sequence
  source 1..1326: mol_type = other DNA
atgctgacctgggtgtggtacctgatcatgacctctgtgctgcaggcctctgtgtcctctgtggaccacagcagatttgtgaactgtgtgcgcttctccccagatggcaacagatttgccacagccagcgcagatggccagatctacatctatgatggcaagacaggagagaaggtgtgtgccctgggcggcagcaaggcccatgatggcggcatctatgccatctcctggagcccagacagcacccacctgctgagcgccagcggggacaagaccagcaagatctgggatgtgtctgtgaacagcgtggtgtccaccttccccatgggcagcacagtgctggaccagcagctgggctgcctgtggcagaaggaccacctgctgtctgtgtccctgagcggctacatcaactacctggacaggaacaaccccagcaagcccctgcacgtgatcaagggccacagcaagagcatccagtgcctgactgtgcacaagaatggaggcaagagctacatctacagcggcagccatgatggccacatcaactactgggacagcgagaccggggagaatgacagctttgctgggaagggccacaccaaccaggtgtccaggatgacagtggatgaaagtggccagctgatcagctgcagcatggatgacacagtgcgctacaccagcctgatgctgcgggactacagcggccagggcgtggtgaagctggatgtgcagcccaagtgtgtggccgtgggccctgggggctatgctgtggtggtgtgcatcggccagatcgtgctgctgaaggaccagaggaagtgcttcagcattgacaaccctggctatgagcctgaggtggtggccgtgcaccctggaggagacacagtggccatcggcggcgtggatggaaatgtgcggctgtacagcatcctgggcaccaccctgaaggatgagggcaagctgctggaggccaagggccctgtgacagatgtggcctacagccatgatggagccttcctggccgtgtgtgatgccagcaaggtggtgacagtgttttctgtggctgatggctacagtgaaaataatgtgttctacggccaccacgccaagatcgtgtgcctggcctggagcccagacaatgagcactttgccagcggcggcatggacatgatggtgtatgtgtggaccctgagtgaccctgagaccagggtgaagatccaggatgcccaccggctgcaccacgtgagcagcctggcctggctggatgagcacaccctggtgaccaccagccatgatgcctctgtgaaggagtggaccatcacctactag

SEQ ID NO: 175990 - DNA, 531 bp, synthetic construct
  misc_feature 1..531: note = Description of Artificial Sequence: Synthetic coding sequence
  source 1..531: mol_type = other DNA
ccagctgagacagagaaggtgtttgccagcctgccccaggtggagcggggcgtgtccaagatcatcggcggggaccccaagggcaacaacttcctgtacaccaatggaaaatgtgtgatcctgaggaacattgatgaccacagcagatttgtgaactgtgtgcgcttctccccagatggcaacagatttgccacagccagcgcagatggccagtgcctgcctgcccctgtgacagcccagagccggcggctgcccaatgccagcccagacatgcagaacctggacatcgccctgcccaccagcgctgacagcagcagcgagcccaagccccagagcatggagaagctgcccccctggagcgcccacttcccctgggccccccgcttctggaccagctcctgggccgcctatggaagaaggaccacctgcagcgtgagcccctgccccggcaccagcaccatctggacagagaccaccccagccagcccctgcaccagcagccgggtgacagtgaacagaagctctgtgtag

SEQ ID NO: 175991 - DNA, 1821 bp, synthetic construct; identical to SEQ ID NO: 175988
  misc_feature 1..1821: note = Description of Artificial Sequence: Synthetic coding sequence
  source 1..1821: mol_type = other DNA

SEQ ID NO: 175992 - DNA, 1401 bp, synthetic construct; identical to SEQ ID NO: 175987
  misc_feature 1..1401: note = Description of Artificial Sequence: Synthetic coding sequence
  source 1..1401: mol_type = other DNA

SEQ ID NO: 175993 - DNA, 3675 bp, synthetic construct
  misc_feature 1..3675: note = Description of Artificial Sequence: Synthetic coding sequence
  source 1..3675: mol_type = other DNA
atgctgccctacacagtgaacttcaaggtgtctgcccggaccctgaccggggccctgaatgcccacaacaaggctgctgtggactggggctggcagggcctgattgcctacggctgccacagcctggtggtggtgattgacagcatcacagcccagaccctgcaggtgctggagaagcacaaggcagatgtggtgaaggtgaagtgggcccgggagaactaccaccacaacatcggcagcccctactgcctgcggctggccagcgcagatgtgaatggcaagatcatcgtgtgggatgtggccgccggcgtggcccagtgtgagatccaggagcacgccaagcccatccaggatgtgcagtggctgtggaaccaggatgccagccgggacctgctgctggccatccacccccccaactacatcgtgctgtggaatgctgacaccggcaccaagctgtggaagaagagctatgctgacaacatcctgtccttctcctttgacccctttgaccccagccacctgaccctgctgaccagcgagggcatcgtgttcatcagtgacttcagccccagcaagcccccatctggccctgggaagaaggtgtacatcagcagcccccacagcagccctgcccacaacaagctggccacagccactggagccaagaaggccctgaacaaggtgaagatcctgatcacccaggagaagcccagcgctgagttcatcaccctgaatgactgcctgcagctggcctacctgcccagcaagaggaaccacatgctgctgctgtacccccgggagatcctgatcctggacctggaggtgaaccagacagtgggcgtcatcgccatcgagaggactggagtgcccttcctgcaggtgatcccctgcttccagagagatggcctcttctgcctgcatgaaaatggctgcatcaccctgcgggtgagaagaagctacaacaacatcttcaccaccagcaatgaggagccagaccctgaccctgtgcaggagctgacctatgacctgcggagccagtgtgatgccatccgggtgaccaagacagtgcggcccttctccatggtgtgctgccctgtgaatgaaaatgctgctgccctggtggtgtctgatggccgggtgatgatctgggagctgaagtctgctgtgtgcaacagaaacagcaggaacagcagcagtggagtgagccccctgtacagccctgtgtccttctgtggcatccctgtgggcgtgctgcagaacaagctgcctgacctgagcctggacaacatgattggccagagcgccatcgccggggaggagcacccccggggcagcatcctgcgggaggtgcacctgaagttcctgctgaccggcctgctgagcggcctgcctgccccccagtttgccatccgcatgtgcccccccctgaccaccaagaacatcaagatgtaccagcccctgctggccgtgggcaccagcaatggatctgtgctggtgtaccacctgaccagcggcctgctgcacaaggagctgagcatccacagctgtgaggtgaagggcatcgagtggaccagcctgaccagcttcctgagctttgccaccagcacccccaacaacatgggcctggtgagaaatgagctgcagctggtggacctgcccaccggccgcagcatcgccttccggggggagagaggaaatgatgaaagtgccatcgagatgatcaaggtgagccacctgaagcagtacctggccgtggtgttccgggacaagcccctggagctgtgggatgtgaggacctgcaccctgctgcgggagatgagcaagaacttccccaccatcacagccctggagtggagccccagccacaacctgaagagcctgaggaagaagcagctggccacccgggaggccatggcccggcagacagtggtgtctgacacagagctgagcatcgtggagagcagcgtcatcagcctgctgcaggaggccgagagcaagtctgagctgagccagaacatcagcgcccgggagcactttgtgttcacagacattgatggccaggtgtaccacctgactgtggagggcaacagcgtgaaggacagcgcccgcatccccccagatggctccatgggcagcatcacctgcatcgcctggaagggggacaccctggtgctgggggacatggatggcaacctgaacttctgggacctgaagggccgggtgtcccggggcatccccacccaccgctcctgggtgaggaagatccgctttgcccctggaaaaggaaaccagaagctgattgccatgtacaatgatggagctgaggtgtgggacaccaaggaggtgcagatggtgagcagcctgcggagcggcagaaatgtgaccttccgcatcctggatgtggactggtgcaccagtgacaaggtgatcctggccagtgatgatggctgcatccgggtgctggagatgtccatgaagagcgcctgcttcaggatggatgagcaggagctgacagagcctgtgtggtgcccctacctgctggtgccccgggccagcctggccctgaaggccttcctgctgcaccagccctggaatggccagtacagcctggacatcagccacgtggactacccagaaaatgaggagatcaagaacctgctgcaggagcagctgaacagcctgagcaatgacatcaagaagctgctgctggaccctgagttcaccctgctgcagcgctgcctgctggtgtcccggctgtatggagatgagagcgagctgcacttctggacagtggccgcccactacctgcacagcctgagccaggagaagagcgccagcaccacagcccccaaggaggccgccccccgggacaagctgagcaaccccctggacatctgctatgatgtgctgtgtgaaaatgcctacttccagaagttccagctggagcgggtgaacctgcaggaggtgaagaggagcacctatgaccacaccaggaaatgtacagaccagctgctgctgctgggccagacagacagagctgtgcagctgctgctggagaccagcgctgacaaccagcactactactgtgacagcctgaaggcctgcctggtgaccaccgtgaccagcagcggccccagccagagcaccatcaagctggtggccaccaacatgattgccaacgggaagctggccgagggcgtgcagctgctgtgcctgattgacaaggctgctgatgcctgccgctacctgcagacctacggggagtggaacagagctgcctggctggccaaggtgcggctgaaccctgaggagtgtgctgatgtgctgcggcgctgggtggaccacctgtgcagcccccaggtgaaccagaagagcaaggccctgctggtgctgctgagcctgggctgcttcttctctgtggccgagaccctgcacagcatgagatactttgacagagctgccctgtttgtggaggcctgcctgaagtatggagcctttgaggtgacagaggacacagagaagctgatcacagccatctatgctgactatgcccggagcctgaagaacctgggcttcaagcagggcgctgtgctgtttgccagcaaggccggggccgccggcaaggacctgctgaatgagctggagagccccaaggaggagcccatcgaggagtag

SEQ ID NO: 175994 - DNA, 1371 bp, synthetic construct; identical to SEQ ID NO: 147473
  misc_feature 1..1371: note = Description of Artificial Sequence: Synthetic coding sequence
  source 1..1371: mol_type = other DNA

SEQ ID NO: 175995 - DNA, 1458 bp, synthetic construct; identical to SEQ ID NO: 163030
  misc_feature 1..1458: note = Description of Artificial Sequence: Synthetic coding sequence
  source 1..1458: mol_type = other DNA

SEQ ID NO: 175996 - DNA, 1893 bp, synthetic construct
  misc_feature 1..1893: note = Description of Artificial Sequence: Synthetic coding sequence
  source 1..1893: mol_type = other DNA
atggaggccgtggtgctgccctggcagatctttggagtgcgggagctgcctgtggagcggggcgtgaccatgaagggccccaggctcttccgggcccctggccacgtgcccaccggcctgaagtgccacccagaccaggagcacatgatctaccccctgggctgcaccgtgctgatccaggccatcaacaccaaggagcagaacttcctgcagggccacggcaacaacgtgtcctgcctggccatcagccgctctggagagtacatcgccagcggccaggtgaccttcatgggcttcaaggctgacatcatcctgtgggactacaagaaccgggagctgctggcccggctgagcctgcacaagggcaagattgaggccctggccttcagccccaatgacctgtacctggtgtccctgggcggcccagatgatggctctgtggtggtgtggagcatcgccaagagagatgccatctgtggcagccctgctgctggcctgaatgtgggcaatgccaccaacgtcatcttcagccgctgcagagatgagatgttcatgacagctggaaatggcaccatccgggtgtgggagctggacctgcccaacaggaagatctggcccacagagtgccagacaggccagctgaagagaattgtgatgagcattggagtggatgatgatgacagcttcttctacctgggcaccaccaccggggacatcctgaagatgaaccccaggaccaagctgctgacagatgtgggccctgccaaggacaagttcagcctgggcgtgtctgccatccgctgcctgaagatgggcggcctgctggtgggcagcggggccggcctgctggtgttctgcaagagccctggctacaagcccatcaagaagatccagctgcagggcggcatcaccagcatcaccctgcggggggagggccaccagttcctggtgggcacagaggagagccacatctacagagtgtccttcacagacttcaaggagaccctgattgccacctgccactttgatgctgtggaggacatcgtgttccccttcggcacagctgagctgtttgccacctgtgccaagaaggacatccgggtgtggcacaccagcagcaaccgggagctgctgcgcatcaccgtgcccaacatgacctgccacggcatcgacttcatgagagatggcaagagcatcatcagcgcctggaatgatggcaagatccgggcctttgcccctgagaccggccgcctgatgtatgtgatcaacaatgcccaccgcatcggcgtgacagccatcgccaccaccagtgactgcaagagggtcatcagcggcggcggggagggggaggtgcgggtgtggcagatcggctgccagacccagaagctggaggaggccctgaaggagcacaagagctctgtgtcctgcatccgggtgaagagaaataatgaagaatgtgtgacagccagcacagatggcacctgcatcatctgggacctggtgcggctgcggaggaaccagatgatcctggccaacaccctcttccagtgtgtgtgctaccaccctgaggagttccagatcatcaccagcggcacagacaggaagatcgcctactgggaggtgtttgatggcaccgtcatccgggagctggagggcagcctgagcggcagcatcaatggcatggacatcacccaggagggcgtgcactttgtgactggaggaaatgaccacctggtgaaggtgtgggactacaatgaaggagaggtgacccacgtgggcgtgggccacagcggcaacatcacccgcatccgcatcagccctggcaaccagtacatcgtgtctgtgtctgcagatggagccatcctgcgctggaagtacccctacaccagctag

SEQ ID NO: 175997 - DNA, 1863 bp, synthetic construct
  misc_feature 1..1863: note = Description of Artificial Sequence: Synthetic coding sequence
  source 1..1863: mol_type = other DNA
atggacaacaagatcagccctgaggcccaggtggccgagctggagctggatgctgtgattggcttcaatggacatgtgcccaccggcctgaagtgccacccagaccaggagcacatgatctaccccctgggctgcaccgtgctgatccaggccatcaacaccaaggagcagaacttcctgcagggccacggcaacaacgtgtcctgcctggccatcagccgctctggagagtacatcgccagcggccaggtgaccttcatgggcttcaaggctgacatcatcctgtgggactacaagaaccgggagctgctggcccggctgagcctgcacaagggcaagattgaggccctggccttcagccccaatgacctgtacctggtgtccctgggcggcccagatgatggctctgtggtggtgtggagcatcgccaagagagatgccatctgtggcagccctgctgctggcctgaatgtgggcaatgccaccaacgtcatcttcagccgctgcagagatgagatgttcatgacagctggaaatggcaccatccgggtgtgggagctggacctgcccaacaggaagatctggcccacagagtgccagacaggccagctgaagagaattgtgatgagcattggagtggatgatgatgacagcttcttctacctgggcaccaccaccggggacatcctgaagatgaaccccaggaccaagctgctgacagatgtgggccctgccaaggacaagttcagcctgggcgtgtctgccatccgctgcctgaagatgggcggcctgctggtgggcagcggggccggcctgctggtgttctgcaagagccctggctacaagcccatcaagaagatccagctgcagggcggcatcaccagcatcaccctgcggggggagggccaccagttcctggtgggcacagaggagagccacatctacagagtgtccttcacagacttcaaggagaccctgattgccacctgccactttgatgctgtggaggacatcgtgttccccttcggcacagctgagctgtttgccacctgtgccaagaaggacatccgggtgtggcacaccagcagcaaccgggagctgctgcgcatcaccgtgcccaacatgacctgccacggcatcgacttcatgagagatggcaagagcatcatcagcgcctggaatgatggcaagatccgggcctttgcccctgagaccggccgcctgatgtatgtgatcaacaatgcccaccgcatcggcgtgacagccatcgccaccaccagtgactgcaagagggtcatcagcggcggcggggagggggaggtgcgggtgtggcagatcggctgccagacccagaagctggaggaggccctgaaggagcacaagagctctgtgtcctgcatccgggtgaagagaaataatgaagaatgtgtgacagccagcacagatggcacctgcatcatctgggacctggtgcggctgcggaggaaccagatgatcctggccaacaccctcttccagtgtgtgtgctaccaccctgaggagttccagatcatcaccagcggcacagacaggaagatcgcctactgggaggtgtttgatggcaccgtcatccgggagctggagggcagcctgagcggcagcatcaatggcatggacatcacccaggagggcgtgcactttgtgactggaggaaatgaccacctggtgaaggtgtgggactacaatgaaggagaggtgacccacgtgggcgtgggccacagcggcaacatcacccgcatccgcatcagccctggcaaccagtacatcgtgtctgtgtctgcagatggagccatcctgcgctggaagtacccctacaccagctag

SEQ ID NO: 175998 - DNA, 1659 bp, synthetic construct
  misc_feature 1..1659: note = Description of Artificial Sequence: Synthetic coding sequence
  source 1..1659: mol_type = other DNA
atggacaacaagatcagccctgaggcccaggtggccgagctggagctggatgctgtgattggcttcaatgacatcatcctgtgggactacaagaaccgggagctgctggcccggctgagcctgcacaagggcaagattgaggccctggccttcagccccaatgacctgtacctggtgtccctgggcggcccagatgatggctctgtggtggtgtggagcatcgccaagagagatgccatctgtggcagccctgctgctggcctgaatgtgggcaatgccaccaacgtcatcttcagccgctgcagagatgagatgttcatgacagctggaaatggcaccatccgggtgtgggagctggacctgcccaacaggaagatctggcccacagagtgccagacaggccagctgaagagaattgtgatgagcattggagtggatgatgatgacagcttcttctacctgggcaccaccaccggggacatcctgaagatgaaccccaggaccaagctgctgacagatgtgggccctgccaaggacaagttcagcctgggcgtgtctgccatccgctgcctgaagatgggcggcctgctggtgggcagcggggccggcctgctggtgttctgcaagagccctggctacaagcccatcaagaagatccagctgcagggcggcatcaccagcatcaccctgcggggggagggccaccagttcctggtgggcacagaggagagccacatctacagagtgtccttcacagacttcaaggagaccctgattgccacctgccactttgatgctgtggaggacatcgtgttccccttcggcacagctgagctgtttgccacctgtgccaagaaggacatccgggtgtggcacaccagcagcaaccgggagctgctgcgcatcaccgtgcccaacatgacctgccacggcatcgacttcatgagagatggcaagagcatcatcagcgcctggaatgatggcaagatccgggcctttgcccctgagaccggccgcctgatgtatgtgatcaacaatgcccaccgcatcggcgtgacagccatcgccaccaccagtgactgcaagagggtcatcagcggcggcggggagggggaggtgcgggtgtggcagatcggctgccagacccagaagctggaggaggccctgaaggagcacaagagctctgtgtcctgcatccgggtgaagagaaataatgaagaatgtgtgacagccagcacagatggcacctgcatcatctgggacctggtgcggctgcggaggaaccagatgatcctggccaacaccctcttccagtgtgtgtgctaccaccctgaggagttccagatcatcaccagcggcacagacaggaagatcgcctactgggaggtgtttgatggcaccgtcatccgggagctggagggcagcctgagcggcagcatcaatggcatggacatcacccaggagggcgtgcactttgtgactggaggaaatgaccacctggtgaaggtgtgggactacaatgaaggagaggtgacccacgtgggcgtgggccacagcggcaacatcacccgcatccgcatcagccctggcaaccagtacatcgtgtctgtgtctgcagatggagccatcctgcgctggaagtacccctacaccagctag

SEQ ID NO: 175999 - DNA, 3969 bp, synthetic construct
  misc_feature 1..3969: note = Description of Artificial Sequence: Synthetic coding sequence
  source 1..3969: mol_type = other DNA
atggcctggatgacctacatcagcaactggtttgagcaggatgactggtatgagggcctgcagagggccaacatgagccaggtgcggcaggtgggcctgctggccgccggctgccagccctggaacaaggatgtgtgtgccgccagcggggacagatttgcctactgtgccaccctggccatctacatctaccagctggaccaccgctacaatgagttcaagctgcacgccatcatgtctgagcacaagaagaccatcacagccatctcctggtgcccccacaacccagacctgtttgccagcggcagcacagacaacctggtgatcatctggaatgtggccgagcagaaggtgattgccaagctggacagcaccaagggcatcccagccagcctgtcctggtgctggaatgcagaagatgtggtggcctttgtgagccaccggggccccctcttcatctggaccatcagcggcccagattctggagtcatcgtgcacaaggatgcccacagcttcctgagtgacatctgcatgttccgctggcacacccaccagaagggcaaggtggtgtttggccacattgatggcagcctgagcatcttccaccctggcaacaagaaccagaagcacgtgctgcggcctgagagcctggagggcacagatgaagaagatcctgtgacagccctggagtgggaccccctgagcacagactacctgctggtggtgaacctgcactacggcatccggctggtggacagcgagagcctgagctgcatcaccaccttcaacctgcccagcgctgctgcctctgtgcagtgcctggcctgggtgcccagcgcccctggcatgttcatcaccggggacagccaggtgggcgtgctgcgcatctggaatgtgtccaggaccacccccatcgacaacctgaagctgaagaagacaggcttccactgcctgcacgtgctgaacagcccccccaggaagaagttctctgtgcagagccccaccaagaaccactacaccagcagcaccagcgaggccgtgcccccacccaccctgacccagaaccaggccttcagcctgcccccaggccatgctgtgtgctgcttcctggatggaggagtgggcctgtatgacatgggcgccaagaagtgggacttcctgcgggacctgggccacgtggagaccatctttgactgcaagttcaagccagatgaccccaacctgctggccacagccagctttgatggcaccatcaaggtgtgggacatcaacaccctgacagctgtgtacaccagccctggaaatgaaggagtcatctacagcctgtcctgggcccctgggggcctgaactgcatcgccggcggcaccagcagaaatggagccttcatctggaatgtgcagaagggcaagatcatccagcgcttcaatgagcacggcaccaacggcatcttctgcatcgcctggagccacaaggacagcaagagaattgccacctgcagcagtgatggcttctgcatcatccgcaccattgatggcaaggtgctgcacaagtacaagcaccctgctgctgtgtttggctgtgactggagccagaacaacaaggacatgattgccaccggctgtgaggacaccaacgtgcgggtgtactacgtggccaccagcagtgaccagcccctgaaggtgttttctggccacacagccaaggtgttccacgtgaagtggagccccctgcgggagggcatcctgtgcagcggcagtgatgatggcaccgtgcgcatctgggactacacccaggatgcctgcatcaacatcctgaatggccacacagcccctgtgcggggcctgatgtggaacacagagatcccctacctgctgatcagcggctcctgggactacaccatcaaggtgtgggacacccgggagggcacctgtgtggacacagtgtatgaccatggagcagatgtgtatggcctgacctgccaccccagccggcccttcaccatggccagctgcagccgggacagcacagtgcggctgtggagcctgacagccctggtgacccctgtgcagatcaacatcctggccgaccgctcctgggaggagatcatcggcaacacagattatgccatcgagcccggcaccccacccctgctgtgtgggaaggtgtcccgggacatccggcaggagattgagaagctgacagccaacagccaggtgaagaagctgcgctggttctctgaatgtctgagccccccaggcggcagtgacaacctgtggaacctggtggccgtcatcaagggccaggatgacagcctgctgccccagaactactgcaagggcatcatgcacctgaagcacctgatcaagttccgcaccagcgaggcccaggagctgaccaccgtgaagatgagcaagtttggaggcggcatcggcgtgcctgccaaggaggagcggctgaaggaggccgctgagatccacctgcggctgggccagatccagcgctactgtgagctgatggtggagctgggggagtgggacaaggccctgagcatcgcccctggggtgtctgtgaagtactggaagaagctgatgcagaggagagctgaccagctgatccaggaggacaaggatgatgtgatcccctactgcatcgccatcggagatgtgaagaagctggtgcacttcttcatgagccggggccagctgaaggaggccctgctggtggcccaggccgcctgtgagggcaacatgcagcccctgcacgtgtctgtgcccaagggggccagctacagtgatgacatctacaaggaggacttcaatgagctgctgcacaaggtgtccaaggagctggccgagtggtacttccaggacggccgggctgtgctggccgcctgctgccacctggccatcgacaacatcgagctggccatggcctacctgatcagaggaaatgagctggagctggccgtgtgtgtgggcaccgtgctgggggagagcgctgccccagccacccactacgccctggagctgctggccaggaagtgcatgatgatctctgtgtgcttcccctgtgtgggctacagcgtgcccttctgctacgtgaacagaaacctggccgctgacctgctgctgatgatcccagacaatgagctgcacctgatcaagctgtgtgccttctacccaggctgcacagaggagatcaatgacctgcatgacaagtgcaagctgcccaccgtggaggagtgcatgcagctggccgagacagcccgggcagatgacaacatctttgagaccgtgaagtactacctgctgagccaggagcctgagaaggccctgcccatcggcatcagctttgtgaaggagtacatcagcagcagtgactggaccctggacaccatctaccctgtgctggacctgctgagctacatcagaacagagaagctgctgctgcacacctgcacagaggccagaaatgagctgctgatcctgtgtggctacatcggggccctgctggccatccggcggcagtaccagagcatcgtgcctgccctgtatgagtacaccagccagctgctgaagaggcgggaggtgtctgtgcccctgaagattgagtacctgtctgaggagctggatgcctggagggcctgcacccagagcaccaacagaagcctggaggacagcccctacaccccacccagcgacagccagaggatgatctatgccaccctgctgaagaggctgaaggaggagagcctgaagggcatcatcggccctgactatgtgacaggcagcaacctgcccagccacagcgacatccacatcagctgcctgaccggcctgaagatccagggccctgtgttcttcctggaggatggcaagagcgccatcagcctgaatgatgccctgatgtgggccaaggtgaaccccttcagccccctgggcaccggcatccggctgaaccccttctag

SEQ ID NO: 176000 - DNA, 393 bp, synthetic construct
  misc_feature 1..393: note = Description of Artificial Sequence: Synthetic coding sequence
  source 1..393: mol_type = other DNA
atgagccaggtgcggcaggtgggcctgctggccgccggctgccagccctggaacaaggatgtgtgtgccgccagcggggacagatttgcctactgtgccaccctggccatctacatctaccagctggaccaccgctacaatgagttcaagctgcacgccatcatgtctgagcacaagaagaccatcacagccatctcctggtgcccccacaacccagacctgtttgccagcggcagcacagacaacctggtgatcatctggaatgtggccgagcagaaggtgattgccaagctggaccgggcccggccccccagccccaagatcatctacatcaagatcatcaacatcatcgaggagaacatccacaacagcgagatgcagtggatcatctag

SEQ ID NO: 176001 - DNA, 3897 bp, synthetic construct
  misc_feature 1..3897: note = Description of Artificial Sequence: Synthetic coding sequence
  source 1..3897: mol_type = other DNA
atgagccaggtgcggcaggtgggcctgctggccgccggctgccagccctggaacaaggatgtgtgtgccgccagcggggacagatttgcctactgtgccaccctggccatctacatctaccagctggaccaccgctacaatgagttcaagctgcacgccatcatgtctgagcacaagaagaccatcacagccatctcctggtgcccccacaacccagacctgtttgccagcggcagcacagacaacctggtgatcatctggaatgtggccgagcagaaggtgattgccaagctggacagcaccaagggcatcccagccagcctgtcctggtgctggaatgcagaagatgtggtggcctttgtgagccaccggggccccctcttcatctggaccatcagcggcccagattctggagtcatcgtgcacaaggatgcccacagcttcctgagtgacatctgcatgttccgctggcacacccaccagaagggcaaggtggtgtttggccacattgatggcagcctgagcatcttccaccctggcaacaagaaccagaagcacgtgctgcggcctgagagcctggagggcacagatgaagaagatcctgtgacagccctggagtgggaccccctgagcacagactacctgctggtggtgaacctgcactacggcatccggctggtggacagcgagagcctgagctgcatcaccaccttcaacctgcccagcgctgctgcctctgtgcagtgcctggcctgggtgcccagcgcccctggcatgttcatcaccggggacagccaggtgggcgtgctgcgcatctggaatgtgtccaggaccacccccatcgacaacctgaagctgaagaagacaggcttccactgcctgcacgtgctgaacagcccccccaggaagaagttctctgtgcagagccccaccaagaaccactacaccagcagcaccagcgaggccgtgcccccacccaccctgacccagaaccaggccttcagcctgcccccaggccatgctgtgtgctgcttcctggatggaggagtgggcctgtatgacatgggcgccaagaagtgggacttcctgcgggacctgggccacgtggagaccatctttgactgcaagttcaagccagatgaccccaacctgctggccacagccagctttgatggcaccatcaaggtgtgggacatcaacaccctgacagctgtgtacaccagccctggaaatgaaggagtcatctacagcctgtcctgggcccctgggggcctgaactgcatcgccggcggcaccagcagaaatggagccttcatctggaatgtgcagaagggcaagatcatccagcgcttcaatgagcacggcaccaacggcatcttctgcatcgcctggagccacaaggacagcaagagaattgccacctgcagcagtgatggcttctgcatcatccgcaccattgatggcaaggtgctgcacaagtacaagcaccctgctgctgtgtttggctgtgactggagccagaacaacaaggacatgattgccaccggctgtgaggacaccaacgtgcgggtgtactacgtggccaccagcagtgaccagcccctgaaggtgttttctggccacacagccaaggtgttccacgtgaagtggagccccctgcgggagggcatcctgtgcagcggcagtgatgatggcaccgtgcgcatctgggactacacccaggatgcctgcatcaacatcctgaatggccacacagcccctgtgcggggcctgatgtggaacacagagatcccctacctgctgatcagcggctcctgggactacaccatcaaggtgtgggacacccgggagggcacctgtgtggacacagtgtatgaccatggagcagatgtgtatggcctgacctgccaccccagccggcccttcaccatggccagctgcagccgggacagcacagtgcggctgtggagcctgacagccctggtgacccctgtgcagatcaacatcctggccgaccgctcctgggaggagatcatcggcaacacagattatgccatcgagcccggcaccccacccctgctgtgtgggaaggtgtcccgggacatccggcaggagattgagaagctgacagccaacagccaggtgaagaagctgcgctggttctctgaatgtctgagccccccaggcggcagtgacaacctgtggaacctggtggccgtcatcaagggccaggatgacagcctgctgccccagaactactgcaagggcatcatgcacctgaagcacctgatcaagttccgcaccagcgaggcccaggagctgaccaccgtgaagatgagcaagtttggaggcggcatcggcgtgcctgccaaggaggagcggctgaaggaggccgctgagatccacctgcggctgggccagatccagcgctactgtgagctgatggtggagctgggggagtgggacaaggccctgagcatcgcccctggggtgtctgtgaagtactggaagaagctgatgcagaggagagctgaccagctgatccaggaggacaaggatgatgtgatcccctactgcatcgccatcggagatgtgaagaagctggtgcacttcttcatgagccggggccagctgaaggaggccctgctggtggcccaggccgcctgtgagggcaacatgcagcccctgcacgtgtctgtgcccaagggggccagctacagtgatgacatctacaaggaggacttcaatgagctgctgcacaaggtgtccaaggagctggccgagtggtacttccaggacggccgggctgtgctggccgcctgctgccacctggccatcgacaacatcgagctggccatggcctacctgatcagaggaaatgagctggagctggccgtgtgtgtgggcaccgtgctgggggagagcgctgccccagccacccactacgccctggagctgctggccaggaagtgcatgatgatctctgtgtgcttcccctgtgtgggctacagcgtgcccttctgctacgtgaacagaaacctggccgctgacctgctgctgatgatcccagacaatgagctgcacctgatcaagctgtgtgccttctacccaggctgcacagaggagatcaatgacctgcatgacaagtgcaagctgcccaccgtggaggagtgcatgcagctggccgagacagcccgggcagatgacaacatctttgagaccgtgaagtactacctgctgagccaggagcctgagaaggccctgcccatcggcatcagctttgtgaaggagtacatcagcagcagtgactggaccctggacaccatctaccctgtgctggacctgctgagctacatcagaacagagaagctgctgctgcacacctgcacagaggccagaaatgagctgctgatcctgtgtggctacatcggggccctgctggccatccggcggcagtaccagagcatcgtgcctgccctgtatgagtacaccagccagctgctgaagaggcgggaggtgtctgtgcccctgaagattgagtacctgtctgaggagctggatgcctggagggcctgcacccagagcaccaacagaagcctggaggacagcccctacaccccacccagcgacagccagaggatgatctatgccaccctgctgaagaggctgaaggaggagagcctgaagggcatcatcggccctgactatgtgacaggcagcaacctgcccagccacagcgacatccacatcagctgcctgaccggcctgaagatccagggccctgtgttcttcctggaggatggcaagagcgccatcagcctgaatgatgccctgatgtgggccaaggtgaaccccttcagccccctgggcaccggcatccggctgaaccccttctag

SEQ ID NO: 176002 - DNA, 3852 bp, synthetic construct
  misc_feature 1..3852: note = Description of Artificial Sequence: Synthetic coding sequence
  source 1..3852: mol_type = other DNA
atgagccaggtgcggcaggtgggcctgctggccgccggctgccagccctggaacaaggatgtgtgtgccgccagcggggacagatttgcctactgtgccaccctggccatctacatctaccagctggaccaccgctacaatgagttcaagctgcacgccatcatgtctgagcacaagaagaccatcacagccatctcctggtgcccccacaacccagacctgtttgccagcggcagcacagacaacctggtgatcatctggaatgtggccgagcagaaggtgattgccaagctggacagcaccaagggcatcccagccagcctgtcctggtgctggaatgcagaagatgtggtggcctttgtgagccaccggggccccctcttcatctggaccatcagcggcccagattctggagtcatcgtgcacaaggatgcccacagcttcctgagtgacatctgcatgttccgctggcacacccaccagaagggcaaggtggtgtttggccacattgatggcagcctgagcatcttccaccctggcaacaagaaccagaagcacgtgctgcggcctgagagcctggagggcacagatgaagaagatcctgtgacagccctggagtgggaccccctgagcacagactacctgctggtggtgaacctgcactacggcatccggctggtggacagcgagagcctgagctgcatcaccaccttcaacctgcccagcgctgctgcctctgtgcagtgcctggcctgggtgcccagcgcccctggcatgttcatcaccggggacagccaggtgggcgtgctgcgcatctggaatgtgtccaggaccacccccatcgacaacctgaagctgaagaagacaggcttccactgcctgcacgtgctgaacagcccccccaggaagaagttctctgtgcagagccccaccaagaaccactacaccagcagcaccagcgaggccgtgcccccacccaccctgacccagaaccaggccttcagcctgcccccaggccatgctgtgtgctgcttcctggatggaggagtgggcctgtatgacatgggcgccaagaagtgggacttcctgcgggacctgggccacgtggagaccatctttgactgcaagttcaagccagatgaccccaacctgctggccacagccagctttgatggcaccatcaaggtgtgggacatcaacaccctgacagctgtgtacaccagccctggaaatgaaggagtcatctacagcctgtcctgggcccctgggggcctgaactgcatcgccggcggcaccagcagaaatggagccttcatctggaatgtgcagaagggcaagatcatccagcgcttcaatgagcacggcaccaacggcatcttctgcatcgcctggagccacaaggacagcaagagaattgccacctgcagcagtgatggcttctgcatcatccgcaccattgatggcaaggtgctgcacaagtacaagcaccctgctgctgtgtttggctgtgactggagccagaacaacaaggacatgattgccaccggctgtgaggacaccaacgtgcgggtgtactacgtggccaccagcagtgaccagcccctgaaggtgttttctggccacacagccaaggtgttccacgtgaagtggagccccctgcgggagggcatcctgtgcagcggcagtgatgatggcaccgtgcgcatctgggactacacccaggatgcctgcatcaacatcctgaatggccacacagcccctgtgcggggcctgatgtggaacacagagatcccctacctgctgatcagcggctcctgggactacaccatcaaggtgtgggacacccgggagggcacctgtgtggacacagtgtatgaccatggagcagatgtgtatggcctgacctgccaccccagccggcccttcaccatggccagctgcagccgggacagcacagtgcggctgtggagcctgacagccctggtgacccctgtgcagatcaacatcctggccgaccgctcctgggaggagatcatcggcaacacagattatgccatcgagcccggcaccccacccctgctgtgtgggaaggtgtcccgggacatccggcaggagattgagaagctgacagccaacagccaggtgaagaagctgcgctggttctctgaatgtctgagccccccaggcggcagtgacaacctgtggaacctggtggccgtcatcaagggccaggatgacagcctgctgccccagaactactgcaagggcatcatgcacctgaagcacctgatcaagttccgcaccagcgaggcccaggagctgaccaccgtgaagatgagcaagtttggaggcggcatcggcgtgcctgccaaggaggagcggctgaaggaggccgctgagatccacctgcggctgggccagatccagcgctactgtgagctgatggtggagctgggggagtgggacaaggccctgagcatcgcccctggggtgtctgtgaagtactggaagaagctgatgcagaggagagctgaccagctgatccaggaggacaaggatgatgtgatcccctactgcatcgccatcggagatgtgaagaagctggtgcacttcttcatgagccggggccagctgaaggaggccctgctggtggcccaggccgcctgtgagggcaacatgcagcccctgcacgtgtctgtgcccaagggggccagctacagtgatgacatctacaaggaggacttcaatgagctgctgcacaaggtgtccaaggagctggccgagtggtacttccaggacggccgggctgtgctggccgcctgctgccacctggccatcgacaacatcgagctggccatggcctacctgatcagaggaaatgagctggagctggccgtgtgtgtgggcaccgtgctgggggagagcgctgccccagccacccactacgccctggagctgctggccaggaagtgcatgatgatctctgtgtggaacctggccgctgacctgctgctgatgatcccagacaatgagctgcacctgatcaagctgtgtgccttctacccaggctgcacagaggagatcaatgacctgcatgacaagtgcaagctgcccaccgtggaggagtgcatgcagctggccgagacagcccgggcagatgacaacatctttgaaacagtgaagtactacctgctgagccaggagcctgagaaggccctgcccatcggcatcagctttgtgaaggagtacatcagcagcagtgactggaccctggacaccatctaccctgtgctggacctgctgagctacatcagaacagagaagctgctgctgcacacctgcacagaggccagaaatgagctgctgatcctgtgtggctacatcggggccctgctggccatccggcggcagtaccagagcatcgtgcctgccctgtatgagtacaccagccagctgctgaagagaagagaggtgtctgtgcccctgaagattgagtacctgtctgaggagctggatgcctggagggcctgcacccagagcaccaacagaagcctggaggacagcccctacaccccacccagcgacagccagaggatgatctatgccaccctgctgaagaggctgaaggaggagagcctgaagggcatcattggaccagactatgtgacaggcagcaacctgcccagccacagcgacatccacatcagctgcctgaccggcctgaagatccagggccctgtgttcttcctggaggatggcaagagcgccatcagcctgaatgatgccctgatgtgggccaaggtgaaccccttcagccccctgggcaccggcatccggctgaaccccttctag

SEQ ID NO: 176003 - DNA, 3549 bp, synthetic construct
  misc_feature 1..3549: note = Description of Artificial Sequence: Synthetic coding sequence
  source 1..3549: mol_type = other DNA
atgatcaccgtgagcaaccaggagggggacaccatccggcagacccaggtgcgctctgagcccagcaacatgcagttcttcctgatgaagatggatgacaggaccagcgctgctgagagcatgatctctgtggtgctgggcaagaagaccctcttcttcctgaacctgaatgaaccagacaacccagctgacctggagttccagcaggactttggaaacatcgtgtgctacaactggtatggagatggccgcatcatgattggcttcagctgtggccactttgtggtgatcagcacccacactggagagctgggccaggagatcttccaggccaggaaccacaaggacaacctgaccagcattgctgtgtcccagaccctgaacaaggtggccacctgtggggacaactgcatcaagatccaggacctggtggacctgaaggacatgtatgtgatcctgaacctggatgaggagaacaagggcctgggcaccctgtcctggacagatgatggccagctgctggccctgagcacccagaggggcagcctgcacgtgttcctgaccaagctgcccatcctgggagatgcctgcagcaccagaattgcctacctgaccagcctgctggaggtgacagtggccaaccctgtggagggggagctgcccatcaccgtgtctgtggatgtggagcccaactttgtggccgtgggcctgtaccacctggccgtgggcatgaacaacagagcctggttctacgtgctgggagaaaatgctgtgaagaagctgaaggacatggagtacctgggcaccgtggccagcatctgcctgcacagcgactatgctgctgccctgtttgagggcaaggtgcagctgcacctgattgaaagtgagatcctggatgcccaggaggagcgggagaccaggctcttccctgctgtggatgacaagtgccgcatcctgtgccacgccctgaccagtgacttcctgatctacggcacagacaccggggtggtgcagtacttctacatcgaggactggcagtttgtgaatgactaccgccaccctgtgtctgtgaagaagatcttcccagaccccaacggcacccggctggtgttcattgatgagaagagtgatggctttgtgtactgccctgtgaatgatgccacctatgagatcccagacttcagccccaccatcaagggcgtgctgtgggagaactggcccatggacaagggcgtcttcatcgcctatgatgatgacaaggtgtacacctacgtgttccacaaggacaccatccagggcgccaaggtgatcctggccggcagcaccaaggtgccctttgcccacaagcccctgctgctgtacaatggagagctgacctgccagacccagagcggcaaggtgaacaacatctacctgagcacccacggcttcctgagcaacctgaaggacaccggcccagatgagctgcggcccatgctggcccagaacctgatgctgaagcgcttcagtgatgcctgggagatgtgccgcatcctgaatgatgaggccgcctggaatgagctggcccgggcctgcctgcaccacatggaggtggagtttgccatccgggtgtacagaagaattggaaatgtgggcatcgtgatgagcctggagcagatcaagggcatcgaggactacaacctgctggccggccacctggccatgttcaccaatgactacaacctggcccaggacctgtacctggccagcagctgccccatcgccgccctggagatgagaagagacctgcagcactgggacagcgccctgcagctggccaagcacctggccccagaccagatccccttcatcagcaaggagtatgccatccagctggagtttgctggggactatgtgaatgccctggcccactatgagaagggcatcactggagacaacaaggagcatgatgaggcctgcctggccggcgtggcccagatgagcatccgcatgggagacatccggcggggcgtgaaccaggccctgaagcaccccagccgggtgctgaagagggactgtggggccatcctggagaacatgaagcagttcagcgaggccgcccagctgtatgagaagggcctgtactatgacaaggccgcctctgtgtacatccgcagcaagaactgggccaaggtgggggacctgctgccccacgtgagcagccccaagatccacctgcagtatgccaaggccaaggaggctgatggccgctacaaggaggccgtggtggcctatgaaaatgccaagcagtggcagagcgtcatccgcatctacctggaccacctgaacaaccctgagaaggctgtgaacatcgtgcgggagacccagagcctggatggagccaagatggtggcccgcttcttcctgcagctgggggactatggcagcgccatccagttcctggtgatgagcaagtgcaacaatgaggccttcaccctggcccagcagcacaacaagatggagatctatgctgacatcatcggcagcgaggacaccaccaatgaagactaccagagcatcgccctgtactttgaaggagagaagcgctacctgcaggccggcaagttcttcctgctgtgtggccagtacagccgggccctgaagcacttcctgaagtgccccagcagcgaggacaacgtggccatcgagatggccattgaaacagtgggccaggccaaggatgagctgctgaccaaccagctgattgaccacctgctgggagaaaatgatggcatgcccaaggatgccaagtacctgttccggctgtacatggccctgaagcagtaccgggaggccgcccagacagccatcatcatcgcccgggaggagcagagcgctggcaactacagaaatgcccatgatgtgctcttctccatgtatgcagagctgaagagccagaagatcaagatccccagcgagatggccaccaacctgatgatcctgcacagctacatcctggtgaagatccacgtgaagaatggagaccacatgaagggggccaggatgctgatccgggtggccaacaacatcagcaagttccccagccacatcgtgcccatcctgaccagcacagtgattgagtgccaccgggccggcctgaagaacagcgccttctcctttgctgccatgctgatgaggcctgagtaccgcagcaagattgatgccaagtacaagaagaagattgagggcatggtgagaagaccagacatcagcgagattgaggaggccaccaccccctgccccttctgcaagttcctgctgcctgaatgtgagctgctgtgccccggctgcaagaacagcatcccctactgcatcgccaccggccgccacatgctgaaggatgactggacagtgtgcccccactgtgacttccctgccctgtacagcgagctgaagatcatgctgaacacagagagcacctgccccatgtgcagcgagcggctgaatgctgcccagctgaagaagatcagtgactgcacccagtacctgaggacagaggaggagctgtag

SEQ ID NO: 176004 - DNA, 4029 bp, synthetic construct
  misc_feature 1..4029: note = Description of Artificial Sequence: Synthetic coding sequence
  source 1..4029: mol_type = other DNA
atgaagaggatcttcagcctgctggagaagacctggctgggcgcccccatccagtttgcctggcagaagaccagcggcaactacctggccgtgactggagctgactacatcgtgaagatctttgacagacatggccagaagaggtctgagatcaacctgcccggcaactgtgtggccatggactgggacaaggatggagatgtgctggccgtgattgctgagaagagcagctgcatctacctgtgggatgccaacaccaacaagaccagccagctggacaatggcatgagggaccagatgtccttcctgctgtggagcaaggtgggcagcttcctggccgtgggcaccgtgaagggcaacctgctgatctacaaccaccagaccagcaggaagatccctgtgctgggcaagcacaccaagaggatcacctgtggctgctggaatgctgagaacctgctggccctgggcggggaggacaagatgatcaccgtgagcaaccaggagggggacaccatccggcagacccaggtgcgctctgagcccagcaacatgcagttcttcctgatgaagatggatgacaggaccagcgctgctgagagcatgatctctgtggtgctgggcaagaagaccctcttcttcctgaacctgaatgaaccagacaacccagctgacctggagttccagcaggactttggaaacatcgtgtgctacaactggtatggagatggccgcatcatgattggcttcagctgtggccactttgtggtgatcagcacccacactggagagctgggccaggagatcttccaggccaggaaccacaaggacaacctgaccagcattgctgtgtcccagaccctgaacaaggtggccacctgtggggacaactgcatcaagatccaggacctggtggacctgaaggacatgtatgtgatcctgaacctggatgaggagaacaagggcctgggcaccctgtcctggacagatgatggccagctgctggccctgagcacccagaggggcagcctgcacgtgttcctgaccaagctgcccatcctgggagatgcctgcagcaccagaattgcctacctgaccagcctgctggaggtgacagtggccaaccctgtggagggggagctgcccatcaccgtgtctgtggatgtggagcccaactttgtggccgtgggcctgtaccacctggccgtgggcatgaacaacagagcctggttctacgtgctgggagaaaatgctgtgaagaagctgaaggacatggagtacctgggcaccgtggccagcatctgcctgcacagcgactatgctgctgccctgtttgagggcaaggtgcagctgcacctgattgaaagtgagatcctggatgcccaggaggagcgggagaccaggctcttccctgctgtggatgacaagtgccgcatcctgtgccacgccctgaccagtgacttcctgatctacggcacagacaccggggtggtgcagtacttctacatcgaggactggcagtttgtgaatgactaccgccaccctgtgtctgtgaagaagatcttcccagaccccaacggcacccggctggtgttcattgatgagaagagtgatggctttgtgtactgccctgtgaatgatgccacctatgagatcccagacttcagccccaccatcaagggcgtgctgtgggagaactggcccatggacaagggcgtcttcatcgcctatgatgatgacaaggtgtacacctacgtgttccacaaggacaccatccagggcgccaaggtgatcctggccggcagcaccaaggtgccctttgcccacaagcccctgctgctgtacaatggagagctgacctgccagacccagagcggcaaggtgaacaacatctacctgagcacccacggcttcctgagcaacctgaaggacaccggcccagatgagctgcggcccatgctggcccagaacctgatgctgaagcgcttcagtgatgcctgggagatgtgccgcatcctgaatgatgaggccgcctggaatgagctggcccgggcctgcctgcaccacatggaggtggagtttgccatccgggtgtacagaagaattggaaatgtgggcatcgtgatgagcctggagcagatcaagggcatcgaggactacaacctgctggccggccacctggccatgttcaccaatgactacaacctggcccaggacctgtacctggccagcagctgccccatcgccgccctggagatgagaagagacctgcagcactgggacagcgccctgcagctggccaagcacctggccccagaccagatccccttcatcagcaaggagtatgccatccagctggagtttgctggggactatgtgaatgccctggcccactatgagaagggcatcactggagacaacaaggagcatgatgaggcctgcctggccggcgtggcccagatgagcatccgcatgggagacatccggcggggcgtgaaccaggccctgaagcaccccagccgggtgctgaagagggactgtggggccatcctggagaacatgaagcagttcagcgaggccgcccagctgtatgagaagggcctgtactatgacaaggccgcctctgtgtacatccgcagcaagaactgggccaaggtgggggacctgctgccccacgtgagcagccccaagatccacctgcagtatgccaaggccaaggaggctgatggccgctacaaggaggccgtggtggcctatgaaaatgccaagcagtggcagagcgtcatccgcatctacctggaccacctgaacaaccctgagaaggctgtgaacatcgtgcgggagacccagagcctggatggagccaagatggtggcccgcttcttcctgcagctgggggactatggcagcgccatccagttcctggtgatgagcaagtgcaacaatgaggccttcaccctggcccagcagcacaacaagatggagatctatgctgacatcatcggcagcgaggacaccaccaatgaagactaccagagcatcgccctgtactttgaaggagagaagcgctacctgcaggccggcaagttcttcctgctgtgtggccagtacagccgggccctgaagcacttcctgaagtgccccagcagcgaggacaacgtggccatcgagatggccattgaaacagtgggccaggccaaggatgagctgctgaccaaccagctgattgaccacctgctgggagaaaatgatggcatgcccaaggatgccaagtacctgttccggctgtacatggccctgaagcagtaccgggaggccgcccagacagccatcatcatcgcccgggaggagcagagcgctggcaactacagaaatgcccatgatgtgctcttctccatgtatgcagagctgaagagccagaagatcaagatccccagcgagatggccaccaacctgatgatcctgcacagctacatcctggtgaagatccacgtgaagaatggagaccacatgaagggggccaggatgctgatccgggtggccaacaacatcagcaagttccccagccacatcgtgcccatcctgaccagcacagtgattgagtgccaccgggccggcctgaagaacagcgccttctcctttgctgccatgctgatgaggcctgagtaccgcagcaagattgatgccaagtacaagaagaagattgagggcatggtgagaagaccagacatcagcgagattgaggaggccaccaccccctgccccttctgcaagttcctgctgcctgaatgtgagctgctgtgccccggctgcaagaacagcatcccctactgcatcgccaccggccgccacatgctgaaggatgactggacagtgtgcccccactgtgacttccctgccctgtacagcgagctgaagatcatgctgaacacagagagcacctgccccatgtgcagcgagcggctgaatgctgcccagctgaagaagatcagtgactgcacccagtacctgaggacagaggaggagctgtag

SEQ ID NO: 176005 - DNA, 1443 bp, synthetic construct
  misc_feature 1..1443: note = Description of Artificial Sequence: Synthetic coding sequence
  source 1..1443: mol_type = other DNA
aagaggatcttcagcctgctggagaagacctggctgggcgcccccatccagtttgcctggcagaagaccagcggcaactacctggccgtgactggagctgactacatcgtgaagatctttgacagacatggccagaagaggtctgagatcaacctgcccggcaactgtgtggccatggactgggacaaggatggagatgtgctggccgtgattgctgagaagagcagctgcatctacctgtgggatgccaacaccaacaagaccagccagctggacaatggcatgagggaccagatgtccttcctgctgtggagcaaggtgggcagcttcctggccgtgggcaccgtgaagggcaacctgctgatctacaaccaccagaccagcaggaagatccctgtgctgggcaagcacaccaagaggatcacctgtggctgctggaatgctgagaacctgctggccctgggcggggaggacaagatgatcaccgtgagcaaccaggagggggacaccatccggcagacccaggtgcgctctgagcccagcaacatgcagttcttcctgatgaagatggatgacaggaccagcgctgctgagagcatgatctctgtggtgctgggcaagaagaccctcttcttcctgaacctgaatgaaccagacaacccagctgacctggagttccagcaggactttggaaatattgtgtgctacaactggtatggagatggccgcatcatgattggcttcagctgtggccactttgtggtgatcagcacccacactggagagctgggccaggagatcttccaggccaggaaccacaaggacaacctgaccagcattgctgtgtcccagaccctgaacaaggtggccacctgtggggacaactgcatcaagatccaggacctggtggacctgaaggacatgtatgtgatcctgaacctggatgaagaaaataaaggcctgggcaccctgtcctggacagatgatggccagctgctggccctgagcacccagaggggcagcctgcacgtgttcctgaccaagctgcccatcctgggagatgcctgcagcacccgcatcgcctacctgaccagcctgctggaggtgacagtggccaaccctgtggagggggagctgcccatcaccgtgtctgtggatgtggagcccaactttgtggccgtgggcctgtaccacctggccgtgggcatgaacaacagagcctggttctacgtgctgggggagaatgctgtgaagaagctgaaggacatggagtacctgggcaccgtggccagcatctgcctgcacagcgactatgctgctgccctgtttgagggcaaggtgcagctgcacctgaaggccaagtcctggatgctgaagaagaatgtgcggctgggcttcagccagcagtggatgatctctgctgtgtcctatgccatgccctag

SEQ ID NO: 176006 - DNA, 1446 bp, synthetic construct
  misc_feature 1..1446: note = Description of Artificial Sequence: Synthetic coding sequence
  source 1..1446: mol_type = other DNA
atgaagaggatcttcagcctgctggagaagacctggctgggcgcccccatccagtttgcctggcagaagaccagcggcaactacctggccgtgactggagctgactacatcgtgaagatctttgacagacatggccagaagaggtctgagatcaacctgcccggcaactgtgtggccatggactgggacaaggatggagatgtgctggccgtgattgctgagaagagcagctgcatctacctgtgggatgccaacaccaacaagaccagccagctggacaatggcatgagggaccagatgtccttcctgctgtggagcaaggtgggcagcttcctggccgtgggcaccgtgaagggcaacctgctgatctacaaccaccagaccagcaggaagatccctgtgctgggcaagcacaccaagaggatcacctgtggctgctggaatgctgagaacctgctggccctgggcggggaggacaagatgatcaccgtgagcaaccaggagggggacaccatccggcagacccaggtgcgctctgagcccagcaacatgcagttcttcctgatgaagatggatgacaggaccagcgctgctgagagcatgatctctgtggtgctgggcaagaagaccctcttcttcctgaacctgaatgaaccagacaacccagctgacctggagttccagcaggactttggaaacatcgtgtgctacaactggtatggagatggccgcatcatgattggcttcagctgtggccactttgtggtgatcagcacccacactggagagctgggccaggagatcttccaggccaggaaccacaaggacaacctgaccagcattgctgtgtcccagaccctgaacaaggtggccacctgtggggacaactgcatcaagatccaggacctggtggacctgaaggacatgtatgtgatcctgaacctggatgaggagaacaagggcctgggcaccctgtcctggacagatgatggccagctgctggccctgagcacccagaggggcagcctgcacgtgttcctgaccaagctgcccatcctgggagatgcctgcagcaccagaattgcctacctgaccagcctgctggaggtgacagtggccaaccctgtggagggggagctgcccatcaccgtgtctgtggatgtggagcccaactttgtggccgtgggcctgtaccacctggccgtgggcatgaacaacagagcctggttctacgtgctgggagaaaatgctgtgaagaagctgaaggacatggagtacctgggcaccgtggccagcatctgcctgcacagcgactatgctgctgccctgtttgagggcaaggtgcagctgcacctgaaggccaagtcctggatgctgaagaagaatgtgcggctgggcttcagccagcagtggatgatctctgctgtgtcctatgccatgccctag

SEQ ID NO: 176007 - DNA, 2832 bp, synthetic construct
  misc_feature 1..2832: note = Description of Artificial Sequence: Synthetic coding sequence
  source 1..2832: mol_type = other DNA
atgggcctgaccaagcagtacctgcgctacgtggccagcgctgtgtttggagtgattggcagccagaagggcaacatcgtgtttgtgaccctgcggggggagaagggccgctacgtggccgtgcctgcctgtgagcacgtgttcatctgggacctgaggaagggggagaagatcctgatcctgcagggcctgaagcaggaggtgacctgcctgtgccccagcccagatggcctgcacctggccgtgggctatgaagatggcagcatccgcatcttcagcctgctgagcggggagggcaatgtgaccttcaacggccacaaggccgccatcaccaccctgaagtatgaccagctgggcggccgcctggccagcggcagcaaggacacagacatcatcgtgtgggatgtgatcaatgaaagtggcctgtaccgcctgaagggccacaaggatgccatcacccaggccctcttcctgcgggagaagaacctgctggtgaccagcggcaaggacaccatggtgaagtggtgggacctggacacccagcactgcttcaagaccatggtgggccacaggacagaggtgtggggcctggtgctgctgtctgaggagaagaggctcatcaccggggccagtgacagcgagctgcgggtgtgggacatcgcctacctgcaggagattgaagatcctgaggagccagaccccaagaagatcaagggcagcagccctggcatccaggacaccctggaggctgaagatggagcctttgaaacagatgaggcccctgaggaccgcatcctgagctgcaggaaggccggcagcatcatgagggagggccgggacagagtggtgaacctggccgtggacaagacaggccgcatcctggcctgccacggcacagattctgtgctggagctgttctgcatcctgagcaagaaggagatccagaagaagatggacaagaagatgaagaaggccaggaagaaggccaagctgcacagcagcaaaggagaggaggaggaccctgaggtgaatgtggagatgagcctgcaggatgagatccagagggtgaccaacatcaagaccagcgccaagatcaagagctttgacctgatccacagcccccatggagagctgaaggctgtgttcctgctgcagaacaacctggtggagctgtacagcctgaaccccagcctgcccaccccccagcctgtgaggaccagccgcatcaccatcggcggccacagaagtgatgtgaggaccctgtccttcagcagtgacaacattgctgtgctgtctgctgctgctgacagcatcaagatctggaacagaagcaccctgcagtgcatccgcaccatgacctgtgaatatgccctgtgcagcttctttgtgcctggggaccggcaggtggtgattggcaccaagacaggcaagctgcagctgtatgacctggccagcggcaacctgctggagaccattgatgcccatgatggagccctgtggagcatgagcctgagcccagaccagaggggctttgtgactggaggagctgacaagtctgtgaagttctgggactttgagctggtgaaggatgagaacagcacccagaagaggctgtctgtgaagcagaccaggaccctgcagctggatgaagatgtgctgtgtgtgtcctacagccccaaccagaagctgctggccgtgtccctgctggactgcaccgtgaagatcttctacgtggacaccctgaagttcttcctgagcctgtatggccacaagctgcctgtgatctgcatggacatcagccatgatggagccctgattgccaccggcagcgctgacagaaatgtgaagatctggggcctggactttggagactgccacaagagcctgtttgcccatgatgattctgtgatgtacctgcagtttgtgcccaagagccacctgttcttcaccgctgggaaggaccacaagatcaagcagtgggatgctgacaagtttgagcacatccagaccctggagggccaccaccaggagatctggtgcctggccgtgagccccagcggggactatgtggtgagcagcagccatgacaagagcctgcggctgtgggagaggacccgggagcccctcatcctggaggaggagcgggagatggagcgggaggccgagtatgaggagagcgtggccaaggaggaccagcctgctgtgcctggagagacccagggcgacagctacttcaccgggaagaagaccattgaaacagtgaaggctgctgagcgcatcatggaggccatcgagctgtaccgggaggagacagccaagatgaaggagcacaaggccatctgcaaggccgccggcaaggaggtgcccctgcccagcaaccccatcctgatggcctacggcagcatcagccccagcgcctacgtgctggagatcttcaagggcatcaagagcagcgagctggaggagagcctgctggtgctgcccttctcctatgtgcctgacatcctgaagctgttcaatgagttcatccagctgggcagtgatgtggagctgatctgccgctgcctcttcttcctgctgcgcatccacttcggccagatcaccagcaaccagatgctggtgcctgtgattgagaagctgcgggagaccaccatcagcaaggtgtcccaggtgagagatgtgattggcttcaacatggccggcctggactacctgaagcgggagtgtgaggccaagtctgaggtgatgttctttgctgatgccaccagccacctggaggagaagaagaggaagaggaagaagcgggagaagctgatcctgaccctgacctag

SEQ ID NO: 176008 - DNA, 123 bp, synthetic construct
  misc_feature 1..123: note = Description of Artificial Sequence: Synthetic coding sequence
  source 1..123: mol_type = other DNA
atgggcctgaccaagcagtacctgcgctacgtggccagcgctgtgtttggagtgattggcagccagaagggcctggccagccaggccagcagcagctttgtgttctttgccacagagttctag

SEQ ID NO: 176009 - DNA, 1611 bp, synthetic construct
  misc_feature 1..1611: note = Description of Artificial Sequence: Synthetic coding sequence
  source 1..1611: mol_type = other DNA
atggccacccgggcccagcccggccccctgagccaggccggcagcgctggggtggccgccctggccaccgtgggcgtggccagcggccctggccctggccggcccggccccctgcaggatgagaccctgggcgtggcctctgtgcccagccagtggagggctgtgcagggcatccgctgggagaccaagagctgccagacagccagcatcgccacagccagcgccagcgcccaggccaggaaccacgtggatgcccaggtgcagacagaggcccctgtgcctgtgtctgtgcagccccccagccagtatgacatcccccggctggccgccttcctgcggcgggtggaggccatggtgatccgggagctgaacaagaactggcagagccacgcctttgatggctttgaggtgaactggacagagcagcagcagatggtgtcctgcctgtacaccctgggctaccccccagcccaggcccagggcctgcacgtgaccagcatctcctggaacagcacaggctctgtggtggcctgtgcctacggccgcctggaccatggagactggagcaccctgaagagctttgtgtgtgcctggaacctggaccggcgggacctgcggccccagcagcccagcgctgtggtggaggtgcccagcgctgtgctgtgcctggccttccaccccacccagcccagccacgtggccggcggcctgtacagcggggaggtgctggtgtgggacctgagccggctggaggaccccctgctgtggaggacaggcctgacagatgacacccacacagatcctgtgtcccaggtggtgtggctgcctgagcccggccacagccaccgcttccaggtgctgtctgtggccacagatggcaaggtgctgctgtggcagggcattggagtgggccagctgcagctgacagagggctttgccctggtgatgcagcagctgcccaggagcaccaagctgaagaagcaccccagaggagaaacagaggtgggcgccacagctgtggccttcagcagctttgaccccaggctcttcatcctgggcacagagggcggcttccccctgaagtgcagcctggccgccggggaggccgccctgaccaggatgcccagctctgtgcccctgcgggccccagcccagttcaccttcagcccccatggaggccccatctacagcgtgtcctgcagccccttccacaggaacctcttcctgtctgctggaacagatggccacgtgcacctgtacagcatgctgcaggccccacccctgaccagcctgcagctgagcctgaagtacctgtttgctgtgcgctggagccctgtgcggcccctggtgtttgctgctgccagcgggaaaggagatgtgcagctgtttgacctgcagaagagcagccagaagcccaccgtgctgatcaagcagacccaggatgagagccctgtgtactgcctggagttcaacagccagcagacccagctgctggccgctggagatgcccagggcaccgtgaaggtgtggcagctgagcacagagttcacagagcagggcccccgggaggccgaggacctggactgcctggccgctgaggtggccgcctag

SEQ ID NO: 176010 - DNA, 420 bp, synthetic construct
  misc_feature 1..420: note = Description of Artificial Sequence: Synthetic coding sequence
  source 1..420: mol_type = other DNA
gctggggtggccgccctggccaccgtgggcgtggccagcggccctggccctggccggcccggccccctgcaggatgagaccctgggcgtggcctctgtgcccagccagtggagggctgtgcagggcatccgctgggagaccaagagctgccagacagccagcatcgccacagccagcgccagcgcccaggccagaaatcatgtggatgcccaggtgcagacagaggcccctgtgcctgtgtctgtgcagccccccagccagtatgacatcccccggctggccgccttcctgcggcgggtggaggccatggtgatccgggagctgaacaagaactggcagagccacgcctttgatggctttgaggtgaactggacagagcagcagcagatggccggcccctggggcctggagcacgcctag

SEQ ID NO: 176011 - DNA, 819 bp, synthetic construct
  misc_feature 1..819: note = Description of Artificial Sequence: Synthetic coding sequence
  source 1..819: mol_type = other DNA
ctgagccaggccggcagcgctggggtggccgccctggccaccgtgggcgtggccagcggccctggccctggccggcccggccccctgcaggatgagaccctgggcgtggcctctgtgcccagccagtggagggctgtgcagggcatccgctgggagaccaagagctgccagacagccagcatcgccacagccagcgccagcgcccaggccagaaatcatgtggatgcccaggtgcagacagaggcccctgtgcctgtgtctgtgcagccccccagccagtatgacatcccccggctggccgccttcctgcggcgggtggaggccatggtgatccgggagctgaacaagaactggcagagccacgcctttgatggctttgaggtgaactggacagagcagcagcagatggtgtcctgcctgtacaccctgggctaccccccagcccaggcccagggcctgcacgtgaccagcatctcctggaacagcactggatctgtggtggcctgtgcctacggccgcctggaccacggggactggagcaccctgaagagctttgtgtgtgcctggaacctggacagaagagacctgcggccccagcagcccagcgctgtggtggaggtgcccagcgctgtgctgtgcctggccttccaccccacccagcccagccacgtggccggggagctgcctgctgtgtctgccagcagccccctgcggacccagctgcctgccctgcagagggcccagggcagcttcccctgggccctgtggccaggggacaggaaggccggccctgaccccctgagcctggagcccaggtag

SEQ ID NO: 176012 - DNA, 3513 bp, synthetic construct
  misc_feature 1..3513: note = Description of Artificial Sequence: Synthetic coding sequence
  source 1..3513: mol_type = other DNA
atgttcttctacctgagcaagaagatcagcatccccaacaacgtgaagctgcagtgtgtgtcctggaacaaggagcagggcttcatcgcctgtggcggggaggatggcctgctgaaggtgctgaagctggagacccagacagatgatgccaagctgcggggcctggccgcccccagcaacctgtccatgaaccagaccctggagggccacagcggctctgtgcaggtggtgacctggaatgagcagtaccagaagctgaccaccagtgatgaaaatggcctcatcatcgtgtggatgctgtacaagggctcctggattgaggagatgatcaacaacagaaacaagtctgtggtgcgctccatgtcctggaatgctgatggccagaagatctgcatcgtgtatgaagatggagctgtgattgtgggctctgtggatggcaaccgcatctggggcaaggacctgaagggcatccagctgagccacgtgacctggagcgctgacagcaaggtgctgctgtttggcatggccaatggagagatccacatctatgacaaccagggcaacttcatgatcaagatgaagctgagctgcctggtgaatgtgactggagccatcagcattgctggcatccactggtaccacggcacagagggctacgtggagccagactgcccctgcctggccgtgtgctttgacaatggccgctgccagatcatgagacatgaaaatgaccagaaccctgtgctgattgacaccggcatgtatgtggtgggcatccagtggaaccacatgggctctgtgctggccgtggccggcttccagaaggccgccatgcaggacaaggatgtgaacatcgtgcagttctacaccccatttggagagcacctgggcaccctgaaggtgcctgggaaggagatcagcgccctgtcctgggagggcggcggcctgaagatcgccctggccgtggacagcttcatctactttgccaacatccggcccaactacaagtggggctactgcagcaacacagtggtgtatgcctacaccaggccagacaggcctgagtactgtgtggtgttctgggacaccaagaacaatgagaagtatgtgaagtatgtgaagggcctcatcagcatcaccacctgtggggacttctgcatcctggccaccaaggcagatgagaaccacccccagtttgtgctggtgctgtgcaacagcatcggcacccccctggaccccaagtacatcgacatcgtgcccctgtttgtggccatgaccaagacccacgtgattgctgccagcaaggaggccttctacacctggcagtacagagtggccaagaagctgacagccctggagatcaaccagatcaccaggagcaggaaggagggccgggagcgcatctaccacgtggatgacacccccagcggctccatggatggagtgctggactacagcaagaccatccagggcacccgggaccccatctgtgccatcacagccagtgacaagatcctgattgtgggccgggagagcggcaccatccagcgctacagcctgcccaacgtgggcctcatccagaagtacagcctgaactgccgggcctaccagctgagcctgaactgcaacagcagccggctggccatcatcgacatctctggagtgctgaccttctttgacctggatgcccgggtgacagacagcacaggccagcaggtggtgggggagctgctgaagctggagaggagagatgtgtgggacatgaagtgggccaaggacaacccagacctgtttgccatgatggagaagaccaggatgtatgtgttcaggaacctggaccctgaggagcccatccagaccagcggctacatctgcaactttgaggacctggagatcaagtctgtgctgctggatgagatcctgaaggaccctgagcaccccaacaaggactacctgatcaactttgagatccgcagcctgcgggacagccgggccctgattgagaaggtgggcatcaaggatgccagccagttcatcgaggacaacccccacccccggctgtggaggctgctggccgaggccgccctgcagaagctggacctgtacacagctgagcaggcctttgtgcgctgcaaggactaccagggcatcaagtttgtgaagaggctgggcaagctgctgtctgagagcatgaagcaggccgaggtggtgggctacttcggccgctttgaggaggccgagaggacctacctggagatggacagaagagacctggccatcggcctgcggctgaagctgggggactggttccgggtgctgcagctgctgaagacaggcagcggagatgctgatgacagcctgctggagcaggccaacaatgccatcggggactactttgctgaccggcagaagtggctgaatgctgtgcagtactacgtgcagggcaggaaccaggagcggctggccgagtgctactacatgctggaggactatgagggcctggagaacctggccatcagcctgcctgagaaccacaagctgctgcctgagatcgcccagatgtttgtgcgggtgggcatgtgtgagcaggccgtgacagccttcctgaagtgcagccagcccaaggctgctgtggacacctgtgtgcacctgaaccagtggaacaaggctgtggagctggccaagaaccacagcatgaaggagatcggcagcctgctggcccgctatgccagccacctgctggagaagaacaagaccctggatgccatcgagctgtacaggaaggccaactacttctttgatgctgccaagctgatgttcaagattgctgatgaggaggccaagaagggcagcaagcccctgcgggtgaagaagctgtatgtgctgagcgccctgctgattgagcagtaccacgagcagatgaagaatgcccagaggggcaaggtgaagggcaagagcagcgaggccaccagcgccctggccggcctgctggaggaggaggtgctgagcaccacagaccgcttcacagacaatgcctggagaggagctgaggcctaccacttcttcatcctggcccagaggcagctgtatgagggctgtgtggacacagccctgaagacagccctgcacctgaaggactatgaggacatcatcccccctgtggagatctacagcctgctggccctgtgtgcctgtgccagccgggccttcggcacctgcagcaaggccttcatcaagctgaagagcctggagaccctgagcagcgagcagaagcagcagtatgaggacctggccctggagatcttcaccaagcacaccagcaaggacaacaggaagccagagctggacagcctgatggagggcggggagggcaagctgcccacctgtgtggccaccggcagccccatcacagagtaccagttctggatgtgcagcgtgtgcaagcatggagtgctggcccaggagatcagccactacagcttctgccccctgtgccacagccctgtgggctag

SEQ ID NO: 176013 - DNA, 3546 bp, synthetic construct
  misc_feature 1..3546: note = Description of Artificial Sequence: Synthetic coding sequence
  source 1..3546: mol_type = other DNA
atgttcttctacctgagcaagaagatcagcatccccaacaacgtgaagctgcagtgtgtgtcctggaacaaggagcagggcttcatcgcctgtggcggggaggatggcctgctgaaggtgctgaagctggagacccagacagatgatgccaagctgcggggcctggccgcccccagcaacctgtccatgaaccagaccctggagggccacagcggctctgtgcaggtggtgacctggaatgagcagtaccagaagctgaccaccagtgatgaaaatggcctcatcatcgtgtggatgctgtacaagggctcctggattgaggagatgatcaacaacagaaacaagtctgtggtgcgctccatgtcctggaatgctgatggccagaagatctgcatcgtgtatgaagatggagctgtgattgtgggctctgtggatggcaaccgcatctggggcaaggacctgaagggcatccagctgagccacgtgacctggagcgctgacagcaaggtgctgctgtttggcatggccaatggagagatccacatctatgacaaccagggcaacttcatgatcaagatgaagctgagctgcctggtgaatgtgactggagccatcagcattgctggcatccactggtaccacggcacagagggctacgtggagccagactgcccctgcctggccgtgtgctttgacaatggccgctgccagatcatgagacatgaaaatgaccagaaccctgtgctgattgacaccggcatgtatgtggtgggcatccagtggaaccacatgggctctgtgctggccgtggccggcttccagaaggccgccatgcaggacaaggatgtgaacatcgtgcagttctacaccccatttggagagcacctgggcaccctgaaggtgcctgggaaggagatcagcgccctgtcctgggagggcggcggcctgaagatcgccctggccgtggacagcttcatctactttgccaacatccggcccaactacaagtggggctactgcagcaacacagtggtgtatgcctacaccaggccagacaggcctgagtactgtgtggtgttctgggacaccaagaacaatgagaagtatgtgaagtatgtgaagggcctcatcagcatcaccacctgtggggacttctgcatcctggccaccaaggcagatgagaaccacccccaggaggagaatgagatggagaccttcggggccacctttgtgctggtgctgtgcaacagcatcggcacccccctggaccccaagtacattgatattgtgcccctgtttgtggccatgaccaagacccacgtgattgctgccagcaaggaggccttctacacctggcagtacagagtggccaagaagctgacagccctggagatcaaccagatcaccaggagcaggaaggagggccgggagcgcatctaccacgtggatgacaccccatctggctccatggatggagtgctggactacagcaagaccatccagggcacccgggaccccatctgtgccatcacagccagtgacaagatcctgattgtgggccgggagagcggcaccatccagcgctacagcctgcccaacgtgggcctcatccagaagtacagcctgaactgccgggcctaccagctgagcctgaactgcaacagcagccggctggccatcatcgacatcagcggcgtgctgaccttctttgacctggatgcccgggtgacagacagcacaggccagcaggtggtgggggagctgctgaagctggagaggagagatgtgtgggacatgaagtgggccaaggacaacccagacctgtttgccatgatggagaagaccaggatgtatgtgttcaggaacctggaccctgaggagcccatccagaccagcggctacatctgcaactttgaggacctggagatcaagtctgtgctgctggatgagatcctgaaggaccctgagcaccccaacaaggactacctgatcaactttgagatccgcagcctgcgggacagccgggccctgattgagaaggtgggcatcaaggatgccagccagttcatcgaggacaacccccacccccggctgtggaggctgctggccgaggccgccctgcagaagctggacctgtacacagctgagcaggcctttgtgcgctgcaaggactaccagggcatcaagtttgtgaagaggctgggcaagctgctgtctgagagcatgaagcaggccgaggtggtgggctacttcggccgctttgaggaggccgagaggacctacctggagatggaccggcgggacctggccatcggcctgcggctgaagctgggggactggttccgggtgctgcagctgctgaagacaggcagcggagatgctgatgacagcctgctggagcaggccaacaatgccatcggggactactttgctgaccggcagaagtggctgaatgctgtgcagtactacgtgcagggcaggaaccaggagcggctggccgagtgctactacatgctggaggactatgagggcctggagaacctggccatcagcctgcctgagaaccacaagctgctgcctgagatcgcccagatgtttgtgcgggtgggcatgtgtgagcaggccgtgacagccttcctgaagtgcagccagcccaaggctgctgtggacacctgtgtgcacctgaaccagtggaacaaggctgtggagctggccaagaaccacagcatgaaggagatcggcagcctgctggcccgctatgccagccacctgctggagaagaacaagaccctggatgccatcgagctgtacaggaaggccaactacttctttgatgctgccaagctgatgttcaagattgctgatgaggaggccaagaagggcagcaagcccctgcgggtgaagaagctgtatgtgctgagcgccctgctgattgagcagtaccacgagcagatgaagaatgcccagaggggcaaggtgaagggcaagagcagcgaggccaccagcgccctggccggcctgctggaggaggaggtgctgagcaccacagaccgcttcacagacaatgcctggagaggagctgaggcctaccacttcttcatcctggcccagaggcagctgtatgagggctgtgtggacacagccctgaagacagccctgcacctgaaggactatgaggacatcatcccccctgtggagatctacagcctgctggccctgtgtgcctgtgccagccgggccttcggcacctgcagcaaggccttcatcaagctgaagagcctggagaccctgagcagcgagcagaagcagcagtatgaggacctggccctggagatcttcaccaagcacaccagcaaggacaacaggaagccagagctggacagcctgatggagggcggggagggcaagctgcccacctgtgtggccaccggcagccccatcacagagtaccagttctggatgtgcagcgtgtgcaagcacggcgtgctggcccaggagatcagccactacagcttctgccccctgtgccacagccctgtgggctag

SEQ ID NO: 176014 - DNA, 1680 bp, synthetic construct
  misc_feature 1..1680: note = Description of Artificial Sequence: Synthetic coding sequence
  source 1..1680: mol_type = other DNA
atgaccaagacccacgtgattgctgccagcaaggaggccttctacacctggcagtacagagtggccaagaagctgacagccctggagatcaaccagatcaccaggagcaggaaggagggccgggagcgcatctaccacgtggatgacacccccagcggctccatggatggagtgctggactacagcaagaccatccagggcacccgggaccccatctgtgccatcacagccagtgacaagatcctgattgtgggccgggagagcggcaccatccagcgctacagcctgcccaacgtgggcctcatccagaagtacagcctgaactgccgggcctaccagctgagcctgaactgcaacagcagccggctggccatcatcgacatctctggagtgctgaccttctttgacctggatgcccgggtgacagacagcacaggccagcaggtggtgggggagctgctgaagctggagaggagagatgtgtgggacatgaagtgggccaaggacaacccagacctgtttgccatgatggagaagaccaggatgtatgtgttcaggaacctggaccctgaggagcccatccagaccagcggctacatctgcaactttgaggacctggagatcaagtctgtgctgctggatgagatcctgaaggaccctgagcaccccaacaaggactacctgatcaactttgagatccgcagcctgcgggacagccgggccctgattgagaaggtgggcatcaaggatgccagccagttcatcgaggacaacccccacccccggctgtggaggctgctggccgaggccgccctgcagaagctggacctgtacacagctgagcaggcctttgtgcgctgcaaggactaccagggcatcaagtttgtgaagaggctgggcaagctgctgtctgagagcatgaagcaggccgaggtggtgggctacttcggccgctttgaggaggccgagaggacctacctggagatggacagaagagacctggccatcggcctgcggctgaagctgggggactggttccgggtgctgcagctgctgaagacaggcagcggagatgctgatgacagcctgctggagcaggccaacaatgccatcggggactactttgctgaccggcagaagtggctgaatgctgtgcagtactacgtgcagggcaggaaccaggagcggctggccgagtgctactacatgctggaggactatgagggcctggagaacctggccatcagcctgcctgagaaccacaagctgctgcccatcgcagatgaggaggccaagaagggcagcaagcccctgcgggtgaagaagctgtatgtgctgagcgccctgctgattgagcagtaccacgagcagatgaagaatgcccagaggggcaaggtgaagggcaagagcagcgaggccaccagcgccctggccggcctgctggaggaggaggtgctgagcaccacagaccgcttcacagacaatgcctggagaggagctgaggcctaccacttcttcatcctggcccagaggcagctgtatgagggctgtgtggacacagccctgaagacagtggagaagggcaactgccagcacgccctgccccaggaggcccagagcctgagcatcaacagcggctgtgctgtgtatgccaacacagtgtccctgctgaggaagtag

SEQ ID NO: 176015 - DNA, 2856 bp, synthetic construct
  misc_feature 1..2856: note = Description of Artificial Sequence: Synthetic coding sequence
  source 1..2856: mol_type = other DNA
atgtgctgcacagagggcagcctgaggaagagggacagccagagggcccctgaggccgtgctgtgcctgcagctgtggcagaggacagtgcccctggacaccctgaagggcctgggcacctgcttccccagcggccctgagctgcggggagctggcattgctgctgccatggagcgggccagcgagaggagaacagccagcgccctgtttgctggcttccgggccctgggcctcttcagcaatgacatcccccacgtggtgcgcttcagcgccctgaagaggcgcttctacgtgaccacctgtgtgggcaagagcttccacacctatgatgtgcagaagctgagcctggtggccgtgagcaacagcgtgccccaggacatctgctgcatggccgcagatggccgcctggtgtttgctgcctatggaaatgtgttcagcgcctttgccaggaacaaggagatcgtgcacaccttcaagggccacaaggccgagatccacttcctgcagccctttggagaccacatcatctctgtggacacagatggcatcctgatcatctggcacatctacagcgaggaggagtacctgcagctgacctttgacaagtctgtgttcaagatcagcgccatcctgcaccccagcacctacctgaacaagatcctgctgggcagcgagcagggcagcctgcagctgtggaatgtgaagagcaacaagctgctgtacaccttccctggctggaaggtgggcgtgacagccctgcagcaggccccagctgtggatgtggtggccatcggcctgatgagcggccaggtgatcatccacaacatcaagttcaatgagaccctgatgaagttccggcaggactggggccccatcaccagcatctccttcagaacagatggccaccctgtgatggctgctggcagcccctgtggccacatcggcctgtgggacctggaggacaagaagctgatcaaccagatgagaaatgcccacagcacagccatcgccggcctgaccttcctgcaccgggagcccctgctggtgaccaatggagctgacaatgccctgcgcatctggatctttgatggccccaccggggagggccgcctgctgcgcttcaggatgggccacagcgcccccctgaccaacatccgctactacggccagaatggccagcagatcctgagcgccagccaggacggcaccctgcagagcttcagcacagtgcatgagaagttcaacaagagcctgggccacggcctcatcaacaagaagagggtgaagaggaagggcctgcagaacaccatgtctgtgcggctgccccccatcaccaagtttgctgctgaggaggcccgggagagtgactgggatggcatcatcgcctgccaccagggcaagctgagctgcagcacctggaactaccagaagagcaccatcggggcctacttcctgaagcccaaggagctgaagaaggatgacatcacagccacagctgtggacatcaccagctgtggcaactttgctgtgattggcctgagcagcggcaccgtggatgtgtacaacatgcagagcggcatccaccggggcagctttgggaaggaccaggcccacaagggctctgtgcggggcgtggccgtggatggcctgaaccagctgactgtgaccactggaagtgagggcctgctgaagttctggaacttcaagaacaagatcctgatccacagcgtgtccctgagcagcagccccaacatcatgctgctgcaccgggacagcggcatcctgggcctggccctggatgacttcagcatctctgtgctggacatcgagaccaggaagatcgtgcgggagttcagcggccaccagggccagatcaatgacatggccttctccccagatggccgctggctgatctctgctgccatggactgcagcatccgcacctgggacctgcccagcggctgcctgattgactgcttcctgctggacagcgcccccctgaatgtgtccatgagccccaccggggacttcctggccaccagccacgtggaccacctgggcatctacctgtggagcaacatcagcctgtacagcgtggtgtccctgcggcccctgcctgctgactatgtgcccagcatcgtgatgctgcccggcacctgccagacccaggatgtggaggtgtctgaggagaccgtggagcccagtgatgagctgattgaatatgacagccctgagcagctgaatgagcagctggtgaccctgagcctgctgcctgagagccgctggaagaacctgctgaacctggatgtgatcaagaagaagaacaagcccaaggagccccccaaggtgcccaagagcgcccccttcttcatccccaccatccctggcctggtgcccaggtatgctgcccctgagcagaacaatgacccccagcagagcaaggtggtgaacctgggcgtgctggcccagaagagtgacttctgcctgaagctggaggagggcctggtgaacaacaagtatgacacagccctgaacctgctgaaggagagcggccccagcggcattgaaacagagctgcggagcctgagcccagactgtggcggcagcattgaggtgatgcagagcttcctgaagatgattggcatgatgctggacaggaagagggactttgagctggcccaggcctacctggccctcttcctgaagctgcacctgaagatgctgcccagcgagcctgtgctgctggaggagatcaccaacctgagcagccaggtggaggagaactggacccacctgcagagcctcttcaaccagagcatgtgcatcctgaactacctgaagagcgccctgctgtag

SEQ ID NO: 176016 - DNA, 2856 bp, synthetic construct; identical to SEQ ID NO: 176015
  misc_feature 1..2856: note = Description of Artificial Sequence: Synthetic coding sequence
  source 1..2856: mol_type = other DNA

SEQ ID NO: 176017 - DNA, 1239 bp, synthetic construct
  misc_feature 1..1239: note = Description of Artificial Sequence: Synthetic coding sequence
  source 1..1239: mol_type = other DNA
atggccggctctgtgggcctggccctgtgtggccagaccctggtggtgcggggcggcagccgcttcctggccaccagcatcgccagcagtgatgatgacagcctcttcatctatgactgcagcgctgctgagaagaagagccaggagaacaagggagaagatgcccccctggaccagggcagcggggccatcctggccagcaccttcagcaagagcggcagctactttgccctgacagatgacagcaagaggctcatcctcttccgcaccaagccctggcagtgcctgtctgtgaggacagtggcccggcgctgcacagccctgaccttcatcgccagcgaggagaaggtgctggtggccgacaagtctggagatgtgtacagcttctctgtgctggagccccacggctgcggccgcctggagctgggccacctgtccatgctgctggatgtggccgtgtccccagatgaccgcttcatcctgacagctgacagagatgagaagatccgggtgtcctgggccgccgccccccacagcattgagagcttctgcctgggccacacagaatttgtgagccgcatctctgtggtgcccacccagcccggcctgctgctgagcagcagtggagatggcaccctgcggctgtgggagtaccgcagcggccggcagctgcactgctgccacctggccagcctgcaggagctggtggacccccaggccccccagaagtttgctgccagcagaattgccttctggtgccaggagaactgtgtggccctgctgtgtgatggcacccctgtggtgtacatcttccagctggatgcccggcggcagcagctggtgtaccggcagcagctggccttccagcaccaggtgtgggatgtggcctttgaggagacccagggcctgtgggtgctgcaggactgccaggaggcccccctggtgctgtacagacctgtgggggaccagtggcagagcgtgcctgagagcacagtgctgaagaaggtgtctggagtgctgcggggcaactgggccatgctggagggcagcgctggagcagatgccagcttcagcagcctgtacaaggccacctttgacaacgtgaccagctacctgaagaagaaggaggagcggctgcagcagcagctggagaagaagcagaggagaagaagccccccacctggcccagatggccacgccaagaagatgaggcctggagaggccaccctgagctgctag

SEQ ID NO: 176018 - DNA, 1239 bp, synthetic construct; identical to SEQ ID NO: 176017
  misc_feature 1..1239: note = Description of Artificial Sequence: Synthetic coding sequence
  source 1..1239: mol_type = other DNA

SEQ ID NO: 176019 - DNA, 2034 bp, synthetic construct
  misc_feature 1..2034: note = Description of Artificial Sequence: Synthetic coding sequence
  source 1..2034: mol_type = other DNA
atggccgcccaccaccggcagaacacagctggccgcaggaaggtgcaggtgtcctatgtgatcagagatgaggtggagaagtacaacagaaatggagtgaatgccctgcagctggaccctgccctgaacagactcttcaccgctggccgggacagcatcatccgcatctggagcgtgaaccagcacaagcaggacccctacatcgcctccatggagcaccacacagactgggtgaatgacatcgtgctgtgctgcaatggcaagaccctcatcagcgccagcagtgacaccaccgtgaaggtgtggaatgcccacaagggcttctgcatgagcaccctgcggacccacaaggactatgtgaaggccctggcctatgccaaggacaaggagctggtggccagcgctggcctggaccggcagatcttcctgtgggatgtgaacaccctgacagccctgacagccagcaacaacacagtgaccaccagcagcctgagcggcaacaaggacagcatctacagcctggccatgaaccagctgggcaccatcatcgtgtctggcagcacagagaaggtgctgcgggtgtgggaccccaggacctgtgccaagctgatgaagctgaagggccacacagacaacgtgaaggccctgctgctgaacagagatggcacccagtgcctgagcggcagcagtgatggcaccatccggctgtggagcctgggccagcagcgctgcatcgccacctacagagtgcatgatgagggcgtgtgggccctgcaggtgaatgatgccttcacccacgtgtacagcggcggccgggacaggaagatctactgcacagacctgaggaacccagacatccgggtgctgatctgtgaggagaaggcccctgtgctgaagatggagctggacagatctgctgaccccccaccagccatctgggtggccaccaccaagagcacagtgaacaagtggaccctgaagggcatccacaacttccgggccagcggggactatgacaatgactgcaccaaccccatcacccccctgtgcacccagcctgaccaggtgatcaagggcggggccagcatcatccagtgccacatcctgaatgacaagaggcacatcctgaccaaggacaccaacaacaacgtggcctactgggatgtgctgaaggcctgcaaggtggaggacctgggcaaggtggactttgaagatgagatcaagaagcgcttcaagatggtgtatgtgcccaactggttctctgtggacctgaagacaggcatgctgaccatcaccctggatgaaagtgactgctttgctgcctgggtgtctgccaaggatgctggcttcagcagcccagatggcagtgaccccaagctgaacctgggcggcctgctgctgcaggccctgctggagtactggcccaggacccacgtgaaccccatggatgaggaggagaatgaggtgaaccacgtgaatggagagcaggagaacagagtgcagaagggaaatggctacttccaggtgcccccccacacccctgtgatctttggagaggccggcggccgcaccctcttccggctgctgtgccgggacagcggcggggagacagagagcatgctgctgaatgaaacagtgccccagtgggtgattgacatcaccgtggacaagaacatgcccaagttcaacaagatccccttctacctgcagccccacgccagcagcggggccaagaccctgaagaaggaccggctgagcgccagtgacatgctgcaggtgaggaaggtgatggagcacgtgtatgagaagatcatcaacctggacaatgaaagccagaccaccagcagcagcaacaatgagaagccaggagagcaggagaaggaggaggacattgctgtgctggccgaggagaagattgagctgctgtgccaggaccaggtgctggaccccaacatggacctgaggacagtgaagcacttcatctggaagagcggcggggacctgaccctgcactaccggcagaagagcacctag

SEQ ID NO: 176020 - DNA, 1788 bp, synthetic construct
  misc_feature 1..1788: note = Description of Artificial Sequence: Synthetic coding sequence
  source 1..1788: mol_type = other DNA
atggagtgccagagcgcccaggtgatcagcgccagcagtgacaccaccgtgaaggtgtggaatgcccacaagggcttctgcatgagcaccctgcggacccacaaggactatgtgaaggccctggcctatgccaaggacaaggagctggtggccagcgctggcctggaccggcagatcttcctgtgggatgtgaacaccctgacagccctgacagccagcaacaacacagtgaccaccagcagcctgagcggcaacaaggacagcatctacagcctggccatgaaccagctgggcaccatcatcgtgtctggcagcacagagaaggtgctgcgggtgtgggaccccaggacctgtgccaagctgatgaagctgaagggccacacagacaacgtgaaggccctgctgctgaacagagatggcacccagtgcctgagcggcagcagtgatggcaccatccggctgtggagcctgggccagcagcgctgcatcgccacctacagagtgcatgatgagggcgtgtgggccctgcaggtgaatgatgccttcacccacgtgtacagcggcggccgggacaggaagatctactgcacagacctgaggaacccagacatccgggtgctgatctgtgaggagaaggcccctgtgctgaagatggagctggacagatctgctgaccccccaccagccatctgggtggccaccaccaagagcacagtgaacaagtggaccctgaagggcatccacaacttccgggccagcggggactatgacaatgactgcaccaaccccatcacccccctgtgcacccagcctgaccaggtgatcaagggcggggccagcatcatccagtgccacatcctgaatgacaagaggcacatcctgaccaaggacaccaacaacaacgtggcctactgggatgtgctgaaggcctgcaaggtggaggacctgggcaaggtggactttgaagatgagatcaagaagcgcttcaagatggtgtatgtgcccaactggttctctgtggacctgaagacaggcatgctgaccatcaccctggatgaaagtgactgctttgctgcctgggtgtctgccaaggatgctggcttcagcagcccagatggcagtgaccccaagctgaacctgggcggcctgctgctgcaggccctgctggagtactggcccaggacccacgtgaaccccatggatgaggaggagaatgaggtgaaccacgtgaatggagagcaggagaacagagtgcagaagggaaatggctacttccaggtgcccccccacacccctgtgatctttggagaggccggcggccgcaccctcttccggctgctgtgccgggacagcggcggggagacagagagcatgctgctgaatgaaacagtgccccagtgggtgattgacatcaccgtggacaagaacatgcccaagttcaacaagatccccttctacctgcagccccacgccagcagcggggccaagaccctgaagaaggaccggctgagcgccagtgacatgctgcaggtgaggaaggtgatggagcacgtgtatgagaagatcatcaacctggacaatgaaagccagaccaccagcagcagcaacaatgagaagccaggagagcaggagaaggaggaggacattgctgtgctggccgaggagaagattgagctgctgtgccaggaccaggtgctggaccccaacatggacctgaggacagtgaagcacttcatctggaagagcggcggggacctgaccctgcactaccggcagaagagcacctag

SEQ ID NO: 176021 - DNA, 366 bp, synthetic construct
  misc_feature 1..366: note = Description of Artificial Sequence: Synthetic coding sequence
  source 1..366: mol_type = other DNA
atgcccaagttcaacaagatccccttctacctgcagccccacgccagcagcggggccaagaccctgaagaaggaccggctgagcgccagtgacatgctgcaggtgaggaaggtgatggagcacgtgtatgagaagatcatcaacctggacaatgaaagccagaccaccagcagcagcaacaatgagaagccaggagagcaggagaaggaggaggacattgctgtgctggccgaggagaagattgagctgctgtgccaggaccaggtgcgggtgctggaccccaacatggacctgaggacagtgaagcacttcatctggaagagcggcggggacctgaccctgcactaccggcagaagagcacctag

SEQ ID NO: 176022 - DNA, 1209 bp, synthetic construct
  misc_feature 1..1209: note = Description of Artificial Sequence: Synthetic coding sequence
  source 1..1209: mol_type = other DNA
atggccgcccaccaccggcagaacacagctggccgcaggaaggtgcagtgcctgagcggcagcagtgatggcaccatccggctgtggagcctgggccagcagcgctgcatcgccacctacagagtgcatgatgagggcgtgtgggccctgcaggtgaatgatgccttcacccacgtgtacagcggcggccgggacaggaagatctactgcacagacctgaggaacccagacatccgggtgctgatctgtgaggagaaggcccctgtgctgaagatggagctggacagatctgctgaccccccaccagccatctgggtggccaccaccaagagcacagtgaacaagtgggcctgcaaggtggaggacctgggcaaggtggactttgaagatgagatcaagaagcgcttcaagatggtgtatgtgcccaactggttctctgtggacctgaagacaggcatgctgaccatcaccctggatgaaagtgactgctttgctgcctgggtgtctgccaaggatgctggcttcagcagcccagatggcagtgaccccaagctgaacctgggcggcctgctgctgcaggccctgctggagtactggcccaggacccacgtgaaccccatggatgaggaggagaatgaggtgaaccacgtgaatggagagcaggagaacagagtgcagaagggaaatggctacttccaggtgcccccccacacccctgtgatctttggagaggccggcggccgcaccctcttccggctgctgtgccgggacagcggcggggagacagagagcatgctgctgaatgagaccgtgccccagtgggtgattgacatcaccgtggacaagaacatgcccaagttcaacaagatccccttctacctgcagccccacgccagcagcggggccaagaccctgaagaaggaccggctgagcgccagtgacatgctgcaggtgaggaaggtgatggagcacgtgtatgagaagatcatcaacctggacaatgaaagccagaccaccagcagcagcaacaatgagaagccaggagagcaggagaaggaggaggacattgctgtgctggccgaggagaagattgagctgctgtgccaggaccaggtgctggaccccaacatggacctgaggacagtgaagcacttcatctggaagtctggaggagacctgaccctgcactaccggcagaagagcacctag

SEQ ID NO: 176023 - DNA, 651 bp, synthetic construct
  misc_feature 1..651: note = Description of Artificial Sequence: Synthetic coding sequence
  source 1..651: mol_type = other DNA
atggatgccctggaggactatgtgtggccccgggccaccagcgagctgatcctgctgcctgtgacaggcctggagtgtgtgggggaccggctgctggccggggagggcccagatgtgctggtgtacagcctggactttggaggccacctgaggatgatcaagagggtgcagaacctgctgggccactacctgatccacggcttccgggtgcggcctgagcccaatggagacctggacctggaggccatggtggccgtgtttggcagcaagggcctgcgggtggtgaagatctcctggggccagggccacttctgggagctgtggaggagcggcctgtggaacatgtctgactggatctgggatgcccgctggctggagggcaacatcgccctggccctgggccacaacagcgtggtgctgtatgaccctgtggtgggctgcatcctgcaggaggtgccctgcacagaccgctgcaccctgagcagcgcctgcctgattggagatgcctggaaggagctgaccatcgtggccggggctgtgagcaaccagctgctggtgtggtacccagccacagccttcaccctgtacctgagcgcccggcccacccccttctgctgcgtgctgacccccaggatgtgcacccggctgtag

SEQ ID NO: 176024 - DNA, 3456 bp, synthetic construct
  misc_feature 1..3456: note = Description of Artificial Sequence: Synthetic coding sequence
  source 1..3456: mol_type = other DNA
atgggcagcgctgcccgctgggagggcagcttcagccgggagttcagcagcctgctgagccggggctgcctgagcaccagcagaattgacatggatgccctggaggactatgtgtggccccgggccaccagcgagctgatcctgctgcctgtgacaggcctggagtgtgtgggggaccggctgctggccggggagggcccagatgtgctggtgtacagcctggactttggaggccacctgaggatgatcaagagggtgcagaacctgctgggccactacctgatccacggcttccgggtgcggcctgagcccaatggagacctggacctggaggccatggtggccgtgtttggcagcaagggcctgcgggtggtgaagatctcctggggccagggccacttctgggagctgtggaggagcggcctgtggaacatgtctgactggatctgggatgcccgctggctggagggcaacatcgccctggccctgggccacaacagcgtggtgctgtatgaccctgtggtgggctgcatcctgcaggaggtgccctgcacagaccgctgcaccctgagcagcgcctgcctgattggagatgcctggaaggagctgaccatcgtggccggggctgtgagcaaccagctgctggtgtggtacccagccacagccctggccgacaacaagcctgtggccccagaccggcgcatcagcggccacgtgggcatcatcttctccatgagctacctggagagcaagggcctgctggccacagcctctgaagatagatctgtgcgcatctggaaggtgggggacctgcgggtgcctgggggccgggtgcagaacatcggccactgcttcggccacagcgcccgggtgtggcaggtgaagctgctggagaactacctgatctctgctggggaggactgtgtgtgcctggtgtggagccatgaaggagagatcctgcaggccttccggggccaccagggccggggcatccgggccatcgccgcccacgagcggcaggcctgggtgatcactggaggagatgacagcggcatccggctgtggcacctggtgggccggggctaccggggcctgggcgtgtctgccctgtgcttcaagagccgcagccggcccggcaccctgaaggctgtgaccctggccggctcctggaggctgctggccgtgacagacaccggggccctgtacctgtatgatgtggaggtgaagtgctgggagcagctgctggaggacaagcacttccagagctactgcctgctggaggccgcccctggccctgagggcttcggcctgtgtgccatggccaacggggagggccgggtgaaggtggtgcccatcaacacccccacagctgctgtggaccagaccctcttccctgggaaggtgcacagcctgtcctgggccctgcggggctatgaggagctgctgctgctggccagcggccctgggggcgtggtggcctgcctggagatctctgctgcccccagcggcaaggccatctttgtgaaggagcgctgccgctacctgctgccccccagcaagcagcgctggcacacctgcagcgccttcctgcccccaggggacttcctggtgtgtggggacagaagaggctctgtgctgctcttccccagccggcccggcctgctgaaggaccccggggtgggcggcaaggcccgggccggggccggggcccctgtggtgggcagcggcagcagcggcggcggcaatgccttcaccggcctgggccctgtgtccaccctgcccagcctgcacggcaagcagggcgtgacctctgtgacctgccacggcggctacgtgtacaccaccggcagagatggagcctactaccagctgtttgtgagagatggccagctgcagcctgtgctgcggcagaagagctgccggggcatgaactggctggccggcctgagaattgtgcctgatggctccatggtgatcctgggcttccacgccaatgaatttgtggtgtggaaccccaggagccatgagaagctgcacatcgtgaactgtggcggcggccaccgctcctgggccttcagtgacacagaagctgccatggcctttgcctacctgaaggatggagatgtgatgctgtaccgggccctgggcggctgcacccggccccacgtgatcctgcgggagggcctgcacggccgggagatcacctgtgtgaagagggtgggcaccatcaccctgggcccagaatatggagtgcccagcttcatgcagccagatgacctggagcccggcagcgagggccctgacctgacagacatcgtcatcacctgcagcgaggacaccaccgtgtgtgtgctggccctgcccaccaccactggaagtgcccacgccctgacagctgtgtgcaaccacatcagctctgtgcgggctgtggccgtgtggggcatcggcacccctgggggcccccaggacccccagcccggcctgacagcccacgtggtgtctgctgggggccgggcagagatgcactgcttcagcatcatggtgaccccagaccccagcacccccagccggctggcctgccacgtgatgcacctgagcagccaccggctggatgagtactgggaccggcagaggaacagacacaggatggtgaaggtggaccctgagacccgctacatgagcctggccgtgtgtgagctggaccagcccggcctgggccccctggtggccgccgcctgcagtgatggagctgtgcggctcttcctgctgcaggacagcggccgcatcctgcagctgctggccgagaccttccaccacaagagatgtgtgctgaaggtgcacagcttcacccatgaggcccccaaccagaggcggcggctgctgctgtgcagcgctgccacagatggcagcctggccttctgggacctgaccaccatgctggaccatgacagcacagtgctggagccccctgtggaccccggcctgccctaccgcctgggcacccccagcctgaccctgcaggcccacagctgtggcatcaacagcctgcacaccctgcccacccgggagggccaccacctggtggccagcggctctgaagatggcagcctgcacgtgtttgtgctggccgtggagatgctgcagctggaggaggccgtgggggaggccggcctggtgccccagctgcgggtgctggaggagtacagcgtgccctgtgcccatgctgcccacgtgacaggcctgaagatcctgagccccagcatcatggtgtctgccagcattgaccagaggctgaccttctggaggctgggccatggagagcccaccttcatgaacagcaccgtcttccacgtgcctgatgtggccgacatggactgctggcctgtgtccccagagtttggccaccgctgtgccctgggcggccagggcctggaggtgtacaactggtatgactag

SEQ ID NO: 176025 - DNA, 3213 bp, synthetic construct
  misc_feature 1..3213: note = Description of Artificial Sequence: Synthetic coding sequence
  source 1..3213: mol_type = other DNA
atgatcaagagggtgcagaacctgctgggccactacctgattcatggcttccgggtgcggcctgagcccaacggggacctggacctggaggccatggtggccgtgtttggcagcaagggcctgcgggtggtgaagatctcctggggccagggccacttctgggagctgtggaggagcggcctgtggaacatgtctgactggatctgggatgcccgctggctggagggcaacatcgccctggccctgggccacaacagcgtggtgctgtatgaccctgtggtgggctgcatcctgcaggaggtgccctgcacagaccgctgcaccctgagcagcgcctgcctgattggagatgcctggaaggagctgaccatcgtggccggggctgtgagcaaccagctgctggtgtggtacccagccacagccctggccgacaacaagcctgtggccccagaccggcgcatcagcggccacgtgggcatcatcttctccatgagctacctggagagcaagggcctgctggccacagccagcgaggacagatctgtgcgcatctggaaggtgggggacctgcgggtgcctgggggccgggtgcagaacatcggccactgcttcggccacagcgcccgggtgtggcaggtgaagctgctggagaactacctgatctctgctggggaggactgtgtgtgcctggtgtggagccatgaaggagagatcctgcaggccttccggggccaccagggccggggcatccgggccatcgccgcccacgagcggcaggcctgggtgatcactggaggagatgattctggcatccggctgtggcacctggtgggccggggctaccggggcctgggcgtgtctgccctgtgcttcaagagccgcagcaggcctggcaccctgaaggctgtgaccctggccggctcctggaggctgctggccgtgacagacacaggagccctgtacctgtatgatgtggaggtgaagtgctgggagcagctgctggaggacaagcacttccagagctactgcctgctggaggccgcccctggccctgagggcttcggcctgtgtgccatggccaatggagagggccgggtgaaggtggtgcccatcaacacccccacagctgctgtggaccagaccctcttccctgggaaggtgcacagcctgtcctgggccctgcggggctatgaggagctgctgctgctggccagcggccctggaggagtggtggcctgcctggagatctctgctgcccccagcggcaaggccatctttgtgaaggagcgctgccgctacctgctgccccccagcaagcagcgctggcacacctgcagcgccttcctgcccccaggggacttcctggtgtgtggggaccggcggggctctgtgctgctcttccccagcaggcctggcctgctgaaggaccccggggtgggcggcaaggcccgggccggggccggggcccctgtggtgggcagcggcagcagcggcggcggcaatgccttcaccggcctgggccctgtgtccaccctgcccagcctgcacggcaagcagggcgtgacctctgtgacctgccacggcggctacgtgtacaccaccggcagagatggagcctactaccagctgtttgtgagagatggccagctgcagcctgtgctgcggcagaagagctgccggggcatgaactggctggccggcctgcgcatcgtgcctgatggctccatggtgatcctgggcttccacgccaatgaatttgtggtgtggaaccccaggagccatgagaagctgcacatcgtgaactgtggcggcggccaccgctcctgggccttcagtgacacagaggccgccatggcctttgcctacctgaaggatggagatgtgatgctgtaccgggccctgggcggctgcacccggccccacgtgatcctgcgggagggcctgcacggccgggagatcacctgtgtgaagagggtgggcaccatcaccctgggcccagaatatggagtgcccagcttcatgcagccagatgacctggagcccggcagcgagggccctgacctgacagacatcgtcatcacctgcagcgaggacaccaccgtgtgtgtgctggccctgcccaccaccaccggcagcgcccacgccctgacagctgtgtgcaaccacatcagctctgtgcgggctgtggccgtgtggggcatcggcaccccaggcggcccccaggacccccagcccggcctgacagcccacgtggtgtctgctgggggccgggcagagatgcactgcttcagcatcatggtgaccccagaccccagcacccccagccggctggcctgccacgtgatgcacctgagcagccaccggctggatgagtactgggaccggcagaggaacagacacaggatggtgaaggtggaccctgagacccgctacatgagcctggccgtgtgtgagctggaccagcccggcctgggccccctggtggccgccgcctgcagtgatggagctgtgcggctcttcctgctgcaggacagcggccgcatcctgcagctgctggccgagaccttccaccacaagagatgtgtgctgaaggtgcacagcttcacccatgaggcccccaaccagaggcggcggctgctgctgtgcagcgctgccacagatggcagcctggccttctgggacctgaccaccatgctggaccatgacagcacagtgctggagccccctgtggaccccggcctgccctaccgcctgggcacccccagcctgaccctgcaggcccacagctgtggcatcaacagcctgcacaccctgcccacccgggagggccaccacctggtggccagcggctctgaagatggcagcctgcacgtgtttgtgctggccgtggagatgctgcagctggaggaggccgtgggggaggccggcctggtgccccagctgcgggtgctggaggagtacagcgtgccctgtgcccacgccgcccacgtgacaggcctgaagatcctgagccccagcatcatggtgtctgccagcattgaccagaggctgaccttctggaggctgggccacggggagcccaccttcatgaacagcacagtgttccacgtgcctgatgtggccgacatggactgctggcctgtgtccccagagtttggccaccgctgtgccctgggcggccagggcctggaggtgtacaactggtatgactag

SEQ ID NO: 176026 - DNA, 4557 bp, synthetic construct
  misc_feature 1..4557: note = Description of Artificial Sequence: Synthetic coding sequence
  source 1..4557: mol_type = other DNA
atggctgctgtgggcagcggcggctacgccagaaatgatgctggggagaagctgcccagcgtgatggccggcgtgcctgcccggcggggccagagcagccccccaccagccccacccatctgcctgcggcggaggacccggctgagcacagccagcgaggagaccgtgcagaacagagtgtccctggagaaggtgctgggcatcacagcccagaacagcagcggcctgacctgtgaccccggcaccggccacgtggcctacctggccggctgtgtggtggtgatcctggaccccaaggagaacaagcagcagcacatcttcaacacagccaggaagagcctgagcgccctggccttctccccagatggcaagtacatcgtgactggagaaaatggccacaggcctgctgtgcgcatctgggatgtggaggagaagaaccaggtggccgagatgctgggccacaagtatggagtggcctgtgtggccttcagccccaacatgaagcacatcgtgtccatgggctaccagcacgacatggtgctgaatgtgtgggactggaagaaggacatcgtggtggccagcaacaaggtgtcctgcagggtcatcgccctgtccttcagcgaggacagcagctactttgtgacagtgggcaacagacatgtgcgcttctggttcctggaggtgtccacagagaccaaggtgaccagcacagtgcccctggtgggccgcagcggcatcctgggggagctgcacaacaacatcttctgtggggtggcctgtggccggggccgcatggccggcagcaccttctgtgtgtcctacagcggcctgctgtgccagttcaatgagaagagggtgctggagaagtggatcaacctgaaggtgtccctgagcagctgcctgtgtgtgtcccaggagctgatcttctgtggctgcacagatggcatcgtgcgcatcttccaggcccacagcctgcactacctggccaacctgcccaagccccactacctgggcgtggatgtggcccagggcctggagcccagcttcctgttccacaggaaggccgaggccgtgtacccagacacagtggccctgacctttgaccccatccaccagtggctgagctgtgtgtacaaggaccacagcatctacatctgggatgtgaaggacatcaacagagtgggcaaggtgtggagcgagctgttccacagcagctatgtgtggaatgtggaggtgtacccagagtttgaggaccagagggcctgcctgcccagcggcagcttcctgacctgcagcagtgacaacaccatccgcttctggaacctggacagcagcccagacagccactggcagaagaacatcttcagcaacaccctgctgaaggtggtgtatgtggagaatgacatccagcacctgcaggacatgagccacttcccagaccggggctctgaaaatggcacccccatggatgtgaaggccggcgtgcgggtgatgcaggtgtccccagatggccagcacctggccagcggggacagaagtggcaacctgcgcatccacgagctgcacttcatggatgagctggtgaaggtggaggcccatgatgctgaggtgctgtgcctggagtacagcaagccagagaccggcctgaccctgctggccagcgccagccgggacaggctcatccacgtgctgaatgtggagaagaactacaacctggagcagaccctggatgaccacagcagcagcatcacagccatcaagtttgctggcaacagagacatccagatgatcagctgtggggctgacaagagcatctacttccgcagcgcccagcagggcagtgatggcctgcactttgtgaggacccaccacgtggccgagaagaccaccctgtatgacatggacatcgacatcacccagaagtatgtggccgtggcctgccaggacagaaatgtgcgggtgtacaacacagtgaatggcaagcagaagaagtgctacaagggcagccagggagatgagggcagcctgctgaaggtgcacgtggaccccagcggcaccttcctggccaccagctgcagcgacaagagcatcagcgtcatcgacttctacagcggggagtgcatcgccaagatgtttggccacagcgagatcatcacctccatgaagttcacctatgactgccaccacctgatcaccgtgtctggggacagctgtgtgttcatctggcacctgggccctgagatcaccaactgcatgaagcagcacctgctggagattgaccaccggcagcagcagcagcacaccaatgacaagaagaggagcggccacccccggcaggacacctacgtgtccaccccatctgagatccacagcctgagccctggagagcagacagaagatgacctggaggaggagtgtgagcctgaggagatgctgaagacccccagcaaggacagcctggaccctgacccccgctgcctgctgaccaacgggaagctgcccctgtgggccaagaggctgctgggagatgatgatgtggctgatggcctggccttccacgccaagaggagctaccagccccacggccgctgggccgagcgggccggccaggagcccctgaagaccatcctggatgcccaggacctggactgctacttcacccccatgaagccagagagcctggagaacagcatcctggacagcctggagccccagagcctggccagcctgctgtctgagagcgagagcccccaggaggccggccggggccaccccagcttcctgccccagcagaaggagagcagcgaggccagcgagctgatcctgtacagcctggaggccgaggtgacagtgactggaacagacagccagtactgcaggaaggaggtggaggccggccctggggaccagcagggcgacagctacctgcgggtgtccagtgacagccccaaggaccagagccccccagaggacagcggggagagcgaggccgacctggagtgcagctttgctgccatccacagccctgcccctcctccagaccctgcccccaggtttgccaccagcctgccccacttccctggctgtgccggccccacagaagatgagctgagcctgcctgagggccccagcgtgcccagcagcagcctgccccagaccccagagcaggagaagttcctgcggcaccactttgagaccctgacagagagcccctgccgggccctgggagatgtggaggccagcgaggccgaggaccacttcttcaacccccggctgagcatcagcacccagttcctgagcagcctgcagaaggccagccgcttcacccacaccttccccccccgggccacccagtgcctggtgaagagccctgaggtgaagctgatggaccggggcggcagccagccccgggccggcaccggctacgccagcccagacaggacccacgtgctggccgccggcaaggccgaggagaccctggaggcctggaggcctcctccaccctgcctgaccagcctggccagctgtgtgcctgccagctctgtgctgcccacagacaggaacctgcccacccccaccagcgcccccaccccaggcctggcccagggcgtgcacgcccccagcacctgcagctacatggaggccacagccagcagccgggcccgcatcagccgcagcatcagcctgggggacagcgagggccccatcgtggccaccctggcccagcccctgcggcggcccagctctgtgggggagctggccagcctgggccaggagctgcaggccatcaccacagccaccacccccagcctggacagcgagggccaggagcccgccctgcgctcctggggcaaccacgaggcccgggccaacctgcggctgaccctgagcagcgcctgtgatggcctgctgcagccccctgtggacacccagcccggggtgacagtgcctgctgtgtccttccctgcccccagccctgtggaggagagcgccctgcggctgcacggcagcgccttccggcccagcctgcctgcccctgagagccctggcctgcctgcccaccccagcaacccccagctgcctgaggcccggcccggcatccctgggggcacagccagcctgctggagcccaccagcggggccctgggcctgctgcagggcagccctgcccgctggagcgagccctgggtgcctgtggaggccctgccccccagccccctggagctgagccgggtgggcaacatcctgcaccggctgcagaccaccttccaggaggccctggacctgtacagagtgctggtgagcagcggccaggtggacaccggccagcagcaggccaggacagagctggtgtccaccttcctgtggatccacagccagctggaggccgagtgcctggtgggcacctctgtggccccagcccaggccctgcccagccctggcccccccagcccccccaccctgtaccccctggccagcccagacctgcaggccctgctggagcactacagcgagctgctggtgcaggccgtgcggaggaaggcccggggccactag

SEQ ID NO: 176027 - DNA, 1245 bp, synthetic construct
  misc_feature 1..1245: note = Description of Artificial Sequence: Synthetic coding sequence
  source 1..1245: mol_type = other DNA
atggctgctgtgggcagcggcggctacgccagaaatgatgctggggagaagctgcccagcgtgatggccggcgtgcctgcccggcggggccagagcagccccccaccagccccacccatctgcctgcggcggaggacccggctgagcacagccagcgaggagaccgtgcagaacagagtgtccctggagaaggtgctgggcatcacagcccagaacagcagcggcctgacctgtgaccccggcaccggccacgtggcctacctggccggctgtgtggtggtgatcctggaccccaaggagaacaagcagcagcacatcttcaacacagccaggaagagcctgagcgccctggccttctccccagatggcaagtacatcgtgactggagaaaatggccacaggcctgctgtgcgcatctgggatgtggaggagaagaaccaggtggccgagatgctgggccacaagtatggagtggcctgtgtggccttcagccccaacatgaagcacatcgtgtccatgggctaccagcacgacatggtgctgaatgtgtgggactggaagaaggacatcgtggtggccagcaacaaggtgtcctgcagggtcatcgccctgtccttcagcgaggacagcagctactttgtgacagtgggcaacagacatgtgcgcttctggttcctggaggtgtccacagagaccaaggtgaccagcacagtgcccctggtgggccgcagcggcatcctgggggagctgcacaacaacatcttctgtggggtggcctgtggccggggccgcatggccggcagcaccttctgtgtgtcctacagcggcctgctgtgccagttcaatgagaagagggtgctggagaagtggatcaacctgaaggtgtccctgagcagctgcctgtgtgtgtcccaggagctgatcttctgtggctgcacagatggcatcgtgcgcatcttccaggcccacagcctgcactacctggccaacctgcccaagccccactacctgggcgtggatgtggcccagggcctggagcccagcttcctgttccacaggaaggccgaggccgtgtacccagacacagtggccctgacctttgaccccatccaccagtggctgagctgtgtgtacaaggaccacagcatctacatctgggatgtgaaggacatcaacagagtgggcaaggtgtggagcgagctgttccacagcagctatgtgtggaatgtggaggccctgtcctag

SEQ ID NO: 176028 - DNA, 1452 bp, synthetic construct
  misc_feature 1..1452: note = Description of Artificial Sequence: Synthetic coding sequence
  source 1..1452: mol_type = other DNA
atggctgctgtgggcagcggcggctacgccagaaatgatgctggggagaagctgcccagcgtgatggccggcgtgcctgcccggcggggccagagcagccccccaccagccccacccatctgcctgcggcggaggacccggctgagcacagccagcgaggagaccgtgcagaacagagtgtccctggagaaggtgctgggcatcacagcccagaacagcagcggcctgacctgtgaccccggcaccggccacgtggcctacctggccggctgtgtggtggtgatcctggaccccaaggagaacaagcagcagcacatcttcaacacagccaggaagagcctgagcgccctggccttctccccagatggcaagtacatcgtgactggagaaaatggccacaggcctgctgtgcgcatctgggatgtggaggagaagaaccaggtggccgagatgctgggccacaagtatggagtggcctgtgtggccttcagccccaacatgaagcacatcgtgtccatgggctaccagcacgacatggtgctgaatgtgtgggactggaagaaggacatcgtggtggccagcaacaaggtgtcctgcagggtcatcgccctgtccttcagcgaggacagcagctactttgtgacagtgggcaacagacatgtgcgcttctggttcctggaggtgtccacagagaccaaggtgaccagcacagtgcccctggtgggccgcagcggcatcctgggggagctgcacaacaacatcttctgtggggtggcctgtggccggggccgcatggccggcagcaccttctgtgtgtcctacagcggcctgctgtgccagttcaatgagaagagggtgctggagaagtggatcaacctgaaggtgtccctgagcagctgcctgtgtgtgtcccaggagctgatcttctgtggctgcacagatggcatcgtgcgcatcttccaggcccacagcctgcactacctggccaacctgcccaagccccactacctgggcgtggatgtggcccagggcctggagcccagcttcctgttccacaggaaggccgaggccgtgtacccagacacagtggccctgacctttgaccccatccaccagtggctgagctgtgtgtacaaggaccacagcatctacatctgggatgtgaaggacatcaacagagtgggcaaggtgtggagcgagctgttccacagcagctatgtgtggaatgtggaggtgtacccagagtttgaggaccagagggcctgcctgcccagcggcagcttcctgacctgcagcagtgacaacaccatccgcttctggaacctggacagcagcccagacagccactggcagaagaacatcttcagcaacctggccccagccctgcagatgtgtggccggggccacagccggcagcccaacacccccagccctggagaaattgccagctag

SEQ ID NO: 176029 - DNA, 4572 bp, synthetic construct
  misc_feature 1..4572: note = Description of Artificial Sequence: Synthetic coding sequence
  source 1..4572: mol_type = other DNA
atggctgctgtgggcagcggcggctacgccagaaatgatgctggggagaagctgcccagcgtgatggccggcgtgcctgcccggcggggccagagcagccccccaccagccccacccatctgcctgcggcggaggacccggctgagcacagccagcgaggagaccgtgcagaacagagtgtccctggagaaggtgctgggcatcacagcccagaacagcagcggcctgacctgtgaccccggcaccggccacgtggcctacctggccggctgtgtggtggtgatcctggaccccaaggagaacaagcagcagcacatcttcaacacagccaggaagagcctgagcgccctggccttctccccagatggcaagtacatcgtgactggagaaaatggccacaggcctgctgtgcgcatctgggatgtggaggagaagaaccaggtggccgagatgctgggccacaagtatggagtggcctgtgtggccttcagccccaacatgaagcacatcgtgtccatgggctaccagcacgacatggtgctgaatgtgtgggactggaagaaggacatcgtggtggccagcaacaaggtgtcctgcagggtcatcgccctgtccttcagcgaggacagcagctactttgtgacagtgggcaacagacatgtgcgcttctggttcctggaggtgtccacagagaccaaggtgaccagcacagtgcccctggtgggccgcagcggcatcctgggggagctgcacaacaacatcttctgtggggtggcctgtggccggggccgcatggccggcagcaccttctgtgtgtcctacagcggcctgctgtgccagttcaatgagaagagggtgctggagaagtggatcaacctgaaggtgtccctgagcagctgcctgtgtgtgtcccaggagctgatcttctgtggctgcacagatggcatcgtgcgcatcttccaggcccacagcctgcactacctggccaacctgcccaagccccactacctgggcgtggatgtggcccagggcctggagcccagcttcctgttccacaggaaggccgaggccgtgtacccagacacagtggccctgacctttgaccccatccaccagtggctgagctgtgtgtacaaggaccacagcatctacatctgggatgtgaaggacatcaacagagtgggcaaggtgtggagcgagctgttccacagcagctatgtgtggaatgtggaggtgtacccagagtttgaggaccagagggcctgcctgcccagcggcagcttcctgacctgcagcagtgacaacaccatccgcttctggaacctggacagcagcccagacagccactggcagaagaacatcttcagcaacaccctgctgaaggtggtgtatgtggagaatgacatccagcacctgcaggacatgagccacttcccagaccggggctctgaaaatggcacccccatggatgtgaaggccggcgtgcgggtgatgcaggtgtccccagatggccagcacctggccagcggggacagaagtggcaacctgcgcatccacgagctgcacttcatggatgagctggtgaaggtggaggcccatgatgctgaggtgctgtgcctggagtacagcaagccagagaccggcctgaccctgctggccagcgccagccgggacaggctcatccacgtgctgaatgtggagaagaactacaacctggagcagaccctggatgaccacagcagcagcatcacagccatcaagtttgctggcaacagagacatccagatgatcagctgtggggctgacaagagcatctacttccgcagcgcccagcagggcagtgatggcctgcactttgtgaggacccaccacgtggccgagaagaccaccctgtatgacatggacatcgacatcacccagaagtatgtggccgtggcctgccaggacagaaatgtgcgggtgtacaacacagtgaatggcaagcagaagaagtgctacaagggcagccagggagatgagggcagcctgctgaaggtgcacgtggaccccagcggcaccttcctggccaccagctgcagcgacaagagcatcagcgtcatcgacttctacagcggggagtgcatcgccaagatgtttggccacagcgagatcatcacctccatgaagttcacctatgactgccaccacctgatcaccgtgtctggggacagctgtgtgttcatctggcacctgggccctgagatcaccaactgcatgaagcagcacctgctggagattgaccaccggcagcagcagcagcacaccaatgacaagaagaggagcggccacccccggcaggacacctacgtgtccaccccatctgagatccacagcctgagccctggagagcagacagaagatgacctggaggaggagtgtgagcctgaggagatgctgaagacccccagcaaggacagcctggaccctgacccccgctgcctgctgaccaacgggaagctgcccctgtgggccaagaggctgctgggagatgatgatgtggctgatggcctggccttccacgccaagaggagctaccagccccacggccgctgggccgagcgggccggccaggagcccctgaagaccatcctggatgcccaggacctggactgctacttcacccccatgaagccagagagcctggagaacagcatcctggacagcctggagccccagagcctggccagcctgctgtctgagagcgagagcccccaggaggccggccggggccaccccagcttcctgccccagcagaaggagagcagcgaggccagcgagctgatcctgtacagcctggaggccgaggtgacagtgactggaacagacagccagtactgcaggaaggaggtggaggccggccctggggaccagcagggcgacagctacctgcgggtgtccagtgacagccccaaggaccagagccccccagaggacagcggggagagcgaggccgacctggagtgcagctttgctgccatccacagccctgcccctcctccagaccctgcccccaggtttgccaccagcctgccccacttccctggctgtgccggccccacagaagatgagctgagcctgcctgagggccccagcgtgcccagcagcagcctgccccagaccccagagcaggagaagttcctgcggcaccactttgagaccctgacagagagcccctgccgggagctgtttcctgctgccctgggagatgtggaggccagcgaggccgaggaccacttcttcaacccccggctgagcatcagcacccagttcctgagcagcctgcagaaggccagccgcttcacccacaccttccccccccgggccacccagtgcctggtgaagagccctgaggtgaagctgatggacagaggaggcagccagcccagggctggcaccggctacgccagcccagacaggacccacgtgctggccgccggcaaggccgaggagaccctggaggcctggaggcctcctccaccctgcctgaccagcctggccagctgtgtgcctgccagctctgtgctgcccacagacaggaacctgcccacccccaccagcgcccccaccccaggcctggcccagggcgtgcacgcccccagcacctgcagctacatggaggccacagccagcagccgggcccgcatcagccgcagcatcagcctgggggacagcgagggccccatcgtggccaccctggcccagcccctgcggcggcccagctctgtgggggagctggccagcctgggccaggagctgcaggccatcaccacagccaccacccccagcctggacagcgagggccaggagcccgccctgcgctcctggggcaaccacgaggcccgggccaacctgcggctgaccctgagcagcgcctgtgatggcctgctgcagccccctgtggacacccagcccggggtgacagtgcctgctgtgtccttccctgcccccagccctgtggaggagagcgccctgcggctgcacggcagcgccttccggcccagcctgcctgcccctgagagccctggcctgcctgcccaccccagcaacccccagctgcctgaggcccggcccggcatccctgggggcacagccagcctgctggagcccaccagcggggccctgggcctgctgcagggcagccctgcccgctggagcgagccctgggtgcctgtggaggccctgccccccagccccctggagctgagccgggtgggcaacatcctgcaccggctgcagaccaccttccaggaggccctggacctgtacagagtgctggtgagcagcggccaggtggacaccggccagcagcaggccaggacagagctggtgtccaccttcctgtggatccacagccagctggaggctgaatgtctggtgggcacctctgtggccccagcccaggccctgcccagccctggcccccccagcccccccaccctgtaccccctggccagcccagacctgcaggccctgctggagcactacagcgagctgctggtgcaggccgtgcggaggaaggcccggggccactag

SEQ ID NO: 176030 - DNA, 1302 bp, synthetic construct
  misc_feature 1..1302: note = Description of Artificial Sequence: Synthetic coding sequence
  source 1..1302: mol_type = other DNA
gggggctacgccagaaatgatgctggggagaagctgcccagcgtgatggccggcgtgcctgcccggcggggccagagcagccccccaccagccccacccatctgcctgcggcggaggacccggctgagcacagccagcgaggagaccgtgcagaacagagtgtccctggagaaggtgctgggcatcacagcccagaacagcagcggcctgacctgtgaccccggcaccggccacgtggcctacctggccggcatgtggaggatgggccctgccagcgagagctgtggagaagattccatcgcccccagcctgagcaggacagtgcccggcatgtactgtgtggtggtgatcctggaccccaaggagaacaagcagcagcacatcttcaacacagccaggaagagcctgagcgccctggccttctccccagatggcaagtacatcgtgactggagaaaatggccacaggcctgctgtgcgcatctgggatgtggaggagaagaaccaggtggccgagatgctgggccacaagtatggagtggcctgtgtggccttcagccccaacatgaagcacatcgtgtccatgggctaccagcacgacatggtgctgaatgtgtgggactggaagaaggacatcgtggtggccagcaacaaggtgtcctgcagggtcatcgccctgtccttcagcgaggacagcagctactttgtgacagtgggcaacagacatgtgcgcttctggttcctggaggtgtccacagagaccaaggtgaccagcacagtgcccctggtgggccgcagcggcatcctgggggagctgcacaacaacatcttctgtggggtggcctgtggccggggccgcatggccggcagcaccttctgtgtgtcctacagcggcctgctgtgccagttcaatgagaagagggtgctggagaagtggatcaacctgaaggtgtccctgagcagctgcctgtgtgtgtcccaggagctgatcttctgtggctgcacagatggcatcgtgcgcatcttccaggcccacagcctgcactacctggccaacctgcccaagccccactacctgggcgtggatgtggcccagggcctggagcccagcttcctgttccacaggaaggccgaggccgtgtacccagacacagtggccctgacctttgaccccatccaccagtggctgagctgtgtgtacaaggaccacagcatctacatctgggatgtgaaggacatcaacagagtgggcaaggtgtggagcgagctgttccacagcagctatgtgtggaatgtggagtag

SEQ ID NO: 176031 - DNA, 2097 bp, synthetic construct
  misc_feature 1..2097: note = Description of Artificial Sequence: Synthetic coding sequence
  source 1..2097: mol_type = other DNA
atgtctgctgtggtggcccagaccctgcacgtgtttggcctgcggagccacgtggccaacaacatcttctactttgatgagcagatcatcatcttccccagcggcaaccactgtgtgaagtacaacgtggaccagaagtggcagaagttcatccctggcagcgagaagagccagggcatgctggccctgagcatcagccccaacagacgctacctggccatcagcgagaccgtgcaggagaagccagccatcaccatctatgagctgagcagcatcccctgcaggaagaggaaggtgctgaacaactttgacttccaggtgcagaagttcatctccatggccttctccccagacagcaagtacctgctggcccagaccagccccccagagagcaacctggtgtactggctgtgggagaagcagaaggtgatggccatcgtgagaattgacacccagaacaaccctgtgtaccaggtgtccttcagcccccaggacaacacccaggtgtgtgtgactggaaatggcatgttcaagctgctgcgctttgctgagggcaccctgaagcagaccagcttccagagaggagagccccagaactacctggcccacacctgggtggctgatgacaagatcgtggtgggcacagacaccgggaagctgttcctgtttgaaagtggggaccagcgctgggagaccagcatcatggtgaaggagcccaccaacggcagcaagagcctggatgtgatccaggagagcgagagcctcatcgagttcccccctgtgagcagccccctgcccagctatgagcagatggtggccgccagcagccacagccagatgtccatgccccaggtgtttgccatcgccgcctacagcaaaggatttgcctgcagcgctggccctggccgggtgctgctgtttgagaagatggaggagaaggacttctaccgggagagccgggagatccgcatccctgtggacccccagagcaatgaccccagccagagcgacaagcaggatgtgctgtgcctgtgcttcagccccagcgaggagaccctggtggccagcaccagcaagaaccagctgtacagcatcaccatgagcctgacagagatcagcaagggggagcccgcccactttgagtacctgatgtaccccctgcacagcgcccccatcaccggcctggccacctgcatcaggaagcccctcatcgccacctgcagcctggacaggagcatccggctgtggaactatgagaccaacaccctggagctgttcaaggagtaccaggaggaggcctacagcatcagcctgcaccccagcggccacttcatcgtggtgggctttgctgacaagctgcggctgatgaacctgctgattgatgacatccgctccttcaaggagtacagcgtgcggggctgtggggagtgcagcttcagcaatggaggccacctgtttgctgctgtgaatggaaatgtcatccacgtgtacaccaccaccagcctggagaacatcagcagcctgaagggccacacaggcaagatccgcagcatcgtgtggaatgctgatgacagcaagctgatcagcggcggcacagatggagctgtgtatgagtggaacctgagcacaggcaagcgggagacagaatgtgtgctgaagagctgcagctacaactgtgtgacagtgtccccagatgccaagatcatctttgctgtgggcagtgaccacaccctgaaggagattgctgacagcctcatcctgcgggagatcagcgcctttgatgtgacctacacagccatcgtcatcagccacagcggccgcatgatgtttgtgggcacctctgtgggcaccatccgggccatgaagtaccccctgcccctgcagaaggagttcaatgagtaccaggcccacgccggccccatcaccaaggtgtcccgggccctgagccctggcacccagagccacacctgcctgctgcgggccctcttcatccccagcaccagccagtgcctcttcagcctgctgctgctgagctacctgttcatccaccacagcctgaaccaccacctgctgaccatgaacatcctgtttgtgtag

SEQ ID NO: 176032 - DNA, 501 bp, synthetic construct
  misc_feature 1..501: note = Description of Artificial Sequence: Synthetic coding sequence
  source 1..501: mol_type = other DNA
atgtctgctgtggtggcccagaccctgcacgtgtttggcctgcggagccacgtggccaacaacatcttctactttgatgagcagatcatcatcttccccagcggcaaccactgtgtgaagtacaacgtggaccagaagtggcagaagttcatccctggcagcgagaagagccagggcatgctggccctgagcatcagccccaacagacgctacctggccatcagcgagaccgtgcaggagaagccagccatcaccatctatgagctgagcagcatcccctgcaggaagaggaaggtgctgaacaactttgacttccaggtgcagaagttcatctccatggccttctccccagacagcaagtacctgctggcccagaccagccccccagagagcaacctggtgtactggctgtgggagaagcagaaggtgatggccatcgtgagaattgacacccagaacaaccctgtgtaccaggtgtccttcagcccccaggacaactag

SEQ ID NO: 176033 - DNA, 4473 bp, synthetic construct
  misc_feature 1..4473: note = Description of Artificial Sequence: Synthetic coding sequence
  source 1..4473: mol_type = other DNA
atggccggcaacagcctggtgctgcccatcgtgctgtggggcaggaaggcccccacccactgcatctctgctgtgctgctgacagatgatggagccaccatcgtgacaggctgccatgatggccagatctgcctgtgggacctgtctgtggagctgcagatcaacccccgggccctgctgtttggccacacagccagcatcacctgcctgagcaaggcctgtgccagcagtgacaagcagtacatcgtgtctgccagcgagagcggggagatgtgcctgtgggatgtgtctgatggccgctgcatcgagttcaccaagctggcctgcacccacacaggcatccagttctaccagttctctgtgggcaaccagcgggagggccgcctgctgtgccacggccactacccagagatcctggtggtggatgccaccagcctggaggtgctgtacagcctggtgtccaagatcagcccagactggatcagctccatgagcatcatccgcagccacaggacccaggaggacacagtggtggccctgtctgtgacaggcatcctgaaggtgtggatcgtgaccagcgagatcagtgacatgcaggacacagagcccatctttgaggaggagagcaagcccatctactgccagaactgccagagcatctccttctgtgccttcacccagaggagcctgctggtggtgtgcagcaagtactggagggtgtttgatgctggggactacagcctgctgtgcagcggccccagtgaaaatggccagacctggacaggaggagactttgtgtccagtgacaaggtgatcatctggacagaaaatggccagagctacatctacaagctgcctgccagctgcctgcctgccagtgacagcttcagaagtgatgtgggcaaggctgtggagaacctgatcccccctgtgcagcacatcctgctggacaggaaggacaaggagctgctgatctgcccccctgtgacccgcttcttctacggctgccgggagtacttccacaagctgctgatccagggcgacagcagcggccgcctgaacatctggaacatcagtgacacagctgacaagcagggcagcgaggagggcctggccatgaccaccagcatcagcctgcaggaggcctttgacaagctgaacccctgcccagctggcatcatcgaccagctgagcgtcatccccaacagcaatgagcccctgaaggtgacagcctctgtgtacatcccagcccacggccgcctggtgtgtggccgggaggatggcagcatcgtcatcgtgcctgccacccagacagccatcgtgcagctgctgcagggcgagcacatgctgcggcggggctggccaccccacaggaccctgcggggccacaggaacaaggtgacctgcctgctgtacccccaccaggtgtctgcccgctatgaccagcgctacctgatctctggaggagtggacttcagcgtcatcatctgggacatcttctctggagagatgaagcacatcttctgtgtgcatggaggagagatcacccagctgctggtgcccccagagaactgcagcgcccgggtgcagcactgcatctgcagcgtggccagtgaccacagcgtgggcctgctgagcctgcgggagaagaagtgcatcatgctggccagccgccacctgttccccatccaggtgatcaagtggaggcccagtgatgactacctggtggtgggctgcagtgatggctctgtgtatgtgtggcagatggacacaggagccctggacagatgtgtgatgggcatcacagctgtggagatcctgaatgcctgtgatgaagctgtgcctgctgctgtggacagcctgagccaccctgctgtgaacctgaagcaggccatgacccggcgcagcctggccgccctgaagaacatggcccaccacaagctgcagaccctggccaccaacctgctggccagcgaggccagtgacaagggcaacctgcccaagtacagccacaacagcctgatggtgcaggccatcaagaccaacctgacagatcctgacatccacgtgctcttctttgatgtggaggccctgatcatccagctgctgacagaggaggccagccggcccaacacagccctgatcagccctgagaacctgcagaaggccagcggcagcagtgacaagggcggcagcttcctgaccgggaagagagctgctgtgctcttccagcaggtgaaggagaccatcaaggagaacatcaaggagcacctgctggatgatgaggaggaggatgaggagatcatgaggcagaggcgggaggagagtgaccctgagtaccgcagcagcaagagcaagcccctgaccctgctggagtacaacctgaccatggacacagccaagctgttcatgagctgcctgcacgcctggggcctgaatgaggtgctggatgaggtgtgcctggaccggctgggcatgctgaagccccactgcaccgtgtcctttggcctgctgagcagaggaggccacatgagcctgatgctgcccggctacaaccagcctgcctgcaagctgagccacggcaagacagaggtgggcaggaagctgcctgccagcgagggcgtgggcaagggcacctacggcgtgtccagagctgtgaccacccagcacctgctgagcatcatcagcctggccaacaccctgatgtccatgaccaatgccaccttcatcggggaccacatgaagaagggccccaccaggcctccccggcccagcaccccagacctgagcaaggcccggggcagcccccccaccagcagcaacatcgtgcagggccagatcaagcaggtggccgcccctgtggtgtctgcccggagtgatgctgaccacagcggcagtgacccccccagcgccccagccctgcacacctgcttcctggtgaatgaaggctggagccagctggccgccatgcactgtgtgatgctgcctgacctgctgggcctggacaagttccggccccccctgctggagatgctggcccggcgctggcaggaccgctgcctggaggtgcgggaggccgcccaggccctgctgctggccgagctgcggcgcatcgagcaggccggcaggaaggaggccattgatgcctgggccccctacctgccccagtacatcgaccacgtgatcagccctggggtgaccagcgaggccgcccagaccatcaccacagccccagatgccagcggccctgaggccaaggtgcaggaggaggagcatgacctggtggatgatgacatcaccaccggctgcctgagctctgtgccccagatgaagaagatcagcaccagctatgaggagaggaggaagcaggccacagccatcgtgctgctgggcgtgattggagctgagtttggagctgagattgagccccccaagctgctgacccggcccaggagcagcagccagatccctgagggcttcggcctgaccagcggcggcagcaactacagcctggcccggcacacctgcaaggccctgaccttcctgctgctgcagccccccagccccaagctgcccccccacagcaccatccggaggacagccatcgacctgattggccggggcttcaccgtgtgggagccctacatggatgtgtctgctgtgctgatgggcctgctggagctgtgtgctgatgctgagaagcagctggccaacatcaccatgggcctgcccctgagccctgctgctgacagcgcccggagcgcccggcatgccctgagcctcatcgccacagcccggcccccagccttcatcaccaccatcgccaaggaggtgcaccgccacacagccctggccgccaacacccagagccagcagaacatgcacaccaccaccctggcccgggccaagggggagatcctgcgggtcatcgagatcctgattgagaagatgcccacagatgtggtggacctgctggtggaggtgatggacatcatcatgtactgcctggagggcagcctggtgaagaagaagggcctgcaggagtgcttccctgccatctgccgcttctacatggtgtcctactatgaaagaaaccacagaattgctgtgggcgcccggcacggctctgtggccctgtatgacatcagaacaggcaagtgccagaccatccacggccacaagggccccatcacagctgtggcctttgccccagatggccgctacctggccacctacagcaacacagacagccacatctccttctggcagatgaacaccagcctgctgggcagcatcggcatgctgaacagcgccccccagctgcgctgcatcaagacctaccaggtgccccctgtgcagcctgccagccctggcagccacaatgccctgaagctggcccggctcatctggaccagcaacagaaatgtcatcctgatggcccatgatggcaaggagcaccgcttcatggtgtag

SEQ ID NO: 176034 - DNA, 4374 bp, synthetic construct
  misc_feature 1..4374: note = Description of Artificial Sequence: Synthetic coding sequence
  source 1..4374: mol_type = other DNA
atggccggcaacagcctggtgctgcccatcgtgctgtggggcaggaaggcccccacccactgcatctctgctgtgctgctgacagatgatggagccaccatcgtgacaggctgccatgatggccagatctgcctgtgggacctgtctgtggagctgcagatcaacccccgggccctgctgtttggccacacagccagcatcacctgcctgagcaaggcctgtgccagcagtgacaagcagtacatcgtgtctgccagcgagagcggggagatgtgcctgtgggatgtgtctgatggccgctgcatcgagttcaccaagctggcctgcacccacacaggcatccagttctaccagttctctgtgggcaaccagcgggagggccgcctgctgtgccacggccactacccagagatcctggtggtggatgccaccagcctggaggtgctgtacagcctggtgtccaagatcagcccagactggatcagctccatgagcatcatccgcagccacaggacccaggaggacacagtggtggccctgtctgtgacaggcatcctgaaggtgtggatcgtgaccagcgagatcagtgacatgcaggacacagagcccatctttgaggaggagagcaagcccatctactgccagaactgccagagcatctccttctgtgccttcacccagaggagcctgctggtggtgtgcagcaagtactggagggtgtttgatgctggggactacagcctgctgtgcagcggccccagtgaaaatggccagacctggacaggaggagactttgtgtccagtgacaaggtgatcatctggacagaaaatggccagagctacatctacaagctgcctgccagctgcctgcctgccagtgacagcttcagaagtgatgtgggcaaggctgtggagaacctgatcccccctgtgcagcacatcctgctggacaggaaggacaaggagctgctgatctgcccccctgtgacccgcttcttctacggctgccgggagtacttccacaagctgctgatccagggcgacagcagcggccgcctgaacatctggaacatcagtgacacagctgacaagcagggcagcgaggagggcctggccatgaccaccagcatcagcctgcaggaggcctttgacaagctgaacccctgcccagctggcatcatcgaccagctgagcgtcatccccaacagcaatgagcccctgaaggtgacagcctctgtgtacatcccagcccacggccgcctggtgtgtggccgggaggatggcagcatcgtcatcgtgcctgccacccagacagccatcgtgcagctgctgcagggcgagcacatgctgcggcggggctggccaccccacaggaccctgcggggccacaggaacaaggtgacctgcctgctgtacccccaccaggtgtctgcccgctatgaccagcgctacctgatctctggaggagtggacttcagcgtcatcatctgggacatcttctctggagagatgaagcacatcttctgtgtgcatggaggagagatcacccagctgctggtgcccccagagaactgcagcgcccgggtgcagcactgcatctgcagcgtggccagtgaccacagcgtgggcctgctgagcctgcgggagaagaagtgcatcatgctggccagccgccacctgttccccatccaggtgatcaagtggaggcccagtgatgactacctggtggtgggctgcagtgatggctctgtgtatgtgtggcagatggacacaggagccctggacagatgtgtgatgggcatcacagctgtggagatcctgaatgcctgtgatgaagctgtgcctgctgctgtggacagcctgagccaccctgctgtgaacctgaagcaggccatgacccggcgcagcctggccgccctgaagaacatggcccaccacaagctgcagaccctggccaccaacctgctggccagcgaggccagtgacaagggcaacctgcccaagtacagccacaacagcctgatggtgcaggccatcaagaccaacctgacagatcctgacatccacgtgctcttctttgatgtggaggccctgatcatccagctgctgacagaggaggccagccggcccaacacagccctgatcagccctgagaacctgcagaaggccagcggcagcagtgacaagggcggcagcttcctgaccgggaagagagctgctgtgctcttccagcaggtgaaggagaccatcaaggagaacatcaaggagcacctgctggatgatgaggaggaggatgaggagatcatgaggcagaggcgggaggagagtgaccctgagtaccgcagcagcaagagcaagcccctgaccctgctggagtacaacctgaccatggacacagccaagctgttcatgagctgcctgcacgcctggggcctgaatgaggtgctggatgaggtgtgcctggaccggctgggcatgctgaagccccactgcaccgtgtcctttggcctgctgagcagaggaggccacatgagcctgatgctgcccggctacaaccagcctgcctgcaagctgagccacggcaagacagaggtgggcaggaagctgcctgccagcgagggcgtgggcaagggcacctacggcgtgtccagagctgtgaccacccagcacctgctgagcatcatcagcctggccaacaccctgatgtccatgaccaatgccaccttcatcggggaccacatgaagaagggccccaccaggcctccccggcccagcaccccagacctgagcaaggcccggggcagcccccccaccagcagcaacatcgtgcagggccagatcaagcagggctggagccagctggccgccatgcactgtgtgatgctgcctgacctgctgggcctggacaagttccggccccccctgctggagatgctggcccggcgctggcaggaccgctgcctggaggtgcgggaggccgcccaggccctgctgctggccgagctgcggagaattgagcaggccggcaggaaggaggccattgatgcctgggccccctacctgccccagtacatcgaccacgtgatcagccctggggtgaccagcgaggccgcccagaccatcaccacagccccagatgccagcggccctgaggccaaggtgcaggaggaggagcatgacctggtggatgatgacatcaccaccggctgcctgagctctgtgccccagatgaagaagatcagcaccagctatgaggagaggaggaagcaggccacagccatcgtgctgctgggcgtcatcggggctgagtttggagctgagattgagccccccaagctgctgacccggcccaggagcagcagccagatccctgagggcttcggcctgaccagcggcggcagcaactacagcctggcccggcacacctgcaaggccctgaccttcctgctgctgcagccccccagccccaagctgcccccccacagcaccatcagaagaacagccatcgacctgattggccggggcttcaccgtgtgggagccctacatggatgtgtctgctgtgctgatgggcctgctggagctgtgtgctgatgctgagaagcagctggccaacatcaccatgggcctgcccctgagccctgctgctgacagcgcccggagcgcccggcatgccctgagcctgattgccacagcccggcccccagccttcatcaccaccatcgccaaggaggtgcaccgccacacagccctggccgccaacacccagagccagcagaacatgcacaccaccaccctggcccgggccaagggggagatcctgcgggtgattgagatcctgattgagaagatgcccacagatgtggtggacctgctggtggaggtgatggacatcatcatgtactgcctggagggcagcctggtgaagaagaagggcctgcaggagtgcttccctgccatctgccgcttctacatggtgtcctactatgaaagaaaccacagaattgctgtgggcgcccggcacggctctgtggccctgtatgacatcagaacaggcaagtgccagaccatccacggccacaagggccccatcacagctgtggcctttgccccagatggccgctacctggccacctacagcaacacagacagccacatctccttctggcagatgaacaccagcctgctgggcagcatcggcatgctgaacagcgccccccagctgcgctgcatcaagacctaccaggtgccccctgtgcagcctgccagccctggcagccacaatgccctgaagctggcccggctcatctggaccagcaacagaaatgtcatcctgatggcccatgatggcaaggagcaccgcttcatggtgtag

SEQ ID NO: 176035 - DNA, 4374 bp, synthetic construct; identical to SEQ ID NO: 176034
  misc_feature 1..4374: note = Description of Artificial Sequence: Synthetic coding sequence
  source 1..4374: mol_type = other DNA

SEQ ID NO: 176036 - DNA, 2448 bp, synthetic construct
  misc_feature 1..2448: note = Description of Artificial Sequence: Synthetic coding sequence
  source 1..2448: mol_type = other DNA
atggccggcaacagcctggtgctgcccatcgtgctgtggggcaggaaggcccccacccactgcatctctgctgtgctgctgacagatgatggagccaccatcgtgacaggctgccatgatggccagatctgcctgtgggacctgtctgtggagctgcagatcaacccccgggccctgctgtttggccacacagctgtgctcttccagcaggtgaaggagaccatcaaggagaacatcaaggagcacctgctggatgatgaggaggaggatgaggagatcatgaggcagaggcgggaggagagtgaccctgagtaccgcagcagcaagagcaagcccctgaccctgctggagtacaacctgaccatggacacagccaagctgttcatgagctgcctgcacgcctggggcctgaatgaggtgctggatgaggtgtgcctggaccggctgggcatgctgaagccccactgcaccgtgtcctttggcctgctgagccggggcggccacatgagcctgatgctgcccggctacaaccagcctgcctgcaagctgagccacggcaagacagaggtgggcaggaagctgcctgccagcgagggcgtgggcaagggcacctatggagtgtccagagctgtgaccacccagcacctgctgagcatcatcagcctggccaacaccctgatgtccatgaccaatgccaccttcatcggggaccacatgaagaagggccccacccggcccccccggcccagcaccccagacctgagcaaggcccggggcagcccccccaccagcagcaacatcgtgcagggccagatcaagcaggtggccgcccctgtggtgtctgcccggagtgatgctgaccacagcggcagtgaccccccatctgccccagccctgcacacctgcttcctggtgaatgaaggctggagccagctggccgccatgcactgtgtgatgctgcctgacctgctgggcctggacaagttccggccccccctgctggagatgctggcccggcgctggcaggaccgctgcctggaggtgcgggaggccgcccaggccctgctgctggccgagctgcggagaattgagcaggccggcaggaaggaggccattgatgcctgggccccctacctgccccagtacatcgaccacgtgatcagccctggggtgaccagcgaggccgcccagaccatcaccacagccccagatgccagcggccctgaggccaaggtgcaggaggaggagcatgacctggtggatgatgacatcaccaccggctgcctgagctctgtgccccagatgaagaagatcagcaccagctatgaggagaggaggaagcaggccacagccatcgtgctgctgggcgtcatcggggctgagtttggagctgagattgagccccccaagctgctgacccggcccaggagcagcagccagatccctgagggcttcggcctgaccagcggcggcagcaactacagcctggcccggcacacctgcaaggccctgaccttcctgctgctgcagccccccagccccaagctgcccccccacagcaccatcagaagaacagccatcgacctgattggccggggcttcaccgtgtgggagccctacatggatgtgtctgctgtgctgatgggcctgctggagctgtgtgctgatgctgagaagcagctggccaacatcaccatgggcctgcccctgagccctgctgctgacagcgcccggagcgcccggcatgccctgagcctgattgccacagcccggcccccagccttcatcaccaccatcgccaaggaggtgcaccgccacacagccctggccgccaacacccagagccagcagaacatgcacaccaccaccctggcccgggccaagggggagatcctgcgggtgattgagatcctgattgagaagatgcccacagatgtggtggacctgctggtggaggtgatggacatcatcatgtactgcctggagggcagcctggtgaagaagaagggcctgcaggagtgcttccctgccatctgccgcttctacatggtgtcctactatgaaagaaaccacagaattgctgtgggcgcccggcacggctctgtggccctgtatgacatcagaacaggcaagtgccagaccatccacggccacaagggccccatcacagctgtggcctttgccccagatggccgctacctggccacctacagcaacacagacagccacatctccttctggcagatgaacaccagcctgctgggcagcatcggcatgctgaacagcgccccccagctgcgctgcatcaagacctaccaggtgccccctgtgcagcctgccagccctggcagccacaatgccctgaagctggcccggctcatctggaccagcaacagaaatgtcatcctgatggcccatgatggcaaggagcaccgcttcatggtgtag

SEQ ID NO: 176037 - DNA, 3309 bp, synthetic construct
  misc_feature 1..3309: note = Description of Artificial Sequence: Synthetic coding sequence
  source 1..3309: mol_type = other DNA
atgaggaccagcctgcaggccgtggccctgtggggccagaaggccccaccccacagcatcacagccatcatgatcacagatgaccagaggaccatcgtgacaggcagccaggagggccagctgtgcctgtggaacctgagccatgagctgaagatcagcgccaaggagctgctgtttggccacagcgcctctgtgacctgcctggcccgggcccgggacttcagcaagcagccctacatcgtgtctgctgctgaaaatggagagatgtgtgtgtggaatgtgaccaacggccagtgcatggagaaggccaccctgccctaccgccacacagccatctgctactaccactgcagcttcaggatgaccggggagggctggctgctgtgctgcggggagtaccaggatgtgctgatcattgatgccaagaccctggccgtggtgcacagcttccgcagcagccagttcccagactggatcaactgcatgtgcatcgtgcacagcatgaggatccaggaggacagcctgctggtggtgtctgtggccggggagctgaaggtgtgggacctgagcagcagcatcaacagcatccaggagaagcaggatgtgtatgagaaggagagcaagttcctggagagcctgaactgccagaccatccgcttctgcacctacacagagcggctgctgctggtggtgttcagcaagtgctggaaggtgtatgactactgtgacttcagcctgctgctgacagaggtgtccagaaatggccagttctttgctggaggagaggtgattgctgcccaccgcatcctgatctggacagaagatggccacagctacatctaccagctgctgaacagcggcctgagcaagagcatctacccagcagatggccgggtgctgaaggagaccatctacccccacctgctgtgcagcacctctgtgcaggagaacaaggagcagagccggccctttgtgatgggctacatgaatgaaaggaaggagcccttctacaaggtgctcttcagcggggaggtgtctggccgcatcaccctgtggcacatcccagatgtgcctgtgtccaagtttgatggcagcccccgggagatccctgtgacagccacctggaccctgcaggacaactttgacaagcatgacaccatgagccagagcatcatcgactacttcagcggcctgaaggatggagctggaacagctgtggtgaccagcagcgagtacatccccagcctggacaagctgatctgtggctgtgaagatggcaccatcatcatcacccaggccctgaatgctgccaaggcccggctgctggagggcggcagcctggtgaaggacagccccccccacaaggtgctgaagggccaccaccagagcgtgaccagcctgctgtacccccacggcctgagcagcaagctggaccagagctggatgctgagcggggacctggacagctgtgtgatcctgtgggacatcttcacagaggagatcctgcacaagttcttcctggaggccggccctgtgaccagcctgctgatgagccctgagaagttcaagctgcggggggagcagatcatctgctgcgtgtgtggggaccacagcgtggccctgctgcacctggagggcaagagctgcctgctgcacgccaggaagcacctgtttcctgtgaggatgatcaagtggcaccctgtggagaacttcctgattgtgggctgtgctgatgacagcgtgtacatctgggagattgagaccggcaccctggagagacatgagaccggggagcgggcccgcatcatcctgaactgctgtgatgacagccagctggtgaagtctgtgctgcccatcgccagcgagaccctgaagcacaagagcattgagcagaggagcagcagcccctaccagctgggccccctgccctgccccggcctgcaggtggagagcagctgcaaggtgacagatgccaagttctgcccccggcccttcaacgtgctgcctgtgaagaccaagtggagcaatgtgggcttccacatcctgctgtttgacctggagaacctggtggagctgctgctgcccacccccctgagtgatgtggacagcagcagcagcttctacggcggggaggtgctgcggcgggccaagagcacagtggagaagaagaccctgaccctgaggaagagcaagacagcctgtggccccctgtctgctgaggccctggccaagcccatcacagagagcctggcccagggcgacaacaccatcaagttcagcgaggagaatgatggcatcaagaggcagaagaagatgaagatcagcaagaagatgcagcccaagcccagcaggaaggtggatgccagcctgaccatcgacacagccaagctgttcctgagctgcctgctgccctggggcgtggacaaggacctggactacctgtgcatcaagcacctgaacatcctgaagctgcagggccccatcagcctgggcatcagcctgaatgaagacaacttcagcctgatgctgcccggctgggacctgtgcaacagcggcatgatcaaggactacagcggcgtgaacctcttcagcaggaaggtgctggacctgagtgacaagtacacagccaccctgcccaaccaggtgggcatcccccggggcctggagaacaactgtgacagcctgcgggagagtgacaccatcgtgtacctgctgagccgcctcttcctggtgaacaagctggtgaacatgcccctggagctggcctgccgggtgggcagcagcttcaggatggagagcatccacaacaagatgagaggagctggaaatgacatcctgaacatgagcagcttctacagctgcctgagaaatggcaagaatgaaagccacgtgcctgaggccgacctgagcctgctgaagctgatcagctgctggagggaccagagcgtgcaggtgacagaggccatccaggccgtgctgctggccgaggtgcagcagcacatgaagagcctgggcaagatccctgtgaacagccagcctgtgtccatggccgagaatggaaactgtgagatgaagcagatgctgcccaagctggagtggacagaggagctggagctgcagtgtgtgaggaacaccctgcccctgcagacccctgtgtcccctgtgaagcatgacagcaacagcaacagcgccaacttccaggatgtggaggacatgccagacagatgtgccctggaggagagcgagagccctggagagcccaggcaccacagctggatcgccaaggtgtgcccctgcaaggtgtcctag

SEQ ID NO: 176038 - DNA, 3309 bp, synthetic construct; identical to SEQ ID NO: 176037
  misc_feature 1..3309: note = Description of Artificial Sequence: Synthetic coding sequence
  source 1..3309: mol_type = other DNA

SEQ ID NO: 176039 - DNA, 3300 bp, synthetic construct
  misc_feature 1..3300: note = Description of Artificial Sequence: Synthetic coding sequence
  source 1..3300: mol_type = other DNA
atgaggaccagcctgcaggccgtggccctgtggggccagaaggccccaccccacagcatcacagccatcatgatcacagatgaccagaggaccatcgtgacaggcagccaggagggccagctgtgcctgtggaacctgagccatgagctgaagatcagcgccaaggagctgctgtttggccacagcgcctctgtgacctgcctggcccgggcccgggacttcagcaagcagccctacatcgtgtctgctgctgaaaatggagagatgtgtgtgtggaatgtgaccaacggccagtgcatggagaaggccaccctgccctaccgccacacagccatctgctactaccactgcagcttcaggatgaccggggagggctggctgctgtgctgcggggagtaccaggatgtgctgatcattgatgccaagaccctggccgtggtgcacagcttccgcagcagccagttcccagactggatcaactgcatgtgcatcgtgcacagcatgaggatccaggacagcctgctggtggtgtctgtggccggggagctgaaggtgtgggacctgagcagcagcatcaacagcatccaggagaagcaggatgtgtatgagaaggagagcaagttcctggagagcctgaactgccagaccatccgcttctgcacctacacagagcggctgctgctggtggtgttcagcaagtgctggaaggtgtatgactactgtgacttcagcctgctgctgacagaggtgtccagaaatggccagttctttgctggaggagaggtgattgctgcccaccgcatcctgatctggacagaagatggccacagctacatctaccagctgctgaacagcggcctgagcaagagcatctacccagcagatggccgggtgctgaaggagaccatctacccccacctgctgtgcagcacctctgtgcaggagaacaagagccggccctttgtgatgggctacatgaatgaaaggaaggagcccttctacaaggtgctcttctctggagaggtgtctggccgcatcaccctgtggcacatcccagatgtgcctgtgtccaagtttgatggcagcccccgggagatccctgtgacagccacctggaccctgcaggacaactttgacaagcatgacaccatgagccagagcatcatcgactacttcagcggcctgaaggatggagctggaacagctgtggtgaccagcagcgagtacatccccagcctggacaagctgatctgtggctgtgaagatggcaccatcatcatcacccaggccctgaatgctgccaaggcccggctgctggagggcggcagcctggtgaaggacagccccccccacaaggtgctgaagggccaccaccagagcgtgaccagcctgctgtacccccacggcctgagcagcaagctggaccagagctggatgctgagcggggacctggacagctgtgtgatcctgtgggacatcttcacagaggagatcctgcacaagttcttcctggaggccggccctgtgaccagcctgctgatgagccctgagaagttcaagctgcggggggagcagatcatctgctgcgtgtgtggggaccacagcgtggccctgctgcacctggagggcaagagctgcctgctgcacgccaggaagcacctgtttcctgtgaggatgatcaagtggcaccctgtggagaacttcctgattgtgggctgtgctgatgattctgtgtacatctgggagattgaaacaggcaccctggagagacatgaaacaggagagcgggcccgcatcatcctgaactgctgtgatgacagccagctggtgaagtctgtgctgcccatcgccagcgagaccctgaagcacaagagcattgagcagaggagcagcagcccctaccagctgggccccctgccctgccccggcctgcaggtggagagcagctgcaaggtgacagatgccaagttctgcccccggcccttcaacgtgctgcctgtgaagaccaagtggagcaatgtgggcttccacatcctgctgtttgacctggagaacctggtggagctgctgctgcccacccccctgagtgatgtggacagcagcagcagcttctatggaggagaggtgctgcggcgggccaagagcacagtggagaagaagaccctgaccctgaggaagagcaagacagcctgtggccccctgtctgctgaggccctggccaagcccatcacagagagcctggcccagggcgacaacaccatcaagttctctgaagaaaatgatggcatcaagaggcagaagaagatgaagatcagcaagaagatgcagcccaagcccagcaggaaggtggatgccagcctgaccatcgacacagccaagctgttcctgagctgcctgctgccctggggcgtggacaaggacctggactacctgtgcatcaagcacctgaacatcctgaagctgcagggccccatcagcctgggcatcagcctgaatgaagacaacttcagcctgatgctgcccggctgggacctgtgcaacagcggcatgatcaaggactacagcggcgtgaacctcttcagcaggaaggtgctggacctgagtgacaagtacacagccaccctgcccaaccaggtgggcatcccccggggcctggagaacaactgtgacagcctgcgggagagtgacaccatcgtgtacctgctgagccgcctcttcctggtgaacaagctggtgaacatgcccctggagctggcctgccgggtgggcagcagcttcaggatggagagcatccacaacaagatgagaggagctggaaatgacatcctgaacatgagcagcttctacagctgcctgagaaatggcaagaatgaaagccacgtgcctgaggccgacctgagcctgctgaagctgatcagctgctggagggaccagagcgtgcaggtgacagaggccatccaggccgtgctgctggccgaggtgcagcagcacatgaagagcctgggcaagatccctgtgaacagccagcctgtgtccatggctgaaaatggaaactgtgagatgaagcagatgctgcccaagctggagtggacagaggagctggagctgcagtgtgtgaggaacaccctgcccctgcagacccctgtgtcccctgtgaagcatgacagcaacagcaacagcgccaacttccaggatgtggaggacatgccagacagatgtgccctggaggagagcgagagccctggagagcccaggcaccacagctggatcgccaaggtgtgcccctgcaaggtgtcctag

SEQ ID NO: 176040 - DNA, 2328 bp, synthetic construct
  misc_feature 1..2328: note = Description of Artificial Sequence: Synthetic coding sequence
  source 1..2328: mol_type = other DNA
atgaggaccagcctgcaggccgtggccctgtggggccagaaggccccaccccacagcatcacagccatcatgatcacagatgaccagaggaccatcgtgacaggcagccaggagggccagctgtgcctgtggaacctgagccatgagctgaagatcagcgccaaggagctgctgtttggccacagcgcctctgtgacctgcctggcccgggcccgggacttcagcaagcagccctacatcgtgtctgctgctgaaaatggagagatgtgtgtgtggaatgtgaccaacggccagtgcatggagaaggccaccctgccctaccgccacacagccatctgctactaccactgcagcttcaggatgaccggggagggctggctgctgtgctgcggggagtaccaggatgtgctgatcattgatgccaagaccctggccgtggtgcacagcttccgcagcagccagttcccagactggatcaactgcatgtgcatcgtgcacagcatgaggatccaggaggacagcctgctggtggtgtctgtggccggggagctgaaggtgtgggacctgagcagcagcatcaacagcatccaggagaagcaggatgtgtatgagaaggagagcaagttcctggagagcctgaactgccagaccatccgcttctgcacctacacagagcggctgctgctggtggtgttcagcaagtgctggaaggtgtatgactactgtgacttcagcctgctgctgacagaggtgtccagaaatggccagttctttgctggaggagaggtgattgctgcccaccgcatcctgatctggacagaagatggccacagctacatctaccagctgctgaacagcggcctgagcaagagcatctacccagcagatggccgggtgctgaaggagaccatctacccccacctgctgtgcagcacctctgtgcaggagaacaaggagcagagccggccctttgtgatgggctacatgaatgaaaggaaggagcccttctacaaggtgctcttcagcggggaggtgtctggccgcatcaccctgtggcacatcccagatgtgcctgtgtccaagtttgatggcagcccccgggagatccctgtgacagccacctggaccctgcaggacaactttgacaagcatgacaccatgagccagagcatcatcgactacttcagcggcctgaaggatggagctggaacagctgtggtgaccagcagcgagtacatccccagcctggacaagctgatctgtggctgtgaagatggcaccatcatcatcacccaggccctgaatgctgccaaggcccggctgctggagggcggcagcctggtgaaggacagccccccccacaaggtgctgaagggccaccaccagagcgtgaccagcctgctgtacccccacggcctgagcagcaagctggaccagagctggatgctgagcggggacctggacagctgtgtgatcctgtgggacatcttcacagaggagatcctgcacaagttcttcctggaggccggccctgtgaccagcctgctgatgagccctgagaagttcaagctgcggggggagcagatcatctgctgcgtgtgtggggaccacagcgtggccctgctgcacctggagggcaagagctgcctgctgcacgccaggaagcacctgtttcctgtgaggatgatcaagtggcaccctgtggagaacttcctgattgtgggctgtgctgatgacagcgtgtacatctgggagattgagaccggcaccctggagagacatgagaccggggagcgggcccgcatcatcctgaactgctgtgatgacagccagctggtgaagtctgtgctgcccatcgccagcgagaccctgaagcacaagagcattgagcagaggagcagcagcccctaccagctgggccccctgccctgccccggcctgcaggtggagagcagctgcaaggtgacagatgccaagttctgcccccggcccttcaacgtgctgcctgtgaagaccaagtggagcaatgtgggcttccacatcctgctgtttgacctggagaacctggtggagctgctgctgcccacccccctgagtgatgtggacagcagcagcagcttctacggcggggaggtgctgcggcgggccaagagcacagtggagaagaagaccctgaccctgaggaagagcaagacagcctgtggccccctgtctgctgaggccctggccaagcccatcacagagagcctggcccagggcgacaacaccatcaagttcagcgaggagaatgatggcatcaagaggcagaagaagatgaagatctcctag

SEQ ID NO: 176041 - DNA, 1119 bp, synthetic construct
  misc_feature 1..1119: note = Description of Artificial Sequence: Synthetic coding sequence
  source 1..1119: mol_type = other DNA
atggagcccgcccccagcgctggagctgagctgcagccccccctgtttgccaatgccagtgatgcctaccccagcgcctgccccagcgctggggccaatgccagcggccccccaggggcccggagcgccagcagcctggccctggccatcgccatcacagccctgtacagcgctgtgtgtgctgtgggcctgctgggcaatgtgctggtgatgtttggcatcgtgcgctacaccaagatgaagacagccaccaacatctacatcttcaacctggccctggctgatgccctggccaccagcaccctgcccttccagagcgccaagtacctgatggagacctggccctttggagagctgctgtgcaaggctgtgctgagcattgactactacaacatgttcaccagcatcttcaccctgaccatgatgtctgtggaccgctacatcgctgtgtgccaccctgtgaaggccctggacttccgcaccccagccaaggccaagctgatcaacatctgcatctgggtgctggccagcggcgtgggcgtgcccatcatggtgatggctgtgacccggcccagagatggagctgtggtgtgcatgctgcagttccccagccccagctggtactgggacacagtgaccaagatctgtgtgttcctgtttgcctttgtggtgcccatcctgatcatcaccgtgtgctacggcctgatgctgctgcggctgcggtctgtgcggctgctgagcggcagcaaggagaaggacaggagcctgcggcgcatcaccaggatggtgctggtggtggtgggcgcctttgtggtgtgctgggcccccatccacatcttcgtcatcgtgtggaccctggtggacatcgacagaagagaccccctggtggtggccgccctgcacctgtgcatcgccctgggctacgccaacagcagcctgaaccctgtgctgtatgccttcctggatgagaacttcaagcgctgcttccggcagctgtgcaggaagccctgtggccgcccagaccccagcagcttcagccgggcccgggaggccacagcccgggagcgggtgacagcctgcacccccagtgatggccctgggggcggcgctgctgcctag

SEQ ID NO: 176042 - DNA, 837 bp, synthetic construct
  misc_feature 1..837: note = Description of Artificial Sequence: Synthetic coding sequence
  source 1..837: mol_type = other DNA
atgaggaaggagaccccaccacccctggtgcccccagctgcccgggagtggaacctgcccccaaatgccccagcctgcatggagcggcagctggaggccgcccgctacagaagtgatggagccctgctgctgggcgccagcagcctgagcggccgctgctgggccggcagcctgtggctgttcaaggacccctgtgccgccccaaatgaaggcttctgcagcgctggggtgcagacagaagctggggtggccgacctgacctgggtgggggagcggggcatcctggtggccagtgacagcgcccatgctgcccaggtgacctgtgtggccgccagcccccacaaggacagcgtcttcctgagctgcagcgaggacaaccgcatcctgctgtgggacacccgctgccccaagccagccagccagatcggctgcagcgcccctggctacctgcccaccagcctggcctggcacccccagcagagcgaggtgtttgtgtttggagatgaaaatggcaccgtgtccctggtggacaccaagagcaccagctgtgtgctgagcagcgctgtgcacagccagtgtgtgacaggcctggtgttcagcccccacagcgtgcccttcctggccagcctgtctgaggactgcagcctggccgtgctggacagcagcctgtctgagctgttccgcagccaggcccaccgggactttgtgagagatgccacctggagccccctgaaccacagcctgctgaccaccgtgggctgggaccaccaggtggtgcaccacgtggtgcccacagagcccctgcctgcccctggccctgcctctgtgacagaatag

SEQ ID NO: 176043 - DNA, 876 bp, synthetic construct
  misc_feature 1..876: note = Description of Artificial Sequence: Synthetic coding sequence
  source 1..876: mol_type = other DNA
tgatgtgccgccccaaatgaaggcttctgcagcgctggggtgcagacagaggccggcgtggccgacctgacctgggtgggggagcggggcatcctggtggccagtgacagcggggctgtggagctgtgggagctggatgaaaatgagaccctcatcgtgtccaagttctgcaagtatgaacatgatgacatcgtgtccacagtgtctgtgctgagcagcggcacccaggccgtgtctggcagcaaggacatctgcatcaaggtgtgggacctggcccagcaggtggtgctgagcagctaccgggcccacgccgcccaggtgacctgtgtggccgccagcccccacaaggacagcgtcttcctgagctgcagcgaggacaaccgcatcctgctgtgggacacccgctgccccaagccagccagccagatcggctgcagcgcccctggctacctgcccaccagcctggcctggcacccccagcagagcgaggtgtttgtgtttggagatgaaaatggaacagtgtccctggtggacaccaagagcaccagctgtgtgctgagcagcgctgtgcacagccagtgtgtgacaggcctggtgttcagcccccaccggctggacctgagccagcccagcccccccagcgacagcgtgcccttcctggccagcctgtctgaggactgcagcctggccgtgctggacagcagcctgtctgagctgttccgcagccaggcccaccgggactttgtgagagatgccacctggagccccctgaaccacagcctgctgaccaccgtgggctgggaccaccaggtggtgcaccacgtggtgcccacagagcccctgcctgcccctggccctgcctctgtgacagaatag

SEQ ID NO: 176044 - DNA, 942 bp, synthetic construct
  misc_feature 1..942: note = Description of Artificial Sequence: Synthetic coding sequence
  source 1..942: mol_type = other DNA
atgaagctgacagacagcgtgctgcggagcttccgggtggccaaggtgttcagagaaaattctgacaagatcaactgctttgacttcagccccaacggggagaccgtcatcagcagcagtgatgatgacagcatcgtgctgtatgactgccaggagggcaagcccaagaggaccctgtacagcaagaagtatggagtggacctgatccgctacacccacgccgccaacacagtggtgtacagcagcaacaagattgatgacaccatccgctacctgagcctgcatgacaacaagtacatccgctacttccctggccacagcaagagggtggtggccctgtccatgagccctgtggatgacaccttcatcagcggcagcctggacaagaccatccggctgtgggacctgcggagccccaactgccagggcctgatgcacctgcagggcaagcctgtgtgcagctttgatcctgagggcctcatctttgctgctggggtgaacagcgagatggtgaagctgtatgacctgcggagctttgataaaggcccctttgccaccttcaagatgcagtatgacaggacctgtgagtggacaggcctgaagttcagcaatgatggcaagctgatcctgatcagcaccaacggcagcttcatccggctgattgatgccttcaagggcgtggtgatgcacaccttcggcggctacgccaacagcaaggctgtgaccctggaggccagcttcaccccagacagccagttcatcatgattggctctgaagatggcaagatccacgtgtggaatggagagagcggcatcaaggtggccgtgctggatggcaagcacacaggccccatcacctgcctgcagttcaaccccaagttcatgacctttgccagcgcctgcagcaacatggccttctggctgcccaccattgatgactag

SEQ ID NO: 176045 - DNA, 1359 bp, synthetic construct
  misc_feature 1..1359: note = Description of Artificial Sequence: Synthetic coding sequence
  source 1..1359: mol_type = other DNA
atgatgggctgctttgccctgcagacagtggacacagagctgacagctgacagcgtggagtggtgccccctgcagggctgccgccacctgctggcctgtggcacctaccagctgcggcggcctgaggacaggcctgctggcccccagaacaagggcggcatggaggtgaaggagccccaggtgcggctgggccgcctcttcctgtacagcttcaatgacaacaacagcatccaccccctggtggaggtgcagaggaaggacaccagcgccatcctggacatgaagtggtgccacatccctgtggccggccacgccctgctgggcctggctgatgccagcggcagcatccagctgctgcggctggtggagagcgagaagagccacgtgctggagcccctgagcagcctggccctggaggagcagtgcctggccctgagcctggactggagcacaggcaagacaggccgggccggggaccagcccctgaagatcatcagcagtgacagcacaggccagctgcacctgctgatggtgaatgagacccggccccggctgcagaaggtggcctcctggcaggcccaccagtttgaggcctggattgctgccttcaactactggcaccctgagatcgtgtacagcggaggagatgatggcctgctgcggggctgggacaccagggtgcctgggaagttcctgttcaccagcaagaggcacaccatgggcgtgtgcagcatccagagcagcccccaccgggagcacatcctggccaccggcagctatgatgagcacatcctgctgtgggacaccaggaacatgaagcagcccctggccgacacccctgtgcagggcggcgtgtggaggatcaagtggcaccccttccaccaccacctgctgctggccgcctgcatgcacagcggcttcaagatcctgaactgccagaaggccatggaggagcggcaggaggccaccgtgctgaccagccacaccctgcctgacagcctggtgtatggagctgactggagctggctgctcttccgcagcctgcagagggcccccagctggagcttccccagcaacctgggcaccaagacagctgacctgaagggggccagcgagctgcccaccccctgccatgaatgtcgggaggacaatgatggagagggccacgcccggccccagagcggcatgaagcccctgacagagggcatgaggaagaatggcacctggctgcaggccacagctgccaccacccgggactgtggggtgaaccctgaggaggccgacagcgccttcagcctgctggccacctgcagcttctatgaccacgccctgcacctgtgggagtgggagggcaactag

SEQ ID NO: 176046 - DNA, 1074 bp, synthetic construct
  misc_feature 1..1074: note = Description of Artificial Sequence: Synthetic coding sequence
  source 1..1074: mol_type = other DNA
atgtctgcctttgagaagccccagatcatcgcccacatccagaagggcttcaactacacagtgtttgactgcaagtgggtgccctgcagcgccaagtttgtgaccatgggcaactttgcccggggcactggagtcatccagctgtatgagatccagcacggggacctgaagctgctgcgggagattgagaaggccaagcccatcaagtgtggcacctttggagccaccagcctgcagcagcgctacctggccactggagactttggaggcaacctgcacatctggaacctggaggcccctgagatgcctgtgtacagcgtgaagggccacaaggagatcatcaatgccattgatggcatcggcggcctgggcattggagagggcgcccctgagatcgtgacaggcagcagagatggcaccgtgaaggtgtgggacccccggcagaaggatgatcctgtggccaacatggagcctgtgcagggcgagaacaagagggactgctggacagtggcctttggaaatgcctacaaccaggaggagcgggtggtgtgtgccggctatgacaatggagacatcaagctgtttgacctgaggaacatggccctgcgctgggagaccaacatcaagaatggagtgtgcagcctggagtttgacaggaaggacatctccatgaacaagctggtggccaccagcctggagggcaagttccacgtgtttgacatgaggacccagcaccccaccaagggctttgcctctgtgtctgagaaggcccacaagagcacagtgtggcaggtgcgccacctgccccagaaccgggagctgttcctgacagctgggggcgccggcggcctgcacctgtggaagtatgagtaccccatccagaggagcaagaaggacagcgagggcatcgagatgggcgtggccggctctgtgtccctgctgcagaatgtgaccctgagcacccagcccatcagcagcctggactggagcccagacaagaggggcctgtgtgtgtgcagcagctttgaccagacagtgcgggtgctgattgtgaccaagctgaacaagatctag

SEQ ID NO: 176047 - DNA, 867 bp, synthetic construct
  misc_feature 1..867: note = Description of Artificial Sequence: Synthetic coding sequence
  source 1..867: mol_type = other DNA
atgtctgcctttgagaagccccagatcatcgcccacatccagaagggcttcaactacacagtgtttgactgcaagtgggtgccctgcagcgccaagtttgtgaccatgggcaactttgcccggggcactggagtcatccagctgtatgagatccagcacggggacctgaagctgctgcgggagattgagaaggccaagcccatcaagtgtggcacctttggagccaccagcctgcagcagcgctacctggccactggagactttggaggcaacctgcacatctggaacctggaggcccctgagatgcctgtgtacagcgtgaagggccacaaggagatcatcaatgccattgatggcatcggcggcctgggcattggagagggcgcccctgagatcgtgacaggcagcagagatggcaccgtgaaggtgtgggacccccggcagaaggatgatcctgtggccaacatggagcctgtgcagggcgagaacaagagggactgctggacagtggcctttggaaatgcctacaaccaggaggagcgggtggtgtgtgccggctatgacaatggagacatcaagctgtttgacctgaggaacatggccctgcgctgggagaccaacatcaagaatggagtgtgcagcctggagtttgacaggaaggacatctccatgaacaagctggtggccaccagcctggagggcaagttccacgtgtttgacatgaggacccagcaccccaccaagggctttgcctctgtgtctgagaaggcccacaagagcacagtgtggcaggtgcgccacctgccccagaaccgggagctgttcctgacagctgggggcgccggcggcctgcacctgtggaagtag

SEQ ID NO: 176048 - DNA, 3816 bp, synthetic construct
  misc_feature 1..3816: note = Description of Artificial Sequence: Synthetic coding sequence
  source 1..3816: mol_type = other DNA
tgaagagacttccagagcgaggtgctgctgagcgccatggagctgttccacatgaccagcggaggagatgctgccatgttcagagatggcaaggagccccagcccagcgctgaggccgctgctgcccccagcctggccaacatcagctgcttcacccagaagctggtggagaagctgtacagcggcatgttttctgctgaccccaggcacatcctgctcttcatcctggagcacatcatggtggtgattgaaacagccagcagccagagggacacagtgctgagcaccctgtacagcagcctgaacaaggtgatcctgtactgcctgagcaagccccagcagagcctgtctgagtgcctgggcctgctgagcatcctgggcttcctgcaggagcactgggatgtggtgtttgccacctacaacagcaacatctccttcctgctgtgcctgatgcactgcctgctgctgctgaatgaaagaagctacccagagggcttcggcctggagcccaagcccaggatgagcacctaccaccaggtgttcctgagccccaatgaagatgtgaaggagaagcgggaggacctgcccagcctgagtgatgtgcagcacaacatccagaagacagtgcagaccctgtggcagcagctggtggcccagaggcagcagaccctggaggatgccttcaagattgacctgtctgtgaagccaggagagcgggaggtgaagattgaggaggtgacccccctgtgggaggagaccatgctgaaggcctggcagcactacctggccagcgagaagaagagcctggccagccgcagcaatgtggcccaccacagcaaggtgaccctgtggagcggcagcctgagcagcgccatgaagctgatgcctggccggcaggccaaggaccctgagtgcaagacagaggactttgtgtcctgcatcgagaactacagaagaagaggccaggagctgtatgccagcctgtacaaggaccacgtgcagaggaggaaatgtggcaacatcaaggccgccaatgcctgggcccgcatccaggagcagctgtttggagagctgggcctgtggagccagggcgaggagaccaagccctgcagcccctgggagctggactggagggagggccctgccaggatgaggaagaggatcaagaggctgagccccctggaggccctgagcagcggccgccacaaggagagccaggacaagaatgaccacatcagccagaccaatgctgagaaccaggatgagctgaccctgcgggaggccgagggggagccagatgaggtgggcgtggactgcacccagctgaccttcttccctgccctgcacgagagcctgcacagcgaggacttcctggagctgtgccgggagcggcaggtgatcctgcaggagctgctggacaaggagaaggtgacccagaagttcagcctggtgattgtgcagggccacctggtgtctgagggcgtgctgctgtttggccaccagcacttctacatctgtgagaacttcaccctgagccccactggagatgtgtactgcaccaggcactgcctgagcaacatcagtgaccccttcatcttcaacctgtgcagcaaggacaggagcacagaccactacagctgccagtgccacagctatgctgacatgagggagctgcggcaggcccgcttcctgctgcaggacatcgccctggagatcttcttccacaacggctacagcaagttcctggtgttctacaacaatgacaggagcaaggccttcaagagcttctgcagcttccagcccagcctgaagggcaaggccaccagcgaggacaccctgagcctgcggcgctacccaggcagtgaccgcatcatgctgcagaagtggcagaagagggacatcagcaactttgagtacctgatgtacctgaacacagctgctggccgcacctgcaatgactacatgcagtaccctgtgttcccctgggtgctggccgactacaccagcgagaccctgaacctggccaaccccaagatcttccgggacctgagcaagcccatgggcgcccagaccaaggagaggaagctgaagttcatccagcgcttcaaggaggtggagaagacagaaggagacatgacagtgcagtgccactactacacccactacagcagcgccatcatcgtggccagctacctggtgaggatgccacccttcacccaggccttctgtgccctgcagggcggcagctttgatgtggccgacaggatgttccacagcgtgaagagcacctgggagagcgccagccgggagaacatgtctgatgtgcgggagctgaccccagagttcttctacctgcctgagttcctgaccaactgcaatggagtggagtttggctgcatgcaggacggcaccgtgctgggagatgtgcagctgcccccctgggcagatggagaccccaggaagttcatcagcctgcacaggaaggccctggagagtgactttgtgtctgccaacctgcaccactggattgacctgatcttcggctacaagcagcagggccctgctgctgtggatgctgtgaacatcttccacccctacttctacggggacaggatggacctgagcagcatcacagaccccctcatcaagagcaccatcctgggctttgtgagcaactttggccaggtgcccaagcagctgttcaccaagccccacccagccaggacagctgctgggaagcccctgcccgggaaggatgtgtccacccctgtgtccctgcccggccacccccagcccttcttctacagcctgcagagcctgcggcccagccaggtgacagtgaaggacatgtacctgttcagcctgggcagcgagagccccaagggggccatcggccacatcgtgtccacagagaagaccatcctggccgtggagaggaacaaggtgctgctgccccccctgtggaacagaaccttctcctggggctttgatgacttcagctgctgcctgggcagctatggcagtgacaaggtgctgatgacctttgagaacctggccgcctggggccgctgcctgtgtgctgtgtgccccagccccaccaccatcgtgaccagcggcaccagcacagtggtgtgtgtgtgggagctgtccatgaccaagggccggccccggggcctgcggctgcggcaggccctgtatggccacacccaggccgtgacctgcctggccgcctctgtgaccttcagcctgctggtgtctggcagccaggactgcacctgcatcctgtgggacctggaccacctgacccacgtgacccggctgcctgcccaccgggagggcatcagcgccatcaccatcagtgatgtgtctggcaccatcgtgtcctgtgccggggcccacctgagcctgtggaatgtgaatggccagcccctggccagcatcaccacagcctggggccctgagggcgccatcacctgctgctgcctgatggagggccctgcctgggacaccagccagatcatcatcaccggcagccaggacggcatggtgcgggtgtggaagacagaagatgtgaagatgtctgtgcccggccggcctgctggggaggagcccccagcccagccccccagcccccggggccacaagtgggagaagaacctggccctgagccgggagctggatgtgtccatcgccctgaccgggaagcccagcaagaccagccctgctgtgacagccctggccgtgtccaggaaccacaccaagctgctggtgggagatgagcggggccgcatcttctgctggagcgcagatggatag

SEQ ID NO: 176049 - DNA, 6804 bp, synthetic construct
  misc_feature 1..6804: note = Description of Artificial Sequence: Synthetic coding sequence
  source 1..6804: mol_type = other DNA
tgaaagctggccagccaggccatcgagccagatgtgctgcggcagttcctgggcctgggcatccccagcagcctgagcgccaccaccaagatcctggacagcagccacacccaccggggcaaccctggctgcagcggcagccagacagcccagggcctggccgagggcccctggccagctgccccagatgctggcctgcaccctggggtgacccaggccccccagcccctgggggagagccaggacagcaccacagccctgcagacagccctgagcctcatctccatgaccagccccaggaacctgcagccccagagagctgccctggcccccagctttgtggagtttgacatgtctgtggagggctacggctgcctcttcatccccaccctgagcacagtgatgggcaccagcacagagtacagcgtgtctgggggcattggaactggagccacccggcccttccccccacctgggggcctgaccttcagctgctggttcctgatcagccgccacggggccgccacagagggccaccccctgcgcttcctgaccctggtgcgccacctggccaggacagagcagccctttgtgtgcttctctgtgtccctgtgcccagatgacctgagcctggtggtgtccacagaggagaaggagttccagcccctggatgtgatggagccagaagatgacagcgagcccagcgctggctgccagctgcaggtgcgctgtggccagctgctggcctgtggccagtggcaccacctggccgtggtggtgaccaaggagatgaagaggcactgcaccgtgtccacctgcctggatggccaggtgattggcagcgccaagatgctgtacatccaggccctgcccggccccttcctgtccatggaccccagcgcctttgtggatgtgtatggctacatcgccaccccccgggtgtggaagcagaagagcagcctcatctggaggctgggccccacctacctgtttgaggaggccatctccatggagaccctggaggtgatcaacaagctgggcccccgctactgcggcaacttccaggccgtgcacgtgcagggcgaggacctggacagcgaggccaccccatttgtggccgaggagcgggtgtcctttggcctgcacatcgccagcagcagcatcacctctgtggccgacatcagaaatgcctacaatgaggtggacagccgcctcatcgccaaggagatgaacatcagcagccgggacaatgccatgcctgtgttcctgctgaggaactgtgccggccacctgagcggcagcctgcggaccatcggggctgtggccgtgggccagctgggcgtgcgggtcttccacagcagccctgctgccagcagcctggacttcatcggcggccctgccatcctgctgggcctcatcagcctggccacagatgaccacaccatgtatgctgctgtgaaggtgctgcacagcgtgctgaccagcaatgccatgtgtgacttcctgatgcagcacatctgtggctaccagatcatggccttcctgctgaggaagaaggccagcctgctgaaccaccgcatcttccagctgatcctgtctgtggccggcaccgtggagctgggcttccgcagcagcgccatcaccaacacaggagtcttccagcacatcctgtgcaactttgagctgtggatgaacacagctgacaacctggagctgagcctcttcagccacctgctggagatcctgcagagcccccgggagggccccagaaatgctgaggccgcccaccaggcccagctgatccccaagctgatcttcctgttcaatgagcccagcctcatccccagcaagatcagcaccatcatcggcatcctggcctgccagctgcggggccacttcagcacccaggacctgctgagaattggcctgtttgtggtgtacaccctgaagcccagctctgtgaatgaaaggcagatctgcatggatggagccctggaccccagcctgcctgctggcagccagaccagcggcaagaccatctggctgaggaaccagctgctggagatgctgctgagcgtcatcagcagcccccagctgcacctgagcagcgagagcaaggaggagatgttcctgaagctgggccctgactggttcctgctgctgctgcagggccacctgcacgccagcaccaccgtgctggccctgaagctgctgctgtacttcctggccagccccagcctgcggacccgcttcagagatggcctgtgtgccggctcctgggtggagaggagcacagaaggagtggacatcgtgatggacaacctgaagagccagagccccctgcctgagcagagcccctgcctgctgcccggcttccgggtgctgaatgacttcctggcccaccacgtgcacatccctgaggtgtacctgattgtgtccaccttcttcctgcagacccccctgacagagctgatggatggccccaaggacagcctggatgccatgctgcagtggctgctgcagaggcaccaccaggaggaggtgctgcaggccggcctgtgcacagaaggagccctgctgctgctggagatgctgaaggccaccatgagccagcccctggccggctctgaagatggagcctgggcccagaccttccctgcctctgtgctgcagttcctgagcctggtgcacaggacctacccccaggaccctgcctggagggcccctgagttcctgcagaccctggccatcgccgccttccccctgggcgcccagaagggcgtgggcgctgagagcaccaggaacaccagcagccctgaggccgctgctgagggggacagcacagtggagggcctgcaggcccccaccaaggcccacccagcccggaggaagctgcgggagttcacccagctgctgctgcgggagctgctgctgggcgccagcagccccaagcagtggctgcccctggaggtgctgctggaggccagcccagaccacgccaccagccagcagaagagggacttccagagcgaggtgctgctgagcgccatggagctgttccacatgaccagcggaggagatgctgccatgttcagagatggcaaggagccccagcccagcgctgaggccgctgctgcccccagcctggccaacatcagctgcttcacccagaagctggtggagaagctgtacagcggcatgttttctgctgaccccaggcacatcctgctcttcatcctggagcacatcatggtggtgattgaaacagccagcagccagagggacacagtgctgagcaccctgtacagcagcctgaacaaggtgatcctgtactgcctgagcaagccccagcagagcctgtctgagtgcctgggcctgctgagcatcctgggcttcctgcaggagcactgggatgtggtgtttgccacctacaacagcaacatctccttcctgctgtgcctgatgcactgcctgctgctgctgaatgaaagaagctacccagagggcttcggcctggagcccaagcccaggatgagcacctaccaccaggtgttcctgagccccaatgaagatgtgaaggagaagcgggaggacctgcccagcctgagtgatgtgcagcacaacatccagaagacagtgcagaccctgtggcagcagctggtggcccagaggcagcagaccctggaggatgccttcaagattgacctgtctgtgaagccaggagagcgggaggtgaagattgaggaggtgacccccctgtgggaggagaccatgctgaaggcctggcagcactacctggccagcgagaagaagagcctggccagccgcagcaatgtggcccaccacagcaaggtgaccctgtggagcggcagcctgagcagcgccatgaagctgatgcctggccggcaggccaaggaccctgagtgcaagacagaggactttgtgtcctgcatcgagaactacagaagaagaggccaggagctgtatgccagcctgtacaaggaccacgtgcagaggaggaaatgtggcaacatcaaggccgccaatgcctgggcccgcatccaggagcagctgtttggagagctgggcctgtggagccagggcgaggagaccaagccctgcagcccctgggagctggactggagggagggccctgccaggatgaggaagaggatcaagaggctgagccccctggaggccctgagcagcggccgccacaaggagagccaggacaagaatgaccacatcagccagaccaatgctgagaaccaggatgagctgaccctgcgggaggccgagggggagccagatgaggtgggcgtggactgcacccagctgaccttcttccctgccctgcacgagagcctgcacagcgaggacttcctggagctgtgccgggagcggcaggtgatcctgcaggagctgctggacaaggagaaggtgacccagaagttcagcctggtgattgtgcagggccacctggtgtctgagggcgtgctgctgtttggccaccagcacttctacatctgtgagaacttcaccctgagccccactggagatgtgtactgcaccaggcactgcctgagcaacatcagtgaccccttcatcttcaacctgtgcagcaaggacaggagcacagaccactacagctgccagtgccacagctatgctgacatgagggagctgcggcaggcccgcttcctgctgcaggacatcgccctggagatcttcttccacaacggctacagcaagttcctggtgttctacaacaatgacaggagcaaggccttcaagagcttctgcagcttccagcccagcctgaagggcaaggccaccagcgaggacaccctgagcctgcggcgctacccaggcagtgaccgcatcatgctgcagaagtggcagaagagggacatcagcaactttgagtacctgatgtacctgaacacagctgctggccgcacctgcaatgactacatgcagtaccctgtgttcccctgggtgctggccgactacaccagcgagaccctgaacctggccaaccccaagatcttccgggacctgagcaagcccatgggcgcccagaccaaggagaggaagctgaagttcatccagcgcttcaaggaggtggagaagacagaaggagacatgacagtgcagtgccactactacacccactacagcagcgccatcatcgtggccagctacctggtgaggatgccacccttcacccaggccttctgtgccctgcagggcggcagctttgatgtggccgacaggatgttccacagcgtgaagagcacctgggagagcgccagccgggagaacatgtctgatgtgcgggagctgaccccagagttcttctacctgcctgagttcctgaccaactgcaatggagtggagtttggctgcatgcaggacggcaccgtgctgggagatgtgcagctgcccccctgggcagatggagaccccaggaagttcatcagcctgcacaggaaggccctggagagtgactttgtgtctgccaacctgcaccactggattgacctgatcttcggctacaagcagcagggccctgctgctgtggatgctgtgaacatcttccacccctacttctacggggacaggatggacctgagcagcatcacagaccccctcatcaagagcaccatcctgggctttgtgagcaactttggccaggtgcccaagcagctgttcaccaagccccacccagccaggacagctgctgggaagcccctgcccgggaaggatgtgtccacccctgtgtccctgcccggccacccccagcccttcttctacagcctgcagagcctgcggcccagccaggtgacagtgaaggacatgtacctgttcagcctgggcagcgagagccccaagggggccatcggccacatcgtgtccacagagaagaccatcctggccgtggagaggaacaaggtgctgctgccccccctgtggaacagaaccttctcctggggctttgatgacttcagctgctgcctgggcagctatggcagtgacaaggtgctgatgacctttgagaacctggccgcctggggccgctgcctgtgtgctgtgtgccccagccccaccaccatcgtgaccagcggcaccagcacagtggtgtgtgtgtgggagctgtccatgaccaagggccggccccggggcctgcggctgcggcaggccctgtatggccacacccaggccgtgacctgcctggccgcctctgtgaccttcagcctgctggtgtctggcagccaggactgcacctgcatcctgtgggacctggaccacctgacccacgtgacccggctgcctgcccaccgggagggcatcagcgccatcaccatcagtgatgtgtctggcaccatcgtgtcctgtgccggggcccacctgagcctgtggaatgtgaatggccagcccctggccagcatcaccacagcctggggccctgagggcgccatcacctgctgctgcctgatggagggccctgcctgggacaccagccagatcatcatcaccggcagccaggacggcatggtgcgggtgtggaagacagaagatgtgaagatgtctgtgcccggcctgcagatgggcaggaagcgggaggccgctgaggccctggcccagcagtgccaggccgagggcggccgcggggactggggcctgagcagcgcctacagaagaaacccccagggcctgctgccccacagcagccagggccgggccagcggcaaccacagcagcgctgcccagcccagcccctggcccatgggcctgctgtag

SEQ ID NO: 176050 - DNA, 9555 bp, synthetic construct
  misc_feature 1..9555: note = Description of Artificial Sequence: Synthetic coding sequence
  source 1..9555: mol_type = other DNA
atggaggccgaggacctgagcaaggccgaggacagaaatgaagaccccggcagcaagaatgaaggccagctggccgctgtgcagccagatgtgccccatggaggccagagcagcagccccacagccctgtgggacatgctggagaggaagttcctggagtaccagcagctgacccacaagagccccatcgagcggcagaagagcctgctgagcctgctgcccctcttcctgaaggcctgggagcacagcgtgggcatcatctgcttccccagcctgcagaggctggctgaagatgtgtctgaccagctggcccagcagctgcagaaggccctggtgggcaagccagctgagcaggcccggctggccgccggccagctgctgtggtggaagggagatgtggaccaggacggctacctgctgctgaagtctgtgtatgtgctgaccggcacagacagcgagaccctgggccgggtggccgagagcggcctgcctgccctgctgctgcagtgcctgtacctgttctttgtgttccccctggacaaggatgagctgctggagagtgacctgcaggtgcagaagatgtttgtgcagatgctgctgaacatctgcagcgacagccagggcctggagggcctgctgagcggcagcgagctgcagagcctgctgattgccaccacctgcctgcgggagcacagctgctgcttctggaaggagcccaccttctgtgtgctgcgggccatcagcaaggcccagaacctgagcatcatccagtacctgcaggccacagactgtgtgcggctgagcctgcagaacctgagccggctgacagacaccctgcctgcccctgaggtgtctgaggccgtgtccctcatcctgggctttgtgaaggacagctaccctgtgtcctctgccctcttcctggagtttgagaacagcgagggctaccccctgctgctgaaggtgctgctgcgctatgatggcctgacccagagcgaggtggacccccacctggaggagctgctgggcctggtggtgtggctgaccacctgtggccgctctgagctgaaggtgtttgacagcatcacctacccccagctggagggcttcaagttccaccacgaggccagcggcgtgacagtgaagaacctgcaggccttccaggtgctgcagaatgtgttccacaaggccagtgacagcgtgctgtgcatccaggtgctgagcgtcatccgcaccatgtgggcctggaatgccaggaacttcttcctgctggagtggaccctgcagcccatcagccagtttgtggagatcatgcccctgaagccagcccctgtgcaggagcacttcttccagctgctggaggccctggtgtttgagctgcactacgtgccccatgagatcctgaggaaggtgcagcacctgatcaaggagagccctggccccagctgcaccctgatggccctgcagagcatcctgagcattgctggaggagaccccctcttcacagacatcttccgggacagcggcctgctgggcctgctgctggcccagctgaggaagcaggccaagatcatgaggaagagcggcaacaaggtgtccaccccaggagtgcaggaccctgagcgggagctgacctgtgtgatgctgcgcatcgtggtgaccctgctgaagggctctgtgagaaatgctgtggtgctgaaggaccacggcatggtgcccttcatcaagatcttcctggatgatgagtgctaccgggaggccagcctgagcatcctggagcagctgagcgccatcaatgctgaggagtacatgagcatcatcgtgggcgccctgtgcagcagcacccagggcgagctgcagctgaagctggacctgctgaagagcctgctgcgcatcctggtgacccccaagggccgggccgccttccgggtgagcagcggcttcaacggcctgctgagcctgctgagtgacctggagggcagcctgcaggagccccccctgcaggcctggggcgctgtgagcccccggcagaccctggagctggtgctgtacaccctgtgtgctgtgtctgctgccctgcactgggaccctgtgaatggctacttcttcagaagaaatggcctgtttgagaagctggccgaggacctgtgcctgctgggctgctttggagccctggaggaggagggcaacctgctgcgctcctgggtggacaccaaggcccggccctttgctgacctgctgggcacagccttcagcagcagcggcagcctgcccccacgcatccagagctgcctgcagatcctgggcttcctggacagcatggccagcggcaccctgcacctgcggggggacctgaaggagagcctgcggaccaagcagggccctgtggtggatgtgcagaagggggagactggaagtgacccccagaggaacttcaagcagtggccagacctggaggagaggatggatgaaggagatgctgccatcatgcaccctggggtggtgtgcatcatggtgcggctgctgccccggctgtaccacgaggaccacccccagctgtctgaggagatccagtgcagcctggccagccacatccagagcctggtgaagtctgagaagaaccggcaggtgatgtgtgaggccggcctgctgggcaccctgatggccagctgccaccgggccctggtgaccagcggcagccccctgcacagccgcctcatccgcatctttgagaagctggccagccaggccattgaaccagatgtgctgcggcagttcctgggcctgggcatccccagcagcctgagcgccaccaccaagatcctggacagcagccacacccaccggggcaaccctggctgcagcggcagccagacagcccagggcctggccgagggcccctggccagctgccccagatgctggcctgcaccctggggtgacccaggccccccagcccctgggggagagccaggacagcaccacagccctgcagacagccctgagcctcatctccatgaccagccccaggaacctgcagccccagagagctgccctggcccccagctttgtggagtttgacatgtctgtggagggctacggctgcctcttcatccccaccctgagcacagtgatgggcaccagcacagagtacagcgtgtctgggggcatcggcaccggggccacccggcccttccccccacctgggggcctgaccttcagctgctggttcctgatcagcagacatggagctgccacagagggccaccccctgcgcttcctgaccctggtgcgccacctggccaggacagagcagccctttgtgtgcttctctgtgtccctgtgcccagatgacctgagcctggtggtgtccacagaggagaaggagttccagcccctggatgtgatggagccagaagatgattctgagcccagcgctggctgccagctgcaggtgcgctgtggccagctgctggcctgtggccagtggcaccacctggccgtggtggtgaccaaggagatgaagaggcactgcaccgtgtccacctgcctggatggccaggtgattggcagcgccaagatgctgtacatccaggccctgcccggccccttcctgtccatggaccccagcgcctttgtggatgtgtatggctacatcgccaccccccgggtgtggaagcagaagagcagcctcatctggaggctgggccccacctacctgtttgaggaggccatctccatggagaccctggaggtgatcaacaagctgggcccccgctactgcggcaacttccaggccgtgcacgtgcagggcgaggacctggacagcgaggccaccccatttgtggccgaggagcgggtgtcctttggcctgcacatcgccagcagcagcatcacctctgtggccgacatcagaaatgcctacaatgaggtggacagccggctgattgccaaggagatgaacatcagcagccgggacaatgccatgcctgtgttcctgctgaggaactgtgccggccacctgagcggcagcctgcggaccatcggggctgtggccgtgggccagctgggcgtgcgggtcttccacagcagccctgctgccagcagcctggacttcatcggcggccctgccatcctgctgggcctcatcagcctggccacagatgaccacaccatgtatgctgctgtgaaggtgctgcacagcgtgctgaccagcaatgccatgtgtgacttcctgatgcagcacatctgtggctaccagatcatggccttcctgctgaggaagaaggccagcctgctgaaccaccgcatcttccagctgatcctgtctgtggccggcaccgtggagctgggcttccgcagcagcgccatcaccaacacaggagtcttccagcacatcctgtgcaactttgagctgtggatgaacacagctgacaacctggagctgagcctcttcagccacctgctggagatcctgcagagcccccgggagggccccagaaatgctgaggccgcccaccaggcccagctgatccccaagctgatcttcctgttcaatgagcccagcctcatccccagcaagatcagcaccatcatcggcatcctggcctgccagctgcggggccacttcagcacccaggacctgctgcgcatcggcctgtttgtggtgtacaccctgaagcccagctctgtgaatgaaaggcagatctgcatggatggagccctggaccccagcctgcctgctggcagccagaccagcggcaagaccatctggctgaggaaccagctgctggagatgctgctgagcgtcatcagcagcccccagctgcacctgagcagcgagagcaaggaggagatgttcctgaagctgggccctgactggttcctgctgctgctgcagggccacctgcacgccagcaccaccgtgctggccctgaagctgctgctgtacttcctggccagccccagcctgcggacccgcttcagagatggcctgtgtgccggctcctgggtggagaggagcacagagggcgtggacatcgtgatggacaacctgaagagccagagccccctgcctgagcagagcccctgcctgctgcccggcttccgggtgctgaatgacttcctggcccaccacgtgcacatccctgaggtgtacctgattgtgtccaccttcttcctgcagacccccctgacagagctgatggatggccccaaggacagcctggatgccatgctgcagtggctgctgcagaggcaccaccaggaggaggtgctgcaggccggcctgtgcacagagggcgccctgctgctgctggagatgctgaaggccaccatgagccagcccctggccggctctgaagatggagcctgggcccagaccttccctgcctctgtgctgcagttcctgagcctggtgcacaggacctacccccaggaccctgcctggagggcccctgagttcctgcagaccctggccatcgccgccttccccctgggcgcccagaagggcgtgggcgctgagagcaccaggaacaccagcagccctgaggccgctgctgagggggacagcacagtggagggcctgcaggcccccaccaaggcccacccagcccggaggaagctgcgggagttcacccagctgctgctgcgggagctgctgctgggcgccagcagccccaagcagtggctgcccctggaggtgctgctggaggccagcccagaccacgccaccagccagcagaagagggacttccagagcgaggtgctgctgagcgccatggagctgttccacatgaccagcggaggagatgctgccatgttcagagatggcaaggagccccagcccagcgctgaggccgccgccgcccccagcctggccaacatcagctgcttcacccagaagctggtggagaagctgtacagcggcatgttttctgctgaccccaggcacatcctgctcttcatcctggagcacatcatggtggtgattgaaacagccagcagccagagggacacagtgctgagcaccctgtacagcagcctgaacaaggtgatcctgtactgcctgagcaagccccagcagagcctgtctgaatgtctgggcctgctgagcatcctgggcttcctgcaggagcactgggatgtggtgtttgccacctacaacagcaacatctccttcctgctgtgcctgatgcactgcctgctgctgctgaatgaaagaagctacccagagggcttcggcctggagcccaagcccaggatgagcacctaccaccaggtgttcctgagccccaatgaagatgtgaaggagaagcgggaggacctgcccagcctgagtgatgtgcagcacaacatccagaagacagtgcagaccctgtggcagcagctggtggcccagaggcagcagaccctggaggatgccttcaagattgacctgtctgtgaagccaggagagcgggaggtgaagattgaggaggtgacccccctgtgggaggagaccatgctgaaggcctggcagcactacctggccagcgagaagaagagcctggccagccgcagcaatgtggcccaccacagcaaggtgaccctgtggagcggcagcctgagcagcgccatgaagctgatgcctggccggcaggccaaggaccctgagtgcaagacagaagattttgtgtcctgcatcgagaactacagaagaagaggccaggagctgtatgccagcctgtacaaggaccacgtgcagaggaggaaatgtggcaacatcaaggccgccaatgcctgggcccgcatccaggagcagctgtttggagagctgggcctgtggagccagggcgaggagaccaagccctgcagcccctgggagctggactggagggagggccctgccaggatgaggaagaggatcaagaggctgagccccctggaggccctgagcagcggccgccacaaggagagccaggacaagaatgaccacatcagccagaccaatgctgagaaccaggatgagctgaccctgcgggaggccgagggggagccagatgaggtgggcgtggactgcacccagctgaccttcttccctgccctgcacgagagcctgcacagcgaggacttcctggagctgtgccgggagcggcaggtgatcctgcaggagctgctggacaaggagaaggtgacccagaagttcagcctggtgattgtgcagggccacctggtgtctgaaggagtgctgctgtttggccaccagcacttctacatctgtgagaacttcaccctgagccccactggagatgtgtactgcaccaggcactgcctgagcaacatcagtgaccccttcatcttcaacctgtgcagcaaggacaggagcacagaccactacagctgccagtgccacagctatgctgacatgagggagctgcggcaggcccgcttcctgctgcaggacatcgccctggagatcttcttccacaacggctacagcaagttcctggtgttctacaacaatgacaggagcaaggccttcaagagcttctgcagcttccagcccagcctgaagggcaaggccaccagcgaggacaccctgagcctgcggcgctacccaggcagtgaccgcatcatgctgcagaagtggcagaagagggacatcagcaactttgagtacctgatgtacctgaacacagctgctggccgcacctgcaatgactacatgcagtaccctgtgttcccctgggtgctggccgactacaccagcgagaccctgaacctggccaaccccaagatcttccgggacctgagcaagcccatgggcgcccagaccaaggagaggaagctgaagttcatccagcgcttcaaggaggtggagaagacagaaggagacatgacagtgcagtgccactactacacccactacagcagcgccatcatcgtggccagctacctggtgaggatgccacccttcacccaggccttctgtgccctgcagggcggcagctttgatgtggccgacaggatgttccacagcgtgaagagcacctgggagagcgccagccgggagaacatgtctgatgtgcgggagctgaccccagagttcttctacctgcctgagttcctgaccaactgcaatggagtggagtttggctgcatgcaggacggcaccgtgctgggagatgtgcagctgcccccctgggcagatggagaccccaggaagttcatcagcctgcacaggaaggccctggagagtgactttgtgtctgccaacctgcaccactggattgacctgatcttcggctacaagcagcagggccctgctgctgtggatgctgtgaacatcttccacccctacttctatggagacaggatggacctgagcagcatcacagaccccctcatcaagagcaccatcctgggctttgtgagcaactttggccaggtgcccaagcagctgttcaccaagccccacccagccaggacagctgctgggaagcccctgcccgggaaggatgtgtccacccctgtgtccctgcccggccacccccagcccttcttctacagcctgcagagcctgcggcccagccaggtgacagtgaaggacatgtacctgttcagcctgggcagcgagagccccaagggggccatcggccacatcgtgtccacagagaagaccatcctggccgtggagaggaacaaggtgctgctgccccccctgtggaacagaaccttctcctggggctttgatgacttcagctgctgcctgggcagctatggcagtgacaaggtgctgatgacctttgagaacctggccgcctggggccgctgcctgtgtgctgtgtgccccagccccaccaccatcgtgaccagcggcaccagcacagtggtgtgtgtgtgggagctgtccatgaccaagggccggccccggggcctgcggctgcggcaggccctgtatggccacacccaggccgtgacctgcctggccgcctctgtgaccttcagcctgctggtgtctggcagccaggactgcacctgcatcctgtgggacctggaccacctgacccacgtgacccggctgcctgcccaccgggagggcatcagcgccatcaccatcagtgatgtgtctggcaccatcgtgtcctgtgccggggcccacctgagcctgtggaatgtgaatggccagcccctggccagcatcaccacagcctggggccctgagggcgccatcacctgctgctgcctgatggagggccctgcctgggacaccagccagatcatcatcaccggcagccaggacggcatggtgcgggtgtggaagacagaagatgtgaagatgtctgtgcccggccggcctgctggggaggagcccccagcccagccccccagcccccggggccacaagtgggagaagaacctggccctgagccgggagctggatgtgtccatcgccctgaccgggaagcccagcaagaccagccctgctgtgacagccctggccgtgtccaggaaccacaccaagctgctggtgggagatgagcggggccgcatcttctgctggagcgcagatggatag

SEQ ID NO: 176051 - DNA, 1965 bp, synthetic construct
  misc_feature 1..1965: note = Description of Artificial Sequence: Synthetic coding sequence
  source 1..1965: mol_type = other DNA
atggaggccgaggacctgagcaaggccgaggacagaaatgaagaccccggcagcaagaatgaaggccagctggccgctgtgcagccagatgtgccccatggaggccagagcagcagccccacagccctgtgggacatgctggagaggaagttcctggagtaccagcagctgacccacaagagccccatcgagcggcagaagagcctgctgagcctgctgcccctcttcctgaaggcctgggagcacagcgtgggcatcatctgcttccccagcctgcagaggctggctgaagatgtgtctgaccagctggcccagcagctgcagaaggccctggtgggcaagccagctgagcaggcccggctggccgccggccagctgctgtggtggaagggagatgtggaccaggacggctacctgctgctgaagtctgtgtatgtgctgaccggcacagacagcgagaccctgggccgggtggccgagagcggcctgcctgccctgctgctgcagtgcctgtacctgttctttgtgttccccctggacaaggatgagctgctggagagtgacctgcaggtgcagaagatgtttgtgcagatgctgctgaacatctgcagcgacagccagggcctggagggcctgctgagcggcagcgagctgcagagcctgctgattgccaccacctgcctgcgggagcacagctgctgcttctggaaggagcccaccttctgtgtgctgcgggccatcagcaaggcccagaacctgagcatcatccagtacctgcaggccacagactgtgtgcggctgagcctgcagaacctgagccggctgacagacaccctgcctgcccctgaggtgtctgaggccgtgtccctcatcctgggctttgtgaaggacagctaccctgtgtcctctgccctcttcctggagtttgagaacagcgagggctaccccctgctgctgaaggtgctgctgcgctatgatggcctgacccagagcgaggtggacccccacctggaggagctgctgggcctggtggtgtggctgaccacctgtggccgctctgagctgaaggtgtttgacagcatcacctacccccagctggagggcttcaagttccaccacgaggccagcggcgtgacagtgaagaacctgcaggccttccaggtgctgcagaatgtgttccacaaggccagtgacagcgtgctgtgcatccaggtgctgagcgtcatccgcaccatgtgggcctggaatgccaggaacttcttcctgctggagtggaccctgcagcccatcagccagtttgtggagatcatgcccctgaagccagcccctgtgcaggagcacttcttccagctgctggaggccctggtgtttgagctgcactacgtgccccatgagatcctgaggaaggtgcagcacctgatcaaggagagccctggccccagctgcaccctgatggccctgcagagcatcctgagcattgctggaggagaccccctcttcacagacatcttccgggacagcggcctgctgggcctgctgctggcccagctgaggaagcaggccaagatcatgaggaagagcggcaacaaggtgtccaccccaggagtgcaggaccctgagcgggagctgacctgtgtgatgctgcgcatcgtggtgaccctgctgaagggctctgtgagaaatgctgtggtgctgaaggaccacggcatggtgcccttcatcaagatcttcctggatgatgagtgctaccgggaggccagcctgagcatcctggagcagctgagcgccatcaatgctgaggagtacatgagcatcatcgtgggcgccctgtgcagcagcacccagggcgagctgcagctgaagctggacctgctgaaggtgatcagcagcccccccctgcggctggccagcctgtggatctgcaccaagaggagcacctttgcccaggcctttgtgttcatgtag

SEQ ID NO: 176052 - DNA, 1659 bp, synthetic construct
  misc_feature 1..1659: note = Description of Artificial Sequence: Synthetic coding sequence
  source 1..1659: mol_type = other DNA
tgagatgacacagtggtgtgggccgaggagtgtgtggcctgtgccaactggctgtggatgaacacagctgacaacctggagctgagcctcttcagccacctgctggagatcctgcagagcccccgggagggccccagaaatgctgaggccgcccaccaggcccagctgatccccaagctgatcttcctgttcaatgagcccagcctcatccccagcaagatcagcaccatcatcggcatcctggcctgccagctgcggggccacttcagcacccaggacctgctgagaattggcctgtttgtggtgtacaccctgaagcccagctctgtgaatgaaaggcagatctgcatggatggagccctggaccccagcctgcctgctggcagccagaccagcggcaagaccatctggctgaggaaccagctgctggagatgctgctgagcgtcatcagcagcccccagctgcacctgagcagcgagagcaaggaggagatgttcctgaagctgggccctgactggttcctgctgctgctgcagggccacctgcacgccagcaccaccgtgctggccctgaagctgctgctgtacttcctggccagccccagcctgcggacccgcttcagagatggcctgtgtgccggctcctgggtggagaggagcacagaaggagtggacatcgtgatggacaacctgaagagccagagccccctgcctgagcagagcccctgcctgctgcccggcttccgggtgctgaatgacttcctggcccaccacgtgcacatccctgaggtgtacctgattgtgtccaccttcttcctgcagacccccctgacagagctgatggatggccccaaggacagcctggatgccatgctgcagtggctgctgcagaggcaccaccaggaggaggtgctgcaggccggcctgtgcacagaaggagccctgctgctgctggagatgctgaaggccaccatgagccagcccctggccggctctgaagatggagcctgggcccagaccttccctgcctctgtgctgcagttcctgagcctggtgcacaggacctacccccaggaccctgcctggagggcccctgagttcctgcagaccctggccatcgccgccttccccctgggcgcccagaagggcgtgggcgctgagagcaccaggaacaccagcagccctgaggccgctgctgagggggacagcacagtggagggcctgcaggcccccaccaaggcccacccagcccggaggaagctgcgggagttcacccagctgctgctgcgggagctgctgctgggcgccagcagccccaagcagtggctgcccctggaggtgctgctggaggccagcccagaccacgccaccagccagcagaagagggacttccagagcgaggtgctgctgagcgccatggagctgttccacatgaccagcggaggagatgctgccatgttcagagatggcaaggagccccagcccagcgctgaggccgctgctgcccccagcctggccaacatcagctgcttcacccagaagctggtggagaagctgtacagcggcatgttttctgctgaccccaggcacatcctgctcttcatcctggagcacatcatggtgatcagcgcccccctgcaggcccgggacttctcctag

SEQ ID NO: 176053 - DNA, 3129 bp, synthetic construct
  misc_feature 1..3129: note = Description of Artificial Sequence: Synthetic coding sequence
  source 1..3129: mol_type = other DNA
atggaggccgaggacctgagcaaggccgaggacagaaatgaagaccccggcagcaagaatgaaggccagctggccgctgtgcagccagatgtgccccatggaggccagagcagcagccccacagccctgtgggacatgctggagaggaagttcctggagtaccagcagctgacccacaagagccccatcgagcggcagaagagcctgctgagcctgctgcccctcttcctgaaggcctgggagcacagcgtgggcatcatctgcttccccagcctgcagaggctggctgaagatgtgtctgaccagctggcccagcagctgcagaaggccctggtgggcaagccagctgagcaggcccggctggccgccggccagctgctgtggtggaagggagatgtggaccaggacggctacctgctgctgaagtctgtgtatgtgctgaccggcacagacagcgagaccctgggccgggtggccgagagcggcctgcctgccctgctgctgcagtgcctgtacctgttctttgtgttccccctggacaaggatgagctgctggagagtgacctgcaggtgcagaagatgtttgtgcagatgctgctgaacatctgcagcgacagccagggcctggagggcctgctgagcggcagcgagctgcagagcctgctgattgccaccacctgcctgcgggagcacagctgctgcttctggaaggagcccaccttctgtgtgctgcgggccatcagcaaggcccagaacctgagcatcatccagtacctgcaggccacagactgtgtgcggctgagcctgcagaacctgagccggctgacagacaccctgcctgcccctgaggtgtctgaggccgtgtccctcatcctgggctttgtgaaggacagctaccctgtgtcctctgccctcttcctggagtttgagaacagcgagggctaccccctgctgctgaaggtgctgctgcgctatgatggcctgacccagagcgaggtggacccccacctggaggagctgctgggcctggtggtgtggctgaccacctgtggccgctctgagctgaaggtgtttgacagcatcacctacccccagctggagggcttcaagttccaccacgaggccagcggcgtgacagtgaagaacctgcaggccttccaggtgctgcagaatgtgttccacaaggccagtgacagcgtgctgtgcatccaggtgctgagcgtcatccgcaccatgtgggcctggaatgccaggaacttcttcctgctggagtggaccctgcagcccatcagccagtttgtggagatcatgcccctgaagccagcccctgtgcaggagcacttcttccagctgctggaggccctggtgtttgagctgcactacgtgccccatgagatcctgaggaaggtgcagcacctgatcaaggagagccctggccccagctgcaccctgatggccctgcagagcatcctgagcattgctggaggagaccccctcttcacagacatcttccgggacagcggcctgctgggcctgctgctggcccagctgaggaagcaggccaagatcatgaggaagagcggcaacaaggtgtccaccccaggagtgcaggaccctgagcgggagctgacctgtgtgatgctgcgcatcgtggtgaccctgctgaagggctctgtgagaaatgctgtggtgctgaaggaccacggcatggtgcccttcatcaagatcttcctggatgatgagtgctaccgggaggccagcctgagcatcctggagcagctgagcgccatcaatgctgaggagtacatgagcatcatcgtgggcgccctgtgcagcagcacccagggcgagctgcagctgaagctggacctgctgaagagcctgctgcgcatcctggtgacccccaagggccgggccgccttccgggtgagcagcggcttcaacggcctgctgagcctgctgagtgacctggagggcagcctgcaggagccccccctgcaggcctggggcgctgtgagcccccggcagaccctggagctggtgctgtacaccctgtgtgctgtgtctgctgccctgcactgggaccctgtgaatggctacttcttcagaagaaatggcctgtttgagaagctggccgaggacctgtgcctgctgggctgctttggagccctggaggaggagggcaacctgctgcgctcctgggtggacaccaaggcccggccctttgctgacctgctgggcacagccttcagcagcagcggcagcctgcccccacgcatccagagctgcctgcagatcctgggcttcctggacagcatggccagcggcaccctgcacctgcggggggacctgaaggagagcctgcggaccaagcagggccctgtggtggatgtgcagaagggggagactggaagtgacccccagaggaacttcaagcagtggccagacctggaggagaggatggatgaaggagatgctgccatcatgcaccctggggtggtgtgcatcatggtgcggctgctgccccggctgtaccacgaggaccacccccagctgtctgaggagatccagtgcagcctggccagccacatccagagcctggtgaagtctgagaagaaccggcaggtgatgtgtgaggccggcctgctgggcaccctgatggccagctgccaccgggccctggtgaccagcggcagccccctgcacagccgcctcatccgcatctttgagaagctggccagccaggccattgaaccagatgtgctgcggcagttcctgggcctgggcatccccagcagcctgagcgccaccaccaagatcctggacagcagccacacccaccggggcaaccctggctgcagcggcagccagacagcccagggcctggccgagggcccctggccagctgccccagatgctggcctgcaccctggggtgacccaggccccccagcccctgggggagagccaggacagcaccacagccctgcagacagccctgagcctcatctccatgaccagcccccacatctggaagcccaacatctggaaggacaacctggcccagaagcctgtggccggagatgctgcccagtgcaacatcttccccccagccagctctgtgctgtag

SEQ ID NO: 176054 - DNA, 9531 bp, synthetic construct
  misc_feature 1..9531: note = Description of Artificial Sequence: Synthetic coding sequence
  source 1..9531: mol_type = other DNA
atggaggccgaggacctgagcaaggccgaggacagaaatgaagaccccggcagcaagaatgaaggccagctggccgctgtgcagccagatgtgccccatggaggccagagcagcagccccacagccctgtgggacatgctggagaggaagttcctggagtaccagcagctgacccacaagagccccatcgagcggcagaagagcctgctgagcctgctgcccctcttcctgaaggcctgggagcacagcgtgggcatcatctgcttccccagcctgcagaggctggctgaagatgtgtctgaccagctggcccagcagctgcagaaggccctggtgggcaagccagctgagcaggcccggctggccgccggccagctgctgtggtggaagggagatgtggaccaggacggctacctgctgctgaagtctgtgtatgtgctgaccggcacagacagcgagaccctgggccgggtggccgagagcggcctgcctgccctgctgctgcagtgcctgtacctgttctttgtgttccccctggacaaggatgagctgctggagagtgacctgcaggtgcagaagatgtttgtgcagatgctgctgaacatctgcagcgacagccagggcctggagggcctgctgagcggcagcgagctgcagagcctgctgattgccaccacctgcctgcgggagcacagctgctgcttctggaaggagcccaccttctgtgtgctgcgggccatcagcaaggcccagaacctgagcatcatccagtacctgcaggccacagactgtgtgcggctgagcctgcagaacctgagccggctgacagacaccctgcctgcccctgaggtgtctgaggccgtgtccctcatcctgggctttgtgaaggacagctaccctgtgtcctctgccctcttcctggagtttgagaacagcgagggctaccccctgctgctgaaggtgctgctgcgctatgatggcctgacccagagcgaggtggacccccacctggaggagctgctgggcctggtggtgtggctgaccacctgtggccgctctgagctgaaggtgtttgacagcatcacctacccccagctggagggcttcaagttccaccacgaggccagcggcgtgacagtgaagaacctgcaggccttccaggtgctgcagaatgtgttccacaaggccagtgacagcgtgctgtgcatccaggtgctgagcgtcatccgcaccatgtgggcctggaatgccaggaacttcttcctgctggagtggaccctgcagcccatcagccagtttgtggagatcatgcccctgaagccagcccctgtgcaggagcacttcttccagctgctggaggccctggtgtttgagctgcactacgtgccccatgagatcctgaggaaggtgcagcacctgatcaaggagagccctggccccagctgcaccctgatggccctgcagagcatcctgagcattgctggaggagaccccctcttcacagacatcttccgggacagcggcctgctgggcctgctgctggcccagctgaggaagcaggccaagatcatgaggaagagcggcaacaaggtgtccaccccaggagtgcaggaccctgagcgggagctgacctgtgtgatgctgcgcatcgtggtgaccctgctgaagggctctgtgagaaatgctgtggtgctgaaggaccacggcatggtgcccttcatcaagatcttcctggatgatgagtgctaccgggaggccagcctgagcatcctggagcagctgagcgccatcaatgctgaggagtacatgagcatcatcgtgggcgccctgtgcagcagcacccagggcgagctgcagctgaagctggacctgctgaagagcctgctgcgcatcctggtgacccccaagggccgggccgccttccgggtgagcagcggcttcaacggcctgctgagcctgctgagtgacctggagggcagcctgcaggagccccccctgcaggcctggggcgctgtgagcccccggcagaccctggagctggtgctgtacaccctgtgtgctgtgtctgctgccctgcactgggaccctgtgaatggctacttcttcagaagaaatggcctgtttgagaagctggccgaggacctgtgcctgctgggctgctttggagccctggaggaggagggcaacctgctgcgctcctgggtggacaccaaggcccggccctttgctgacctgctgggcacagccttcagcagcagcggcagcctgcccccacgcatccagagctgcctgcagatcctgggcttcctggacagcatggccagcggcaccctgcacctgcggggggacctgaaggagagcctgcggaccaagcagggccctgtggtggatgtgcagaagggggagactggaagtgacccccagaggaacttcaagcagtggccagacctggaggagaggatggatgaaggagatgctgccatcatgcaccctggggtggtgtgcatcatggtgcggctgctgccccggctgtaccacgaggaccacccccagctgtctgaggagatccagtgcagcctggccagccacatccagagcctggtgaagtctgagaagaaccggcaggtgatgtgtgaggccggcctgctgggcaccctgatggccagctgccaccgggccctggtgaccagcggcagccccctgcacagccgcctcatccgcatctttgagaagctggccagccaggccattgaaccagatgtgctgcggcagttcctgggcctgggcatccccagcagcctgagcgccaccaccaagatcctggacagcagccacacccaccggggcaaccctggctgcagcggcagccagacagcccagggcctggccgagggcccctggccagctgccccagatgctggcctgcaccctggggtgacccaggccccccagcccctgggggagagccaggacagcaccacagccctgcagacagccctgagcctcatctccatgaccagccccaggaacctgcagccccagagagctgccctggcccccagctttgtggagtttgacatgtctgtggagggctacggctgcctcttcatccccaccctgagcacagtgatgggcaccagcacagagtacagcgtgtctgggggcatcggcaccggggccacccggcccttccccccacctgggggcctgaccttcagctgctggttcctgatcagcagacatggagctgccacagagggccaccccctgcgcttcctgaccctggtgcgccacctggccaggacagagcagccctttgtgtgcttctctgtgtccctgtgcccagatgacctgagcctggtggtgtccacagaggagaaggagttccagcccctggatgtgatggagccagaagatgattctgagcccagcgctggctgccagctgcaggtgcgctgtggccagctgctggcctgtggccagtggcaccacctggccgtggtggtgaccaaggagatgaagaggcactgcaccgtgtccacctgcctggatggccaggtgattggcagcgccaagatgctgtacatccaggccctgcccggccccttcctgtccatggaccccagcgcctttgtggatgtgtatggctacatcgccaccccccgggtgtggaagcagaagagcagcctcatctggaggctgggccccacctacctgtttgaggaggccatctccatggagaccctggaggtgatcaacaagctgggcccccgctactgcggcaacttccaggccgtgcacgtgcagggcgaggacctggacagcgaggccaccccatttgtggccgaggagcgggtgtcctttggcctgcacatcgccagcagcagcatcacctctgtggccgacatcagaaatgcctacaatgaggtggacagccggctgattgccaaggagatgaacatcagcagccgggacaatgccatgcctgtgttcctgctgaggaactgtgccggccacctgagcggcagcctgcggaccatcggggctgtggccgtgggccagctgggcgtgcgggtcttccacagcagccctgctgccagcagcctggacttcatcggcggccctgccatcctgctgggcctcatcagcctggccacagatgaccacaccatgtatgctgctgtgaaggtgctgcacagcgtgctgaccagcaatgccatgtgtgacttcctgatgcagcacatctgtggctaccagatcatggccttcctgctgaggaagaaggccagcctgctgaaccaccgcatcttccagctgatcctgtctgtggccggcaccgtggagctgggcttccgcagcagcgccatcaccaacacaggagtcttccagcacatcctgtgcaactttgagctgtggatgaacacagctgacaacctggagctgagcctcttcagccacctgctggagatcctgcagagcccccgggagggccccagaaatgctgaggccgcccaccaggcccagctgatccccaagctgatcttcctgttcaatgagcccagcctcatccccagcaagatcagcaccatcatcggcatcctggcctgccagctgcggggccacttcagcacccaggacctgctgcgcatcggcctgtttgtggtgtacaccctgaagcccagctctgtgaatgaaaggcagatctgcatggatggagccctggaccccagcctgcctgctggcagccagaccagcggcaagaccatctggctgaggaaccagctgctggagatgctgctgagcgtcatcagcagcccccagctgcacctgagcagcgagagcaaggaggagatgttcctgaagctgggccctgactggttcctgctgctgctgcagggccacctgcacgccagcaccaccgtgctggccctgaagctgctgctgtacttcctggccagccccagcctgcggacccgcttcagagatggcctgtgtgccggctcctgggtggagaggagcacagagggcgtggacatcgtgatggacaacctgaagagccagagccccctgcctgagcagagcccctgcctgctgcccggcttccgggtgctgaatgacttcctggcccaccacgtgcacatccctgaggtgtacctgattgtgtccaccttcttcctgcagacccccctgacagagctgatggatggccccaaggacagcctggatgccatgctgcagtggctgctgcagaggcaccaccaggaggaggtgctgcaggccggcctgtgcacagagggcgccctgctgctgctggagatgctgaaggccaccatgagccagcccctggccggctctgaagatggagcctgggcccagaccttccctgcctctgtgctgcagttcctgagcctggtgcacaggacctacccccaggaccctgcctggagggcccctgagttcctgcagaccctggccatcgccgccttccccctgggcgcccagaagggcgtgggcgctgagagcaccaggaacaccagcagccctgaggccgctgctgagggggacagcacagtggagggcctgcaggcccccaccaaggcccacccagcccggaggaagctgcgggagttcacccagctgctgctgcgggagctgctgctgggcgccagcagccccaagcagtggctgcccctggaggtgctgctggaggccagcccagaccacgccaccagccagcagaagagggacttccagagcgaggtgctgctgagcgccatggagctgttccacatgaccagcggaggagatgctgccatgttcagagatggcaaggagccccagcccagcgctgaggccgccgccgcccccagcctggccaacatcagctgcttcacccagaagctggtggagaagctgtacagcggcatgttttctgctgaccccaggcacatcctgctcttcatcctggagcacatcatggtggtgattgaaacagccagcagccagagggacacagtgctgagcaccctgtacagcagcctgaacaaggtgatcctgtactgcctgagcaagccccagcagagcctgtctgaatgtctgggcctgctgagcatcctgggcttcctgcaggagcactgggatgtggtgtttgccacctacaacagcaacatctccttcctgctgtgcctgatgcactgcctgctgctgctgaatgaaagaagctacccagagggcttcggcctggagcccaagcccaggatgagcacctaccaccaggtgttcctgagccccaatgaagatgtgaaggagaagcgggaggacctgcccagcctgagtgatgtgcagcacaacatccagaagacagtgcagaccctgtggcagcagctggtggcccagaggcagcagaccctggaggatgccttcaagattgacctgtctgtgaagccaggagagcgggaggtgaagattgaggaggtgacccccctgtgggaggagaccatgctgaaggcctggcagcactacctggccagcgagaagaagagcctggccagccgcagcaatgtggcccaccacagcaaggtgaccctgtggagcggcagcctgagcagcgccatgaagctgatgcctggccggcaggccaaggaccctgagtgcaagacagaagattttgtgtcctgcatcgagaactacagaagaagaggccaggagctgtatgccagcctgtacaaggaccacgtgcagaggaggaaatgtggcaacatcaaggccgccaatgcctgggcccgcatccaggagcagctgtttggagagctgggcctgtggagccagggcgaggagaccaagccctgcagcccctgggagctggactggagggagggccctgccaggatgaggaagaggatcaagaggctgagccccctggaggccctgagcagcggccgccacaaggagagccaggacaagaatgaccacatcagccagaccaatgctgagaaccaggatgagctgaccctgcgggaggccgagggggagccagatgaggtgggcgtggactgcacccagctgaccttcttccctgccctgcacgagagcctgcacagcgaggacttcctggagctgtgccgggagcggcaggtgatcctgcaggagctgctggacaaggagaaggtgacccagaagttcagcctggtgattgtgcagggccacctggtgtctgaaggagtgctgctgtttggccaccagcacttctacatctgtgagaacttcaccctgagccccactggagatgtgtactgcaccaggcactgcctgagcaacatcagtgaccccttcatcttcaacctgtgcagcaaggacaggagcacagaccactacagctgccagtgccacagctatgctgacatgagggagctgcggcaggcccgcttcctgctgcaggacatcgccctggagatcttcttccacaacggctacagcaagttcctggtgttctacaacaatgacaggagcaaggccttcaagagcttctgcagcttccagcccagcctgaagggcaaggccaccagcgaggacaccctgagcctgcggcgctacccaggcagtgaccgcatcatgctgcagaagtggcagaagagggacatcagcaactttgagtacctgatgtacctgaacacagctgctggccgcacctgcaatgactacatgcagtaccctgtgttcccctgggtgctggccgactacaccagcgagaccctgaacctggccaaccccaagatcttccgggacctgagcaagcccatgggcgcccagaccaaggagaggaagctgaagttcatccagcgcttcaaggaggtggagaagacagaaggagacatgacagtgcagtgccactactacacccactacagcagcgccatcatcgtggccagctacctggtgaggatgccacccttcacccaggccttctgtgccctgcagggcggcagctttgatgtggccgacaggatgttccacagcgtgaagagcacctgggagagcgccagccgggagaacatgtctgatgtgcgggagctgaccccagagttcttctacctgcctgagttcctgaccaactgcaatggagtggagtttggctgcatgcaggacggcaccgtgctgggagatgtgcagctgcccccctgggcagatggagaccccaggaagttcatcagcctgcacaggaaggccctggagagtgactttgtgtctgccaacctgcaccactggattgacctgatcttcggctacaagcagcagggccctgctgctgtggatgctgtgaacatcttccacccctacttctatggagacaggatggacctgagcagcatcacagaccccctcatcaagagcaccatcctgggctttgtgagcaactttggccaggtgcccaagcagctgttcaccaagccccacccagccaggacagctgctgggaagcccctgcccgggaaggatgtgtccacccctgtgtccctgcccggccacccccagcccttcttctacagcctgcagagcctgcggcccagccaggtgacagtgaaggacatgtacctgttcagcctgggcagcgagagccccaagggggccatcggccacatcgtgtccacagagaagaccatcctggccgtggagaggaacaaggtgctgctgccccccctgtggaacagaaccttctcctggggctttgatgacttcagctgctgcctgggcagctatggcagtgacaaggtgctgatgacctttgagaacctggccgcctggggccgctgcctgtgtgctgtgtgccccagccccaccaccatcgtgaccagcggcaccagcacagtggtgtgtgtgtgggagctgtccatgaccaagggccggccccggggcctgcggctgcggcaggccctgtatggccacacccaggccgtgacctgcctggccgcctctgtgaccttcagcctgctggtgtctggcagccaggactgcacctgcatcctgtgggacctggaccacctgacccacgtgacccggctgcctgcccaccgggagggcatcagcgccatcaccatcagtgatgtgtctggcaccatcgtgtcctgtgccggggcccacctgagcctgtggaatgtgaatggccagcccctggccagcatcaccacagcctggggccctgagggcgccatcacctgctgctgcctgatggagggccctgcctgggacaccagccagatcatcatcaccggcagccaggacggcatggtgcgggtgtggaagacagaagatgtgaagatgtctgtgcccggcctgcagatgggcaggaagcgggaggccgctgaggccctggcccagcagtgccaggccgagggcggccgcggggactggggcctgagcagcgcctacagaagaaacccccagggcctgctgccccacagcagccagggccgggccagcggcaaccacagcagcgctgcccagcccagcccctggcccatgggcctgctgtag

SEQ ID NO: 176055 - DNA, 3159 bp, synthetic construct
  misc_feature 1..3159: note = Description of Artificial Sequence: Synthetic coding sequence
  source 1..3159: mol_type = other DNA
ctcaacagcgacctgctgtgccacggcatggaggccgaggacctgagcaaggcagaagatagaaatgaagatcctggcagcaagaatgaaggccagctggccgctgtgcagccagatgtgccccacggcggccagagcagcagccccacagccctgtgggacatgctggagaggaagttcctggagtaccagcagctgacccacaagagccccatcgagcggcagaagagcctgctgagcctgctgcccctcttcctgaaggcctgggagcacagcgtgggcatcatctgcttccccagcctgcagaggctggccgaggatgtgtctgaccagctggcccagcagctgcagaaggccctggtgggcaagccagctgagcaggcccggctggccgccggccagctgctgtggtggaagggagatgtggaccaggacggctacctgctgctgaagtctgtgtatgtgctgactggaacagattctgagaccctgggccgggtggccgagagcggcctgcctgccctgctgctgcagtgcctgtacctgttctttgtgttccccctggacaaggatgagctgctggagagtgacctgcaggtgcagaagatgtttgtgcagatgctgctgaacatctgcagcgacagccagggcctggagggcctgctgagcggcagcgagctgcagagcctgctgattgccaccacctgcctgcgggagcacagctgctgcttctggaaggagcccaccttctgtgtgctgcgggccatcagcaaggcccagaacctgagcatcatccagtacctgcaggccacagactgtgtgcggctgagcctgcagaacctgagccggctgacagacaccctgcctgcccctgaggtgtctgaggccgtgtccctcatcctgggctttgtgaaggacagctaccctgtgagcagcgccctcttcctggagtttgaaaattctgagggctaccccctgctgctgaaggtgctgctgcgctatgatggcctgacccagagcgaggtggacccccacctggaggagctgctgggcctggtggtgtggctgaccacctgtggccgctctgagctgaaggtgtttgacagcatcacctacccccagctggagggcttcaagttccaccacgaggccagcggcgtgacagtgaagaacctgcaggccttccaggtgctgcagaatgtgttccacaaggccagtgacagcgtgctgtgcatccaggtgctgagcgtcatccgcaccatgtgggcctggaatgccaggaacttcttcctgctggagtggaccctgcagcccatcagccagtttgtggagatcatgcccctgaagccagcccctgtgcaggagcacttcttccagctgctggaggccctggtgtttgagctgcactacgtgccccatgagatcctgaggaaggtgcagcacctgatcaaggagagccctggccccagctgcaccctgatggccctgcagagcatcctgagcattgctggaggagaccccctcttcacagacatcttccgggacagcggcctgctgggcctgctgctggcccagctgaggaagcaggccaagatcatgaggaagagcggcaacaaggtgtccaccccaggagtgcaggaccctgagcgggagctgacctgtgtgatgctgagaattgtggtgaccctgctgaagggctctgtgagaaatgctgtggtgctgaaggaccacggcatggtgcccttcatcaagatcttcctggatgatgagtgctaccgggaggccagcctgagcatcctggagcagctgagcgccatcaatgctgaggagtacatgagcatcatcgtgggcgccctgtgcagcagcacccagggcgagctgcagctgaagctggacctgctgaagagcctgctgcgcatcctggtgacccccaagggccgggccgccttccgggtgagcagcggcttcaacggcctgctgagcctgctgagtgacctggagggcagcctgcaggagccccccctgcaggcctggggcgctgtgagcccccggcagaccctggagctggtgctgtacaccctgtgtgctgtgtctgctgccctgcactgggaccctgtgaatggctacttcttcagaagaaatggcctgtttgagaagctggccgaggacctgtgcctgctgggctgcttcggggccctggaggaggagggcaacctgctgcgctcctgggtggacaccaaggcccggccctttgctgacctgctgggcacagccttcagcagcagcggcagcctgcccccacgcatccagagctgcctgcagatcctgggcttcctggacagcatggccagcggcaccctgcacctgcggggggacctgaaggagagcctgcggaccaagcagggccctgtggtggatgtgcagaagggggagaccggcagtgacccccagaggaacttcaagcagtggccagacctggaggagaggatggatgaaggagatgctgccatcatgcaccctggggtggtgtgcatcatggtgcggctgctgccccggctgtaccacgaggaccacccccagctgtctgaggagatccagtgcagcctggccagccacatccagagcctggtgaagtctgagaagaaccggcaggtgatgtgtgaggccggcctgctgggcaccctgatggccagctgccaccgggccctggtgaccagcggcagccccctgcacagccgcctcatccgcatctttgagaagctggccagccaggccatcgagccagatgtgctgcggcagttcctgggcctgggcatccccagcagcctgagcgccaccaccaagatcctggacagcagccacacccaccggggcaaccctggctgcagcggcagccagacagcccagggcctggccgagggcccctggccagctgccccagatgctggcctgcaccctggggtgacccaggccccccagcccctgggggagagccaggacagcaccacagccctgcagacagccctgagcctcatctccatgaccagccctgtggccggcagccagaccagcggcaagaccatctggctgaggaaccagctgctggagatgctgctgagcgtcatcagcagcccccagctgcacctgagcagcgagtag

SEQ ID NO: 176056 - DNA, 1875 bp, synthetic construct
  misc_feature 1..1875: note = Description of Artificial Sequence: Synthetic coding sequence
  source 1..1875: mol_type = other DNA
atgctgcagaagtggcagaagagggacatcagcaactttgagtacctgatgtacctgaacacagctgctggccgcacctgcaatgactacatgcagtaccctgtgttcccctgggtgctggccgactacaccagcgagaccctgaacctggccaaccccaagatcttccgggacctgagcaagcccatgggcgcccagaccaaggagaggaagctgaagttcatccagcgcttcaaggaggtggagaagacagaaggagacatgacagtgcagtgccactactacacccactacagcagcgccatcatcgtggccagctacctggtgaggatgccacccttcacccaggccttctgtgccctgcagggcggcagctttgatgtggccgacaggatgttccacagcgtgaagagcacctgggagagcgccagccgggagaacatgtctgatgtgcgggagctgaccccagagttcttctacctgcctgagttcctgaccaactgcaatggagtggagtttggctgcatgcaggacggcaccgtgctgggagatgtgcagctgcccccctgggcagatggagaccccaggaagttcatcagcctgcacaggaaggccctggagagtgactttgtgtctgccaacctgcaccactggattgacctgatcttcggctacaagcagcagggccctgctgctgtggatgctgtgaacatcttccacccctacttctacggggacaggatggacctgagcagcatcacagaccccctcatcaagagcaccatcctgggctttgtgagcaactttggccaggtgcccaagcagctgttcaccaagccccacccagccaggacagctgctgggaagcccctgcccgggaaggatgtgtccacccctgtgtccctgcccggccacccccagcccttcttctacagcctgcagagcctgcggcccagccaggtgacagtgaaggacatgtacctgttcagcctgggcagcgagagccccaagggggccatcggccacatcgtgtccacagagaagaccatcctggccgtggagaggaacaaggtgctgctgccccccctgtggaacagaaccttctcctggggctttgatgacttcagctgctgcctgggcagctatggcagtgacaaggtgctgatgacctttgagaacctggccgcctggggccgctgcctgtgtgctgtgtgccccagccccaccaccatcgtgaccagcggcaccagcacagtggtgtgtgtgtgggagctgtccatgaccaagggccggccccggggcctgcggctgcggcaggccctgtatggccacacccaggccgtgacctgcctggccgcctctgtgaccttcagcctgctggtgtctggcagccaggactgcacctgcatcctgtgggacctggaccacctgacccacgtgacccggctgcctgcccaccgggagggcatcagcgccatcaccatcagtgatgtgtctggcaccatcgtgtcctgtgccggggcccacctgagcctgtggaatgtgaatggccagcccctggccagcatcaccacagcctggggccctgagggcgccatcacctgctgctgcctgatggagggccctgcctgggacaccagccagatcatcatcaccggcagccaggacggcatggtgcgggtgtggaagacagaagatgtgaagatgtctgtgcccggccggcctgctggggaggagcccccagcccagccccccaccctgtccatggctgatggcacctccatgaagaggatgagcacccacaccaggagagctgagcagcacgccggcaactgtgacctggtgatgcccagctgcaccaggaactacacctag

SEQ ID NO: 176057 - DNA, 1704 bp, synthetic construct
  misc_feature 1..1704: note = Description of Artificial Sequence: Synthetic coding sequence
  source 1..1704: mol_type = other DNA
atggatgacaaggacatcgacaaggagctgcggcagaagctgaacttctcctactgtgaggagacagaaattgagggccagaagaaggtggaggagagccgggaggccagcagccagaccccagagaagggggaggtgcaggacagcgaggccaagggcaccccaccctggacccccctgagcaatgtgcatgagctggacaccagcagcgagaaggacaaggagagcccagaccagatcctgcggacccctgtgagccaccccctgaagtgcccagagaccccagcccagcctgacagccgcagcaagctgctgcccagcgacagccccagcacccccaagaccatgctgagccggctggtgatcagccccaccgggaagctgcccagccggggccccaagcacctgaagctgaccccagcccccctgaaggatgagatgaccagcctggccctggtgaacatcaaccccttcaccccagagagctacaagaagctgttcctgcagagcggcggcaagaggaagatccggggggacctggaggaggccggccctgaggagggcaaaggaggcctgcctgccaagagatgtgtgctgcgggagaccaacatggccagccgctatgagaaggagttcctggaggtggagaagattggagtgggggagtttggaacagtgtacaagtgcatcaagaggctggatggctgtgtgtatgccatcaagaggtccatgaagaccttcacagagctgagcaatgaaaattctgccctgcacgaggtgtatgcccatgctgtgctgggccaccacccccacgtggtgcgctactacagctcctgggccgaggatgaccacatgatcatccagaatgagtactgcaatggaggcagcctgcaggccgccatcagcgagaacaccaagagcggcaaccactttgaggagcccaagctgaaggacatcctgctgcagatcagcctgggcctgaactacatccacaacagctccatggtgcacctggacatcaagcccagcaacatcttcatctgccacaagatgcagagcgagagcagcggcgtgattgaggaggtggagaatgaggccgactggttcctgagcgccaacgtgatgtacaagatcggggacctgggccacgccaccagcatcaacaagcccaaggtggaggagggggacagccgcttcctggccaatgagatcctgcaggaggactaccgccacctgcccaaggctgacatctttgccctgggcctgaccatcgctgtggccgccggggctgagagcctgcccaccaacggggccgcctggcaccacatcagaaaaggaaacttcccagatgtgccccaggagctgtctgagagcttcagcagcctgctgaagaacatgatccagccagatgctgagcagaggcccagcgctgctgccctggccaggaacacagtgctgcggcccagcctgggcaagacagaggagctgcagcagcagctgaacctggagaagttcaagacagccaccctggagcgggagctgcgggaggcccagcaggcccagagcccccagggctacacccaccacggggacaccggggtgtctggcacccacacaggcagccgcagcaccaagaggctggtgggcggcaagagcgcccggagcagcagcttcaccagcggggagcgggagcccctgcactag

SEQ ID NO: 176058 - DNA, 846 bp, synthetic construct
  misc_feature 1..846: note = Description of Artificial Sequence: Synthetic coding sequence
  source 1..846: mol_type = other DNA
atggtgaccatcctgatgagggccatcaacagcctgggcatccacgtgctggacagcagccggcccacagaccccctgagccacagcagcaacagcagcagcgagcccgccatgtttattgaggacaaggctgtggacaccctggcctacctgagtgatggagatgcccgggccggcctgaatggcctgcagctggccgtgctggcccggctgagcagcaggaagatgttctgcaagaagagcggccagagctacagccccagccgggtgctgatcacagaaaatgatgtgaaggagggcctgcagaggagccacatcctgtatgacagagctggggaggagcactacaactgcatcagcgccctgcacaagtccatgaggggcagtgaccagaatgccagcctgtactggctggccaggatgctggagggcggggaggaccccctgtatgtggcccggcggctggtgcgctttgcctctgaagatattggcctggccgaccccagcgccctgacccaggccgtggccgcctaccagggctgccacttcatcggcatgccagaatgtgaggtgctgctggcccagtgtgtggtgtactttgcccgggcccccaagagcattgaggtgtacagcgcctacaacaacgtgaaggcctgcctgaggaaccaccagggccccctgccccctgtgcccctgcacctgagaaatgcccccacccggctgatgaaggacctgggctacggcaagggctacaagtacaaccccatgtacagcgagcctgtggaccaggagtacctgcctgaggagctgcggggcgtggacttcttcaagcagaggcgctgctag

SEQ ID NO: 176059 - DNA, 1338 bp, synthetic construct
  misc_feature 1..1338: note = Description of Artificial Sequence: Synthetic coding sequence
  source 1..1338: mol_type = other DNA
atgctgcagggcaagcccctggccgacaccatgaggccagacaccctgcaggactacttcggccagagcaaggctgtgggccaggacaccctgctgcggagcctgctggagaccaatgagatccccagcctcatcctgtggggccccccaggctgtgggaagaccaccctggcccacatcatcgccagcaacagcaagaagcacagcatccgctttgtgaccctgagcgccaccaatgccaagaccaatgatgtgagagatgtgatcaagcaggcccagaatgagaagagcttcttcaagaggaagaccatcctcttcattgatgagatccaccgcttcaacaagagccagcaggacaccttcctgccccacgtggagtgtggcaccatcaccctgattggagccaccacagagaaccccagcttccaggtgaatgctgccctgctgagccgctgccgggtgattgtgctggagaagctgcctgtggaggccatggtgaccatcctgatgagggccatcaacagcctgggcatccacgtgctggacagcagccggcccacagaccccctgagccacagcagcaacagcagcagcgagcccgccatgtttattgaggacaaggctgtggacaccctggcctacctgagtgatggagatgcccgggccggcctgaatggcctgcagctggccgtgctggcccggctgagcagcaggaagatgttctgcaagaagagcggccagagctacagccccagccgggtgctgatcacagaaaatgatgtgaaggagggcctgcagaggagccacatcctgtatgacagagctggggaggagcactacaactgcatcagcgccctgcacaagtccatgaggggcagtgaccagaatgccagcctgtactggctggccaggatgctggagggcggggaggaccccctgtatgtggcccggcggctggtgcgctttgcctctgaagatattggcctggccgaccccagcgccctgacccaggccgtggccgcctaccagggctgccacttcatcggcatgccagaatgtgaggtgctgctggcccagtgtgtggtgtactttgcccgggcccccaagagcattgaggtgtacagcgcctacaacaacgtgaaggcctgcctgaggaaccaccagggccccctgccccctgtgcccctgcacctgagaaatgcccccacccggctgatgaaggacctgggctacggcaagggctacaagtacaaccccatgtacagcgagcctgtggaccaggagtacctgcctgaggagctgcggggcgtggacttcttcaagcagaggcgctgctag

SEQ ID NO: 176060 - DNA, 1923 bp, synthetic construct
  misc_feature 1..1923: note = Description of Artificial Sequence: Synthetic coding sequence
  source 1..1923: mol_type = other DNA
atggaggtgtctggcccagaagatgaccccttcctgagccagctgcaccaggtgcagtgccctgtgtgccagcagatgatgcctgctgcccacatcaacagccacctggaccgctgcctgctgctgcaccctgctggccacgccgagcctgctgctggcagccacagagctggggagcgggccaagggccccagccccccaggggccaagagaagaaggctgtctgagagcagcgccctgaagcagcctgccacccccacagctgctgagagcagcgagggggagggggaggagggagatgatggaggagaaacagagagccgggagagctatgatgccccacccacccccagcggggcccggctcatcccagacttccctgtggcccggagcagcagccctggcaggaaaggaagtggcaagaggcctgctgctgctgctgctgctggcagcgccagccccaggtcctgggatgaggccgaggcccaggaggaggaggaggccgtgggagatggagatggagatggagatgctgatgctgatggagaagatgaccccggccactgggatgctgatgctgctgaggccgccacagccttcggggccagcggcggcggccggccccacccccgggccctggccgctgaggagatccggcagatgctgcagggcaagcccctggccgacaccatgaggccagacaccctgcaggactacttcggccagagcaaggctgtgggccaggacaccctgctgcggagcctgctggagaccaatgagatccccagcctcatcctgtggggccccccaggctgtgggaagaccaccctggcccacatcatcgccagcaacagcaagaagcacagcatccgctttgtgaccctgagcgccaccaatgccaagaccaatgatgtgagagatgtgatcaagcaggcccagaatgagaagagcttcttcaagaggaagaccatcctcttcattgatgagatccaccgcttcaacaagagccagcaggtgaatgctgccctgctgagccgctgcagggtcatcgtgctggagaagctgcctgtggaggccatggtgaccatcctgatgagggccatcaacagcctgggcatccacgtgctggacagcagccggcccacagaccccctgagccacagcagcaacagcagcagcgagcccgccatgtttattgaggacaaggctgtggacaccctggcctacctgagtgatggagatgcccgggccggcctgaatggcctgcagctggccgtgctggcccggctgagcagcaggaagatgttctgcaagaagagcggccagagctacagccccagccgggtgctgatcacagaaaatgatgtgaaggagggcctgcagaggagccacatcctgtatgaccgggccggggaggagcactacaactgcatcagcgccctgcacaagtccatgaggggcagtgaccagaatgccagcctgtactggctggccaggatgctggagggcggggaggaccccctgtatgtggcccggcggctggtgcgctttgccagcgaggacatcggcctggccgaccccagcgccctgacccaggccgtggccgcctaccagggctgccacttcatcggcatgccagaatgtgaggtgctgctggcccagtgtgtggtgtactttgcccgggcccccaagagcattgaggtgtacagcgcctacaacaacgtgaaggcctgcctgaggaaccaccagggccccctgccccctgtgcccctgcacctgagaaatgcccccacccggctgatgaaggacctgggctacggcaagggctacaagtacaaccccatgtacagcgagcctgtggaccaggagtacctgcctgaggagctgcggggcgtggacttcttcaagcagaggcgctgctag

SEQ ID NO: 176061 - DNA, 1998 bp, synthetic construct
  misc_feature 1..1998: note = Description of Artificial Sequence: Synthetic coding sequence
  source 1..1998: mol_type = other DNA
atggaggtgtctggcccagaagatgaccccttcctgagccagctgcaccaggtgcagtgccctgtgtgccagcagatgatgcctgctgcccacatcaacagccacctggaccgctgcctgctgctgcaccctgctggccacgccgagcctgctgctggcagccacagagctggggagcgggccaagggccccagccccccaggggccaagagaagaaggctgtctgagagcagcgccctgaagcagcctgccacccccacagctgctgagagcagcgagggggagggggaggagggagatgatggaggagaaacagagagccgggagagctatgatgccccacccacccccagcggggcccggctcatcccagacttccctgtggcccggagcagcagccctggcaggaaaggaagtggcaagaggcctgctgctgctgctgctgctggcagcgccagccccaggtcctgggatgaggccgaggcccaggaggaggaggaggccgtgggagatggagatggagatggagatgctgatgctgatggagaagatgaccccggccactgggatgctgatgctgctgaggccgccacagccttcggggccagcggcggcggccggccccacccccgggccctggccgctgaggagatccggcagatgctgcagggcaagcccctggccgacaccatgaggccagacaccctgcaggactacttcggccagagcaaggctgtgggccaggacaccctgctgcggagcctgctggagaccaatgagatccccagcctcatcctgtggggccccccaggctgtgggaagaccaccctggcccacatcatcgccagcaacagcaagaagcacagcatccgctttgtgaccctgagcgccaccaatgccaagaccaatgatgtgagagatgtgatcaagcaggcccagaatgagaagagcttcttcaagaggaagaccatcctcttcattgatgagatccaccgcttcaacaagagccagcaggacaccttcctgccccacgtggagtgtggcaccatcaccctgattggagccaccacagagaaccccagcttccaggtgaatgctgccctgctgagccgctgccgggtgattgtgctggagaagctgcctgtggaggccatggtgaccatcctgatgagggccatcaacagcctgggcatccacgtgctggacagcagccggcccacagaccccctgagccacagcagcaacagcagcagcgagcccgccatgtttattgaggacaaggctgtggacaccctggcctacctgagtgatggagatgcccgggccggcctgaatggcctgcagctggccgtgctggcccggctgagcagcaggaagatgttctgcaagaagagcggccagagctacagccccagccgggtgctgatcacagaaaatgatgtgaaggagggcctgcagaggagccacatcctgtatgacagagctggggaggagcactacaactgcatcagcgccctgcacaagtccatgaggggcagtgaccagaatgccagcctgtactggctggccaggatgctggagggcggggaggaccccctgtatgtggcccggcggctggtgcgctttgcctctgaagatattggcctggccgaccccagcgccctgacccaggccgtggccgcctaccagggctgccacttcatcggcatgccagaatgtgaggtgctgctggcccagtgtgtggtgtactttgcccgggcccccaagagcattgaggtgtacagcgcctacaacaacgtgaaggcctgcctgaggaaccaccagggccccctgccccctgtgcccctgcacctgagaaatgcccccacccggctgatgaaggacctgggctacggcaagggctacaagtacaaccccatgtacagcgagcctgtggaccaggagtacctgcctgaggagctgcggggcgtggacttcttcaagcagaggcgctgctag

SEQ ID NO: 176062 - DNA, 4299 bp, synthetic construct
  misc_feature 1..4299: note = Description of Artificial Sequence: Synthetic coding sequence
  source 1..4299: mol_type = other DNA
atgtctgagaagaagctggagaccacagcccagcagaggaagtgcccagagtggatgaatgtgcagaacaagagatgtgctgtggaggagaggaaggcctgtgtgaggaagtctgtgtttgaagatgacctgcccttcctggagttcaccggcagcatcgtgtacagctatgatgccagtgactgcagcttcctgtctgaggacatctccatgagcctgagtgatggagatgtggtgggctttgacatggagtggccacccctgtacaacagaggcaagctgggcaaggtggccctgatccagctgtgtgtgtctgagagcaagtgctacctgttccacgtgtcctccatgtctgtgttcccccagggcctgaagatgctgctggagaacaaggctgtgaagaaggccggcgtgggcatcgagggggaccagtggaagctgctgcgggactttgacatcaagctgaagaactttgtggagctgacagatgtggccaacaagaagctgaagtgcacagagacctggagcctgaacagcctggtgaagcacctgctgggcaagcagctgctgaaggacaagagcatccgctgcagcaactggagcaagttccccctgacagaggaccagaagctgtatgctgccacagatgcctatgccggcttcatcatctacagaaacctggagatcctggatgacacagtgcagagatttgccatcaacaaggaggaggagatcctgctgagtgacatgaacaagcagctgaccagcatcagcgaggaggtgatggacctggccaagcacctgccccacgccttcagcaagctggagaaccccaggagagtgtccatcctgctgaaggacatcagcgagaacctgtacagcctgcggaggatgatcatcggcagcaccaacattgaaacagagctgcggcccagcaacaacctgaacctgctgagctttgaggacagcaccactggaggagtgcagcagaagcagatccgggagcacgaggtgctgattcatgtggaggatgagacctgggaccccaccctggaccacctggccaagcatgatggagaagatgtgctgggcaacaaggtggagaggaaagaagatggctttgaagatggagtggaggacaacaagctgaaggagaacatggagcgggcctgcctgatgagcctggacatcacagagcacgagctgcagatcctggagcagcagagccaggaggagtacctgagtgacatcgcctacaagagcacagagcacctgagccccaatgacaatgaaaatgacaccagctatgtgattgaaagtgatgaggacctggagatggagatgctgaagcacctgagccccaatgacaatgaaaatgacaccagctatgtgattgaaagtgatgaggacctggagatggagatgctgaagagcctggagaacctgaacagcggcaccgtggagcccacccacagcaagtgcctgaagatggagaggaacctgggcctgcccaccaaggaggaggaggaggatgatgaaaatgaggccaatgaaggagaagaagatgatgacaaggacttcctgtggccagccccaaatgaggagcaggtgacctgcctgaagatgtacttcggccacagcagcttcaagcctgtgcagtggaaggtgatccacagcgtgctggaggagcggcgggacaacgtggccgtgatggccaccggctacggcaagagcctgtgcttccagtacccacctgtgtatgtgggcaagattggcctggtgatcagccccctcatcagcctgatggaggaccaggtgctgcagctgaagatgagcaacatcccagcctgcttcctgggcagcgcccagagtgaaaatgtgctgacagacatcaagctgggcaagtaccgcatcgtgtatgtgaccccagagtactgcagcggcaacatgggcctgctgcagcagctggaggccgacatcggcatcaccctgattgctgtggatgaggcccactgcatcagcgagtggggccatgacttccgggacagcttcaggaagctgggcagcctgaagacagccctgcccatggtgcccatcgtggccctgacagccacagccagcagcagcatccgggaggacatcgtgcgctgcctgaacctgaggaacccccagatcacctgcaccggctttgaccggcccaacctgtacctggaggtgcggaggaagacaggcaacatcctgcaggacctgcagcccttcctggtgaagaccagcagccactgggagtttgagggccccaccatcatctactgccccagcaggaagatgacccagcaggtgactggagagctgaggaagctgaacctgagctgtggcacctaccacgccggcatgtccttcagcaccaggaaggacatccaccacagatttgtgagagatgagatccagtgtgtgattgccaccatcgccttcggcatgggcatcaacaaggctgacatccggcaggtgatccactatggagcccccaaggacatggagagctactaccaggagatcggccgggccggcagagatggcctgcagagcagctgccacgtgctgtgggccccagctgacatcaacctgaacagacacctgctgacagagatcagaaatgagaagttccggctgtacaagctgaagatgatggccaagatggagaagtacctgcacagcagccgctgccggcggcagatcatcctgagccactttgaggacaagcaggtgcagaaggccagcctgggcatcatgggcacagagaagtgctgtgacaactgccgcagccggctggaccactgctacagcatggatgacagcgaggacacctcctgggactttggcccccaggccttcaagctgctgtctgctgtggacatcctgggggagaagtttggaattggcctgcccatcctcttcctgcggggcagcaacagccagaggctggccgaccagtacagaagacacagcctgtttggcaccgggaaggaccagacagagagctggtggaaggccttcagccggcagctgatcacagagggcttcctggtggaggtgagccgctacaacaagttcatgaagatctgtgccctgaccaagaagggcaggaactggctgcacaaggccaacacagagagccagagcctcatcctgcaggccaatgaggagctgtgccccaagaagctgctgctgcccagcagcaagacagtgagcagcggcaccaaggagcactgctacaaccaggtgcctgtggagctgagcacagagaagaagagcaacctggagaagctgtacagctacaagccctgtgacaagatcagcagcggcagcaacatcagcaagaagagcatcatggtgcagagccctgagaaggcctacagcagcagccagcctgtgatcagcgcccaggagcaggagacccagatcgtgctgtatggcaagctggtggaggcccggcagaagcacgccaacaagatggatgtgcccccagccatcctggccaccaacaagatcctggtggacatggccaagatgaggcccaccaccgtggagaatgtgaagagaattgatggagtgtctgagggcaaggccgccatgctggcccccctgctggaggtgatcaagcacttctgccagaccaacagcgtgcagacagacctcttcagcagcaccaagccccaggaggagcagaagaccagcctggtggccaagaacaagatctgcaccctgagccagagcatggccatcacctacagcctcttccaggagaagaagatgcccctgaagagcattgctgagagccgcatcctgcccctgatgaccatcggcatgcacctgagccaggccgtgaaggccggctgccccctggacctggagcgggccggcctgaccccagaggtgcagaagatcatcgcagatgtgatcagaaatcctcctgtgaacagcgacatgagcaagatcagcctcatccgcatgctggtgcctgaaaatattgacacctacctgatccacatggccatcgagatcctgaagcacggcccagattctggcctgcagcccagctgtgatgtgaacaagaggcgctgcttccctggcagcgaggagatctgcagcagcagcaagaggagcaaggaggaggtgggcatcaacacagagaccagcagcgctgagaggaagaggcggctgcctgtgtggtttgccaagggcagtgacaccagcaagaagctgatggacaagaccaagaggggcggcctcttctcctag

SEQ ID NO: 176063 - DNA, 738 bp, synthetic construct
  misc_feature 1..738: note = Description of Artificial Sequence: Synthetic coding sequence
  source 1..738: mol_type = other DNA
atggcccaggaggagggcggcagcctgcctgaggtgcgggcccgggtgcgggccgcccacggcatcccagacctggcccagaagctgcacttctatgaccgctgggccccagactatgaccaggatgtggccaccctgctgtaccgggccccccggctggccgtggactgcctgacccaggccctgcccggccccccccacagcgccctgatcctggatgtggcctgtggcaccggcctggtggccgctgagctgcgggcccctggcttcctgcagctgcacggcgtggatggcagccctggcatgctggagcaggcccaggcccctggcctgtaccagaggctgagcctgtgcaccctgggccaggagcccctgcccagccctgagggcacctttgatgctgtgctgattgtgggcgccctgagtgatggccaggtgccctgcaatgccatccctgagctgcacgtgaccaagccaggcggcctggtgtgcctgaccaccaggaccaacagcagcaacctgcagtacaaggaggccctggaggccaccctggaccggctggagcaggccggcatgtgggagggcctggtggcctggcctgtggaccggctgtggacagctggctcctggctgccccccagctggcgctggtacccagccagcctgcccaggatggccagcagccctgccctgagcacctgcacagaaagtggaagaagaccccggctgaggaagtag

SEQ ID NO: 176064 - DNA, 798 bp, synthetic construct
  misc_feature 1..798: note = Description of Artificial Sequence: Synthetic coding sequence
  source 1..798: mol_type = other DNA
atggaggccctgccccctgtgcgcagcagcctgctgggcatcctgctgcaggtgacccggctgtctgtgctgctggtgcagaacagagaccacctgtacaacttcctgctgctgaagatcaacctcttcaaccactgggtgtctggcctggcccaggaggcccggggcagctgcaactggcaggcccacctgcccctgggcgctgctgcctgccccctgggccaggccctgtgggccggcctggccctgatccaggtgcctgtgtggctggtgctgcagggcccccggctgatgtgggccggcatgtggggcagcaccaagggcctgggcctggccctgctgagcgcctgggagcagctgggcctgtctgtggccatctggacagacctcttcctgagctgcctgcacggcctgatgctggtggccctgctgctggtggtggtgacctggagggtgtgccagaagagccactgcttccggctgggccggcagctgagcaaggccctgcaggtgaactgtgtggtgaggaagctgctggtgcagctgcggcggctgtactggtgggtggagaccatgacagccctgacctcctggcacctggcctacctgatcacctggaccacctgcctggccagccacctgctgcaggccgcctttgagcacaccacccagctggccgaggcccaggaggtggagccccaggaggtgtctggcagcagcctgctgcccagcctgagcgccagcagtgacagcgagagcggcaccgtgctgcctgagcaggagaccccccgggagtag

SEQ ID NO: 176065 - DNA, 456 bp, synthetic construct
  misc_feature 1..456: note = Description of Artificial Sequence: Synthetic coding sequence
  source 1..456: mol_type = other DNA
atgaccaatgaggagcccctgcccaagaaggtgcggctgtctgaaacagacttcaaggtgatggccagagatgagctgatcctgcgctggaagcagtatgaggcctacgtgcaggccctggagggcaagtacacagacctgaacagcaatgatgtgacaggcctgcgggagagcgaggagaagctgaagcagcagcagcaggagagcgcccggcgggagaacatcctggtgatgaggctggccaccaaggagcaggagatgcaggagtgcaccacccagatccagtacctgaagcaggtgcagcagcccagcgtggcccagctgcggagcaccatggtggaccctgccatcaacctcttcttcctgaagatgaagggggagctggagcagaccaaggacaagctggagcaggcccagaatgagctgagcgcctggaagttcaccccagacagatag

SEQ ID NO: 176066 - DNA, 1191 bp, synthetic construct
  misc_feature 1..1191: note = Description of Artificial Sequence: Synthetic coding sequence
  source 1..1191: mol_type = other DNA
atgaccaatgaggagcccctgcccaagaaggtgcggctgtctgaaacagacttcaaggtgatggccagagatgagctgatcctgcgctggaagcagtatgaggcctacgtgcaggccctggagggcaagtacacagacctgaacagcaatgatgtgacaggcctgcgggagagcgaggagaagctgaagcagcagcagcaggagagcgcccggcgggagaacatcctggtgatgaggctggccaccaaggagcaggagatgcaggagtgcaccacccagatccagtacctgaagcaggtgcagcagcccagcgtggcccagctgcggagcaccatggtggaccctgccatcaacctcttcttcctgaagatgaagggggagctggagcagaccaaggacaagctggagcaggcccagaatgagctgagcgcctggaagttcaccccagacagccagacaggcaagaagctgatggccaagtgcaggatgctgatccaggagaaccaggagctgggccggcagctgagccagggccgcatcgcccagctggaggccgagctggccctgcagaagaagtacagcgaggagctgaagagcagccaggatgagctgaatgacttcatcatccagctggatgaggaggtggagggcatgcagagcaccatcctggtgctgcagcagcagctgaaggagacccggcagcagctggcccagtaccagcagcagcagagccaggccagcgcccccagcaccagcaggaccacagccagcgagcctgtggagcagagcgaggccaccagcaaggactgcagccggctgaccaacggccccagcaatggcagcagcagccggcagaggaccagcggcagcggcttccaccgggagggcaacaccacagaagatgacttccccagcagccctggaaatggaaacaagagcagcaacagcagcgaggagaggacaggccggggcggcagcggctacgtgaaccagctgtctgctggctatgagagcgtggacagccccactggaagtgagaacagcctgacccaccagagcaatgacacagacagcagccatgacccccaggaggagaaggctgtgtctggaaaaggaaacagaacagtgggcagccgccacgtgcagaatggcctggacagctctgtgaatgtgcagggctctgtgctgtag

SEQ ID NO: 176067 - DNA, 1083 bp, synthetic construct
  misc_feature 1..1083: note = Description of Artificial Sequence: Synthetic coding sequence
  source 1..1083: mol_type = other DNA
atgaatgcccccctgggcggcatctggctgtggctgcccctgctgctgacctggctgaccccagaggtgaacagctcctggtggtacatgagggccactggaggcagcagccgggtgatgtgtgacaacgtgcccggcctggtgagcagccagaggcagctgtgccaccgccacccagatgtgatgagggccatcagccagggcgtggccgagtggacagctgagtgccagcaccagttccggcagcaccgctggaactgcaacaccctggaccgggaccacagcctgtttggccgggtgctgctgcggagcagccgggagagcgcctttgtgtatgccatcagcagcgctggggtggtgtttgccatcacccgggcctgcagccagggcgaggtgaagagctgcagctgtgaccccaagaagatgggcagcgccaaggacagcaagggcatctttgactggggcggctgcagcgacaacattgattatggcatcaagtttgcccgggcctttgtggatgccaaggagaggaagggcaaggatgcccgggccctgatgaacctgcacaacaacagagctggcaggaaggctgtgaagcgcttcctgaagcaggagtgcaagtgccacggcgtgtctggcagctgcaccctgcggacctgctggctggccatggctgacttcaggaagacaggagactacctgtggaggaagtacaatggagccatccaggtggtgatgaaccaggacggcaccggcttcaccgtggccaatgaacgcttcaagaagcccaccaagaatgacctggtgtactttgagaacagcccagactactgcatccgggaccgggaggccggcagcctgggcacagctggccgggtgtgcaacctgaccagccggggcatggacagctgtgaggtgatgtgctgcggccggggctatgacaccagccacgtgaccaggatgaccaagtgtggctgcaagttccactggtgctgtgctgtgcgctgccaggactgcctggaggccctggatgtgcacacctgcaaggcccccaagaatgctgactggaccacagccacctag

SEQ ID NO: 176068 - DNA, 1113 bp, synthetic construct
  misc_feature 1..1113: note = Description of Artificial Sequence: Synthetic coding sequence
  source 1..1113: mol_type = other DNA
atgggcctgtgggccctgctgcccggctgggtgtctgccaccctgctgctggccctggccgccctgcctgctgccctggccgccaacagcagcggccgctggtggggcatcgtgaatgtggccagcagcaccaacctgctgacagacagcaagagcctgcagctggtgctggagcccagcctgcagctgctgagcaggaagcagaggaggctcatccggcagaaccctggcatcctgcacagcgtgtctgggggcctgcagagcgctgtgcgggagtgcaagtggcagttcaggaacagacgctggaactgccccacagcccctggcccccacctgtttgggaagatcgtgaacagaggctgccgggagacagccttcatctttgccatcaccagcgctggggtgacccacagcgtggcccggagctgcagcgagggcagcattgagagctgcacctgtgactacagaagaagaggccctgggggccctgactggcactggggcggctgcagcgacaacatcgactttggccgcctgtttggccgggagtttgtggacagcggggagaagggccgggacctgcgcttcctgatgaacctgcacaacaatgaagctggccgcaccaccgtcttcagcgagatgaggcaggagtgcaagtgccacggcatgagcggcagctgcaccgtgaggacctgctggatgaggctgcccaccctgcgggctgtgggagatgtgctgcgggacagatttgatggagccagccgggtgctgtatggcaacagaggcagcaacagagccagcagagctgagctgctgcggctggagccagaagatcctgcccacaagccacccagcccccatgacctggtgtactttgagaagagccccaacttctgcacctacagcggccgcctgggcacagctggaacagctggccgggcctgcaacagcagcagccctgccctggatggctgtgagctgctgtgctgcggccggggccacaggaccaggacccagagggtgacagagcgctgcaactgcaccttccactggtgctgccacgtgtcctgcaggaactgcacccacaccagggtgctgcacgagtgcctgtag

SEQ ID NO: 176069 - DNA, 588 bp, synthetic construct
  misc_feature 1..588: note = Description of Artificial Sequence: Synthetic coding sequence
  source 1..588: mol_type = other DNA
tggcactggggcggctgcagcgacaacatcgactttggccgcctgtttggccgggagtttgtggacagcggggagaagggccgggacctgcgcttcctgatgaacctgcacaacaatgaagctggccgcaccaccgtcttcagcgagatgaggcaggagtgcaagtgccacggcatgagcggcagctgcaccgtgaggacctgctggatgaggctgcccaccctgcgggctgtgggagatgtgctgcgggacagatttgatggagccagccgggtgctgtatggcaacagaggcagcaacagagccagcagagctgagctgctgcggctggagccagacctggtgtactttgagaagagccccaacttctgcacctacagcggccgcctgggcacagctggaacagctggccgggcctgcaacagcagcagccctgccctggatggctgtgagctgctgtgctgcggccggggccacaggaccaggacccagagggtgacagagcgctgcaactgcaccttccactggtgctgccacgtgtcctgcaggaactgcacccacaccagggtgctgcatgaatgtctgtag

SEQ ID NO: 176070 - DNA, 1254 bp, synthetic construct
  misc_feature 1..1254: note = Description of Artificial Sequence: Synthetic coding sequence
  source 1..1254: mol_type = other DNA
atgggcagcgcccacccccggccctggctgcggctgcggccccagccccagcccaggcctgccctgtgggtgctgctcttcttcctgctgctgctggccgccgccatgcccaggtctgccccaaatgacatcctggacctgcggctgcccccagagcctgtgctgaatgccaacacagtgtgcctgaccctgcccggcctgagccggcggcagatggaggtgtgtgtgcgccacccagatgtggccgccagcgccatccagggcatccagatcgccatccacgagtgccagcaccagttccgggaccagcgctggaactgcagcagcctggagaccaggaacaagatcccctatgagagccccatcttcagccggggcttccgggagagcgcctttgcctatgccatcgctgctgctggggtggtgcatgctgtgtccaatgcctgtgccctgggcaagctgaaggcctgtggctgtgatgccagcagaagaggagatgaggaggccttccggaggaagctgcaccggctgcagctggatgccctgcagaggggcaagggcctgagccacggcgtgcctgagcacccagccctgcccacagccagccctggcctgcaggacagctgggagtggggcggctgcagcccagacatgggctttggagagcgcttcagcaaggacttcctggacagccgggagccccaccgggacatccacgccaggatgaggctgcacaacaacagagtgggccggcaggccgtgatggagaacatgagaagaaaatgtaaatgtcatggcaccagcggcagctgccagctgaagacctgctggcaggtgaccccagagttcagaacagtgggcgccctgctgcggagccgcttccaccgggccaccctcatccggccccacaacagaaatggaggccagctggagcccggccctgctggggcccccagccctgcccctggggcccctggccccaggagaagagccagccctgctgacctggtgtactttgagaagagcccagacttctgtgagcgggagccccggctggacagcgctggcaccgtgggccgcctgtgcaacaagagcagcgctggcagtgatggctgcggctccatgtgctgcggccggggccacaacatcctgcggcagaccaggtctgagcgctgccactgccgcttccactggtgctgctttgtggtgtgtgaggagtgccgcatcacagagtgggtgtctgtgtgcaagtag

SEQ ID NO: 176071 - DNA, 1170 bp, synthetic construct
  misc_feature 1..1170: note = Description of Artificial Sequence: Synthetic coding sequence
  source 1..1170: mol_type = other DNA
atgctggaggagccccggccccggcccccacccagcggcctggccggcctgctcttcctggccctgtgcagccgggccctgagcaatgagatcctgggcctgaagctgcctggagagccccccctgacagccaacacagtgtgcctgaccctgagcggcctgagcaagaggcagctgggcctgtgcctgaggaacccagatgtgacagccagcgccctgcagggcctgcacatcgctgtgcatgagtgccagcaccagctgcgggaccagcgctggaactgcagcgccctggagggcggcggccgcctgccccaccacagcgccatcctgaagaggggcttccgggagagcgccttctccttctccatgctggccgccggcgtgatgcatgctgtggccacagcctgcagcctgggcaagctggtgtcctgtggctgcggctggaagggcagcggggagcaggaccggctgcgggccaagctgctgcagctgcaggccctgagccggggcaagagcttcccccacagcctgcccagccctggccctggcagcagccccagccctggcccccaggacacctgggagtggggcggctgcaaccacgacatggactttggagagaagttcagccgggacttcctggacagccgggaggccccccgggacatccaggccaggatgaggatccacaacaacagagtgggccggcaggtggtgacagagaacctgaagaggaagtgcaagtgccacggcaccagcggcagctgccagttcaagacctgctggagggctgcccctgagttccgggctgtgggcgccgccctgcgggagcggctgggccgggccatcttcatcgacacccacaacagaaacagcggggccttccagccccggctgcggccccggcggctgtctggagagctggtgtactttgagaagagcccagacttctgtgagcgggaccccaccatgggcagccctggcacccggggccgggcctgcaacaagaccagccggctgctggatggctgcggcagcctgtgctgcggccggggccacaacgtgctgcggcagaccagggtggagcgctgccactgccgcttccactggtgctgctacgtgctgtgtgatgagtgcaaggtgacagagtgggtgaatgtgtgcaagtag

SEQ ID NO: 176072 - DNA, 576 bp, synthetic construct
  misc_feature 1..576: note = Description of Artificial Sequence: Synthetic coding sequence
  source 1..576: mol_type = other DNA
atgctggaggagccccggccccggcccccacccagcggcctggccggcctgctcttcctggccctgtgcagccgggccctgagcaatgagatcctgggcctgaagctgcctggagagccccccctgacagccaacacagtgtgcctgaccctgagcggcctgagcaagaggcagctgggcctgtgcctgaggaacccagatgtgacagccagcgccctgcagggcctgcacatcgctgtgcatgagtgccagcaccagctgcgggaccagcgctggaactgcagcgccctggagggcggcggccgcctgccccaccacagcgccatcctgaagaggggcttccgggagagcgccttctccttctccatgctggccgccggcgtgatgcatgctgtggccacagcctgcagcctgggcaagctggtgtcctgtggctgcggctggaagggcagcggggagcaggaccggctgcgggccaagctgctgcagctgcaggccctgagccggggcaagctgcccggcaccagcagacatgaatgtgagagcaccaccaccggctggggcgcccgctggtag

SEQ ID NO: 176073 - DNA, 309 bp, synthetic construct
  misc_feature 1..309: note = Description of Artificial Sequence: Synthetic coding sequence
  source 1..309: mol_type = other DNA
atgctggaggagccccggccccggcccccacccagcggcctggccggcctgctcttcctggccctgtgcagccgggccctgagcaatgagatcctgggcctgaagctgcctggagagccccccctgacagccaacacagtgtgcctgaccctgagcggcctgagcaagaggcagctgggcctgtgcctgaggaacccagatgtgacagccagcgccctgcagggcctgcacatcgctgtgcatgagtgccagcaccagctgcgggaccagcgctggaactgcagcgccctggagggcggcggccgctag

SEQ ID NO: 176074 - DNA, 354 bp, synthetic construct
  misc_feature 1..354: note = Description of Artificial Sequence: Synthetic coding sequence
  source 1..354: mol_type = other DNA
atggccctggagaccgtgcccaaggacctgcggcacctgcgggcctgcctgctgtgcagcctggtgaagaccatcgaccagtttgaatatgatggctgtgacaactgtgatgcctacctgcagatgaagggcaaccgggagatggtgtatgactgcaccagcagcagctttgatggcatcatcgccatgatgagcccagaagattcctgggtgtccaagtggcagagggtgagcaacttcaagccaggagtgtatgctgtgtctgtgacaggccgcctgccccagggcatcgtgcgggagctgaagagcagaggagtggcctacaagagccgggacacagccatcaagacctag

SEQ ID NO: 176075 - DNA, 1059 bp, synthetic construct
  misc_feature 1..1059: note = Description of Artificial Sequence: Synthetic coding sequence
  source 1..1059: mol_type = other DNA
atggcccccctgggctacttcctgctgctgtgcagcctgaagcaggccctgggcagctaccccatctggtggagcctggccgtgggcccccagtacagcagcctgggcagccagcccatcctgtgtgccagcatccctggcctggtgcccaagcagctgcgcttctgcagaaattatgtggagatcatgcccagcgtggccgagggcatcaagattggcatccaggagtgccagcaccagttccggggccgccgctggaactgcaccaccgtgcatgacagcctggccatcttcggccctgtgctggacaaggccacccgggagagcgcctttgtgcacgccatcgccagcgctggggtggcctttgctgtgaccaggagctgtgccgagggcacagctgccatctgtggctgcagcagccgccaccagggcagccctgggaagggctggaagtggggcggctgcagtgaagatattgaatttggaggcatggtgtcccgggagtttgctgatgcccgggagaacagaccagatgcccggagcgccatgaacagacacaacaatgaggccggccggcaggccatcgccagccacatgcacctgaagtgcaagtgccacggcctgagcggcagctgtgaggtgaagacctgctggtggagccagcctgacttccgggccatcggggacttcctgaaggacaagtatgattctgccagcgagatggtggtggagaagcaccgggagagccggggctgggtggagaccctgcggccccgctacacctacttcaaggtgcccacagagcgggacctggtgtactatgaggccagccccaacttctgtgagcccaaccctgagaccggcagctttggcacccgggacaggacctgcaatgtgagcagccacggcattgatggctgtgacctgctgtgctgcggccggggccacaatgcccgggcagagaggagaagagagaagtgccgctgtgtgttccactggtgctgctacgtgtcctgccaggagtgcaccagggtgtatgatgtgcacacctgcaagtag

SEQ ID NO: 176076 - DNA, 1158 bp, synthetic construct
  misc_feature 1..1158: note = Description of Artificial Sequence: Synthetic coding sequence
  source 1..1158: mol_type = other DNA
atggcccccctgggctacttcctgctgctgtgcagcctgaagcaggccctgggcagctaccccatctggtggagcctggccgtgggcccccagtacagcagcctgggcagccagcccatcctgtgtgccagcatccctggcctggtgcccaagcagctgcgcttctgcagaaattatgtggagatcatgcccagcgtggccgagggcatcaagattggcatccaggagtgccagcaccagttccggggccgccgctggaactgcaccaccgtgcatgacagcctggccatcttcggccctgtgctggacaaggccacccgggagagcgcctttgtgcacgccatcgccagcgctggggtggcctttgctgtgaccaggagctgtgccgagggcacagctgccatctgtggctgcagcagccgccaccagggcagccctgggaagggctggaagtggggcggctgcagtgaagatattgaatttggaggcatggtgtcccgggagtttgctgatgcccgggagaacagaccagatgcccggagcgccatgaacagacacaacaatgaggccggccggcaggccatcgccagccacatgcacctgaagtgcaagtgccacggcctgagcggcagctgtgaggtgaagacctgctggtggagccagcctgacttccgggccatcggggacttcctgaaggacaagtatgattctgccagcgagatggtggtggagaagcaccgggagagccggggctgggtggagaccctgcggccccgctacacctacttcaaggtgcccacagagcgggacctggtgtactatgaggccagccccaacttctgtgagcccaaccctgagaccggcagctttggcacccgggacaggacctgcaatgtgagcagccacggcattgatggctgtgacctgctgtgctgcggccggggccacaatgcccgggcagagaggagaagagagaagtgccgctgtgtgttccactggtgctgctacgtgtcctgccaggagtgcaccagggtgtatgatgtgcacacctgcaagaaccctggcagccgggccggcaacagcgcccaccagcccccccacccccagccccctgtgcgcttccacccccccctgcggcgggccggcaaggtgccctag

SEQ ID NO: 176077 - DNA, 1056 bp, synthetic construct
  misc_feature 1..1056: note = Description of Artificial Sequence: Synthetic coding sequence
  source 1..1056: mol_type = other DNA
atgagccccaggagctgcctgcggagcctgcggctgctggtgtttgctgtgttttctgctgctgccagcaactggctgtacctggccaagctgagctctgtgggcagcatcagcgaggaggagacctgtgagaagctgaagggcctcatccagaggcaggtgcagatgtgcaagaggaacctggaggtgatggacagcgtgcggcggggggcccagctggccatcgaggagtgccagtaccagttcaggaacagacgctggaactgcagcaccctggacagcctgcctgtgtttgggaaggtggtgacccagggcacccgggaggccgcctttgtgtatgccatcagcagcgctggggtggcctttgctgtgacccgggcctgcagcagcggggagctggagaagtgtggctgtgacagaacagtgcatggagtgagcccccagggcttccagtggagcggctgcagcgacaacatcgcctatggagtggccttcagccagagctttgtggatgtgcgggagaggagcaaaggagccagcagcagccgggccctgatgaacctgcacaacaatgaagctggcaggaaggccatcctgacccacatgagggtggagtgcaagtgccacggcgtgtctggcagctgtgaggtgaagacctgctggagggctgtgccccccttccggcaggtgggccacgccctgaaggagaagtttgatggagccacagaggtggagcccaggagagtgggcagcagccgggccctggtgcccagaaatgcccagttcaagccccacacagatgaggacctggtgtacctggagcccagcccagacttctgtgagcaggacatgagaagtggagtgctgggcacccggggccgcacctgcaacaagaccagcaaggccattgatggctgtgagctgctgtgctgcggccggggcttccacacagcccaggtggagctggccgagcgctgcagctgcaagttccactggtgctgctttgtgaagtgccggcagtgccagaggctggtggagctgcacacctgcaggtag

SEQ ID NO: 176078 - DNA, 528 bp, synthetic construct
  misc_feature 1..528: note = Description of Artificial Sequence: Synthetic coding sequence
  source 1..528: mol_type = other DNA
atgagccccaggagctgcctgcggagcctgcggctgctggtgtttgctgtgttttctgctgctgccagcaactggctgtacctggccaagctgagctctgtgggcagcatcagcgaggaggagacctgtgagaagctgaagggcctcatccagaggcaggtgcagatgtgcaagaggaacctggaggtgatggacagcgtgcggcggggggcccagctggccatcgaggagtgccagtaccagttcaggaacagacgctggaactgcagcaccctggacagcctgcctgtgtttgggaaggtggtgacccagggcggcaaggcctggcacggcggggacagcggctgccacctgctgacagagagccgcagcggggagaggacccagaggaggaaggagggcggcagcctgggccagtgctggccagaggccatcgtgggcacccaggaccccatgaggagccccccctacctgtggggcaggaaccagggcggcacccacacaggcagcgccagcgagggccactag

SEQ ID NO: 176079 - DNA, 453 bp, synthetic construct
  misc_feature 1..453: note = Description of Artificial Sequence: Synthetic coding sequence
  source 1..453: mol_type = other DNA
tgatacctggccaagctgagctctgtgggcagcatcagcgaggaggagacctgtgagaagctgaagggcctcatccagaggcaggtgcagatgtgcaagaggaacctggaggtgatggattctgtgagaagaggagcccagctggccatcgaggagtgccagtaccagttcaggaacagacgctggaactgcagcaccctggacagcctgcctgtgtttgggaaggtggtgacccagggcggcaaggcctggcatggaggagacagcggctgccacctgctgacagagagccgctctggagagaggacccagaggaggaaggagggcggcagcctgggccagtgctggccagaggccatcgtgggcacccaggaccccatgaggagccccccctacctgtggggcaggaaccagggcggcacccacactggaagtgccagcgagggccactag

SEQ ID NO: 176080 - DNA, 159 bp, synthetic construct
  misc_feature 1..159: note = Description of Artificial Sequence: Synthetic coding sequence
  source 1..159: mol_type = other DNA
atgtgcaagaggaacctggaggtgatggattctgtgagaagaggagcccagctggccatcgaggagtgccagtaccagttcaggaacagacgctggaactgcagcaccctggacagcctgcctgtgtttgggaaggtggtgacccagggcggcaagtag

SEQ ID NO: 176081 - DNA, 891 bp, synthetic construct
  misc_feature 1..891: note = Description of Artificial Sequence: Synthetic coding sequence
  source 1..891: mol_type = other DNA
atgtgcaagaggaacctggaggtgatggattctgtgagaagaggagcccagctggccatcgaggagtgccagtaccagttcaggaacagacgctggaactgcagcaccctggacagcctgcctgtgtttgggaaggtggtgacccagggcacccgggaggccgcctttgtgtatgccatcagcagcgctggggtggcctttgctgtgacccgggcctgcagcagtggagagctggagaagtgtggctgtgacagaacagtgcacggcgtgagcccccagggcttccagtggagcggctgcagcgacaacatcgcctacggcgtggccttcagccagagctttgtggatgtgcgggagaggagcaagggggccagcagcagccgggccctgatgaacctgcacaacaatgaggccggcaggaaggccatcctgacccacatgagggtggagtgcaagtgccacggcgtgtctggcagctgtgaggtgaagacctgctggagggctgtgccccccttccggcaggtgggccacgccctgaaggagaagtttgatggagccacagaggtggagccccggcgggtgggcagcagccgggccctggtgcccagaaatgcccagttcaagccccacacagatgaggacctggtgtacctggagcccagcccagacttctgtgagcaggacatgaggtctggagtgctgggcacccggggccgcacctgcaacaagaccagcaaggccattgatggctgtgagctgctgtgctgcggccggggcttccacacagcccaggtggagctggccgagcgctgcagctgcaagttccactggtgctgctttgtgaagtgccggcagtgccagaggctggtggagctgcacacctgcaggtag

SEQ ID NO: 176082 - DNA, 1710 bp, synthetic construct
  misc_feature 1..1710: note = Description of Artificial Sequence: Synthetic coding sequence
  source 1..1710: mol_type = other DNA
atgaaggtgctgctgcggctcatctgcttcatcgccctgctgatcagcagcctggaggccgacaagtgcaaggagcgggaggagaagatcatcctggtgtcctctgccaatgaaattgatgtgcggccctgccccctgaaccccaatgagcacaagggcaccatcacctggtacaaggatgacagcaagacccctgtgtccacagagcaggccagccgcatccaccagcacaaggagaagctgtggtttgtgcctgccaaggtggaggacagcggccactactactgtgtggtgaggaacagcagctactgcctgcgcatcaagatcagcgccaagtttgtggagaatgagcccaacctgtgctacaatgcccaggccatcttcaagcagaagctgcctgtggccggagatggcggcctggtgtgcccctacatggagttcttcaagaatgaaaataatgagctgcccaagctgcagtggtacaaggactgcaagcccctgctgctggacaacatccacttctctggagtgaaggacaggctcatcgtgatgaatgtggccgagaagcaccggggcaactacacctgccacgccagctacacctacctgggcaagcagtaccccatcaccagggtgattgagttcatcaccctggaggagaacaagcccaccaggcctgtgattgtgtccccagccaatgagaccatggaggtggacctgggcagccagatccagctgatctgcaatgtgacaggccagctgagtgacatcgcctactggaagtggaatggatctgtgattgatgaagatgatcctgtgctgggggaggactactacagcgtggagaacccagccaacaagaggaggagcaccctcatcaccgtgctgaacatcagcgagattgagagccgcttctacaagcaccccttcacctgctttgccaagaacacccacggcattgatgctgcctacatccagctgatctaccctgtgaccaacttccagaagcacatgattggcatctgtgtgaccctgaccgtcatcatcgtgtgcagcgtcttcatctacaagatcttcaagattgatattgtgctgtggtacagagacagctgctatgacttcctgcccatcaaggccagtgatggcaagacctatgatgcctacatcctgtaccccaagacagtgggggagggcagcaccagtgactgtgacatctttgtgttcaaggtgctgcctgaggtgctggagaagcagtgtggctacaagctgttcatctacggcagagatgattatgtgggggaggacatcgtggaggtgatcaatgaaaatgtgaagaagagccggcggctcatcatcatcctggtgcgggagaccagcggcttctcctggctgggcggcagcagcgaggagcagatcgccatgtacaatgccctggtgcaggacggcatcaaggtggtgctgctggagctggagaagatccaggactatgagaagatgcctgagagcatcaagttcatcaagcagaagcacggggccatccgctggagcggggacttcacccagggcccccagagcgccaagacccgcttctggaagaatgtgcgctaccacatgcctgtgcagaggaggagccccagcagcaagcaccagctgctgagccctgccaccaaggagaagctgcagcgggaggcccacgtgcccctgggctag

SEQ ID NO: 176083 - DNA, 1050 bp, synthetic construct
  misc_feature 1..1050: note = Description of Artificial Sequence: Synthetic coding sequence
  source 1..1050: mol_type = other DNA
atgaacaggaaggcccggcgctgcctgggccacctgttcctgagcctgggcatggtgtacctgagaattggaggcttcagctctgtggtggccctgggcgccagcatcatctgcaacaagatccctggcctggccccccggcagagggccatctgccagagcaggccagatgccatcatcgtcatcggggagggcagccagatgggcctggatgagtgccagttccagttcagaaatggccgctggaactgcagcgccctgggggagaggacagtgtttgggaaggagctgaaggtgggcagccgggaggccgccttcacctacgccatcatcgctgctggggtggcccacgccatcacagctgcctgcacccagggcaacctgagtgactgtggctgtgacaaggagaagcagggccagtaccacagagatgagggctggaagtggggcggctgcagcgctgacatccgctatggcatcggctttgccaaggtgtttgtggatgcccgggagatcaagcagaatgcccggaccctgatgaacctgcacaacaatgaagctggcaggaagatcctggaggagaacatgaagctggagtgcaagtgccacggcgtgtctggcagctgcaccaccaagacctgctggaccaccctgccccagttccgggagctgggctacgtgctgaaggacaagtacaatgaagctgtgcacgtggagcctgtgcgggccagcaggaacaagaggcccaccttcctgaagatcaagaagcccctgagctacaggaagcccatggacacagacctggtgtacatcgagaagagccccaactactgtgaggaggaccctgtgacaggctctgtgggcacccagggccgggcctgcaacaagacagccccccaggccagcggctgtgacctgatgtgctgcggccggggctacaacacccaccagtatgcccgggtgtggcagtgcaactgcaagttccactggtgctgctacgtgaagtgcaacacctgcagcgagaggacagagatgtacacctgcaagtag

SEQ ID NO: 176084 - DNA, 1050 bp, synthetic construct
  misc_feature 1..1050: note = Description of Artificial Sequence: Synthetic coding sequence
  source 1..1050: mol_type = other DNA
atgcacaggaacttcaggaagtggatcttctacgtgttcctgtgcttcggcgtgctgtatgtgaagctgggcgccctgagctctgtggtggccctgggcgccaacatcatctgcaacaagatccctggcctggccccccggcagagggccatctgccagagcaggccagatgccatcatcgtcatcggggagggcgcccagatgggcatcaatgaatgccagtaccagttccgcttcggccgctggaactgcagcgccctgggggagaagacagtgtttggccaggagctgcgggtgggcagccgggaggccgccttcacctacgccatcacagctgctggggtggcccatgctgtgacagctgcctgcagccagggcaacctgagcaactgtggctgtgaccgggagaagcagggctactacaaccaggccgagggctggaagtggggcggctgcagcgcagatgtgcgctatggcatcgacttcagccgccgctttgtggatgcccgggagatcaagaagaatgcccggcggctgatgaacctgcacaacaatgaagctggcaggaaggtgctggaggacaggatgcagctggagtgcaagtgccacggcgtgtctggcagctgcaccaccaagacctgctggaccaccctgcccaagttccgggaggtgggccacctgctgaaggagaagtacaatgctgctgtgcaggtggaggtggtgcgggccagccggctgcggcagcccaccttcctgcgcatcaagcagctgcggagctaccagaagcccatggagacagacctggtgtacatcgagaagagccccaactactgtgaggaggatgctgccaccggctctgtgggcacccagggccgcctgtgcaacagaaccagccctggagcagatggctgtgacaccatgtgctgcggccggggctacaacacccaccagtacaccaaggtgtggcagtgcaactgcaagttccactggtgctgctttgtgaagtgcaacacctgcagcgagaggacagaggtgttcacctgcaagtag

SEQ ID NO: 176085 - DNA, 1062 bp, synthetic construct
  misc_feature 1..1062: note = Description of Artificial Sequence: Synthetic coding sequence
  source 1..1062: mol_type = other DNA
atgctgctgctgagccccaggtctgccctggtgtctgtgtactgcccccagatcttcctgctgctgagcagcggcagctacctggccctgagctctgtggtggccctgggcgccaacatcatctgcaacaagatccctggcctggccccccggcagagggccatctgccagagcaggccagatgccatcatcgtcatcggggagggcgcccagatgggcatcaatgaatgccagtaccagttccgcttcggccgctggaactgcagcgccctgggggagaagacagtgtttggccaggagctgcgggtgggcagccgggaggccgccttcacctacgccatcacagctgctggggtggcccatgctgtgacagctgcctgcagccagggcaacctgagcaactgtggctgtgaccgggagaagcagggctactacaaccaggccgagggctggaagtggggcggctgcagcgcagatgtgcgctatggcatcgacttcagccgccgctttgtggatgcccgggagatcaagaagaatgcccggcggctgatgaacctgcacaacaatgaagctggcaggaaggtgctggaggacaggatgcagctggagtgcaagtgccacggcgtgtctggcagctgcaccaccaagacctgctggaccaccctgcccaagttccgggaggtgggccacctgctgaaggagaagtacaatgctgctgtgcaggtggaggtggtgcgggccagccggctgcggcagcccaccttcctgcgcatcaagcagctgcggagctaccagaagcccatggagacagacctggtgtacatcgagaagagccccaactactgtgaggaggatgctgccaccggctctgtgggcacccagggccgcctgtgcaacagaaccagccctggagcagatggctgtgacaccatgtgctgcggccggggctacaacacccaccagtacaccaaggtgtggcagtgcaactgcaagttccactggtgctgctttgtgaagtgcaacacctgcagcgagaggacagaggtgttcacctgcaagtag

SEQ ID NO: 176086 - DNA, 618 bp, synthetic construct
  misc_feature 1..618: note = Description of Artificial Sequence: Synthetic coding sequence
  source 1..618: mol_type = other DNA
atgcacaggaacttcaggaagtggatcttctacgtgttcctgtgcttcggcgtgctgtatgtgaagctgggcgccctgagctctgtggtggccctgggcgccaacatcatctgcaacaagatccctggcctggccccccggcagagggccatctgccagagcaggccagatgccatcatcgtcatcggggagggcgcccagatgggcatcaatgaatgccagtaccagttccgcttcggccgctggaactgcagcgccctgggggagaagacagtgtttggccaggagctgcgggtgggcagccgggaggccgccttcacctacgccatcacagctgctggggtggcccatgctgtgacagctgcctgcagccagggcaacctgagcaactgtggctgtgaccgggagaagcagggctactacaaccaggccgagggctggaagtggggcggctgcagcgcagatgtgcgctatggcatcgacttcagccgccgctttgtggatgcccgggagatcaagaagaatgcccggcggctgatgaacctgcacaacaatgaagctggcaggaagggcctgctgggccagccccgggtgaccagcagccccctcttcccctag

SEQ ID NO: 176087 - DNA, 1002 bp, synthetic construct
  misc_feature 1..1002: note = Description of Artificial Sequence: Synthetic coding sequence
  source 1..1002: mol_type = other DNA
atgtctgccccacccttctaccgggccctgagctctgtggtggccctgggcgccaacatcatctgcaacaagatccctggcctggccccccggcagagggccatctgccagagcaggccagatgccatcatcgtcatcggggagggcgcccagatgggcatcaatgaatgccagtaccagttccgcttcggccgctggaactgcagcgccctgggggagaagacagtgtttggccaggagctgcgggtgggcagccgggaggccgccttcacctacgccatcacagctgctggggtggcccatgctgtgacagctgcctgcagccagggcaacctgagcaactgtggctgtgaccgggagaagcagggctactacaaccaggccgagggctggaagtggggcggctgcagcgcagatgtgcgctatggcatcgacttcagccgccgctttgtggatgcccgggagatcaagaagaatgcccggcggctgatgaacctgcacaacaatgaagctggcaggaaggtgctggaggacaggatgcagctggagtgcaagtgccacggcgtgtctggcagctgcaccaccaagacctgctggaccaccctgcccaagttccgggaggtgggccacctgctgaaggagaagtacaatgctgctgtgcaggtggaggtggtgcgggccagccggctgcggcagcccaccttcctgcgcatcaagcagctgcggagctaccagaagcccatggagacagacctggtgtacatcgagaagagccccaactactgtgaggaggatgctgccaccggctctgtgggcacccagggccgcctgtgcaacagaaccagccctggagcagatggctgtgacaccatgtgctgcggccggggctacaacacccaccagtacaccaaggtgtggcagtgcaactgcaagttccactggtgctgctttgtgaagtgcaacacctgcagcgagaggacagaggtgttcacctgcaagtag

SEQ ID NO: 176088 - DNA, 174 bp, synthetic construct
  misc_feature 1..174: note = Description of Artificial Sequence: Synthetic coding sequence
  source 1..174: mol_type = other DNA
atgggcatcaatgaatgccagtaccagttccgcttcggccgctggaactgcagcgccctgggggagaagacagtgtttggccaggagctgcgggtgggcagccgggaggccgccttcacctacgccatcacagctgctggggtggcccatgctgtgacagctgcctgcagctag

SEQ ID NO: 176089 - DNA, 1056 bp, synthetic construct
  misc_feature 1..1056: note = Description of Artificial Sequence: Synthetic coding sequence
  source 1..1056: mol_type = other DNA
atgttcctgagcaagcccagcgtgtacatctgcctcttcacctgtgtgctgcagctgagccacagctggagcgtgaacaacttcctgatgacaggccccaaggcctacctgatctacagcagctctgtggccgccggggcccagagcggcatcgaggagtgcaagtaccagtttgcctgggaccgctggaactgcccagagcgggccctgcagctgagcagccatggaggcctgcggagcgccaaccgggagacagcctttgtgcacgccatcagcagcgctggggtgatgtacaccctgaccaggaactgcagcctgggggactttgacaactgtggctgtgatgacagcagaaatggccagctgggcggccagggctggctgtggggcggctgcagcgacaacgtgggctttggagaggccatcagcaagcagtttgtggatgccctggagaccggccaggatgcccgggccgccatgaacctgcacaacaatgaagctggcaggaaggctgtgaagggcaccatgaagaggacctgcaagtgccacggcgtgtctggcagctgcaccacccagacctgctggctgcagctgcctgagttccgggaggtgggcgcccacctgaaggagaagtaccacgccgccctgaaggtggacctgctgcagggcgccggcaacagcgctgctggccgcggggccatcgctgacaccttccgcagcatcagcacccgggagctggtgcacctggaggacagcccagactactgcctggagaacaagaccctgggcctgctgggcacagagggcagagaatgtctgcggcggggccgggccctgggccgctgggagcggcgcagctgccggcggctgtgtggggactgtggcctggccgtggaggagaggagagctgagaccgtgagcagctgcaactgcaagttccactggtgctgtgctgtgcgctgtgagcagtgcagaagaagagtgaccaagtacttctgcagcagagctgagcggccccggggcggggccgcccacaagccaggcaggaagccctag

SEQ ID NO: 176090 - DNA, 1209 bp, synthetic construct
  misc_feature 1..1209: note = Description of Artificial Sequence: Synthetic coding sequence
  source 1..1209: mol_type = other DNA
atggacctggaccgggccagcctggacctgatgatccggctgctggagctggagcaggatgccagcagcgccaagctgctgaatgagaaggacatgaacaagatcaaggagaagatccggcggctgtgtgaaacagtgcacaacaagcacctggacctggagaacatcaccaccggccacctggccatggagaccctgctgagcctgaccagcaagagagctggggactggttcaaggaggagctgcggctgctgggcggcctggaccacatcgtggacaaggtgaaggaatgtgtggaccacctgagcagagatgaagatgaggagaagctggtggccagcctgtggggcgctgagcgctgcctgcgggtgctggagagcgtgacagtgcacaaccctgagaaccagagctacctgattgcctacaaggacagccagctgattgtgtcctctgccaaggccctgcagcactgtgaggagctgatccagcagtacaacagagcagaagattccatctgcctggccgacagcaagcccctgccccaccagaatgtgaccaaccacgtgggcaaggctgtggaggactgcatgagggccatcattggagtgctgctgaacctgaccaatgacaatgagtggggcagcaccaagacaggagagcaggacggcctgattggaacagccctgaactgtgtgctgcaggtgcccaagtacctgccccaggagcagagatttgacatccgggtgctgctcttcctggagcgggagcgggccgcccagctggccgagagcaagacagatgagctgatcaaggatgcccccaccacccagcacgacaagtctggagagtggcaggagaccagcggggagatccagtgggtgtccacagagaagacagatggaacagaggagaagcacaagaaggaggaggaggatgaggagctggacctgaacaaggccctgcagcacgccggcaagcacatggaggactgcatcgtggccagctacacagccctgctgctgggctgcctgtgccaggagagccccatcaacgtgaccaccgtgcgggagtacctgcctgagggggacttcagcatcatgacagagatgctgaagaagttcctgtccttcatgaacctgacctgtgctgtgggcaccaccggccagaagagcatcagcagggtcatcgagtacctggagcactgctag

SEQ ID NO: 176091 - DNA, 3573 bp, synthetic construct
  misc_feature 1..3573: note = Description of Artificial Sequence: Synthetic coding sequence
  source 1..3573: mol_type = other DNA
atgaccagcagatttgggaagacctacagcaggaagggcggcaatggcagcagcaagtttgatgaggtgttcagcaacaagaggaccaccctgagcaccaagtggggcgagaccaccttcatggccaagctgggccagaagaggcccaacttcaagccagacatccaggagatccccaagaagcccaaggtggaggaggagagcactggagacccctttggatttgacagtgatgatgagagcctgcctgtgagcagcaagaacctggcccaggtgaagtgcagcagctacagcgagagcagcgaggccgcccagctggaggaggtgacctctgtgctggaggccaacagcaagatcagccacgtggtggtggaggacacagtggtgtctgacaagtgcttccccctggaggacaccctgctgggcaaggagaagagcaccaaccgcatcgtggaggatgatgccagcatcagcagctgcaacaagctgatcaccagtgacaaggtggagaacttccacgaggagcacgagaagaacagccaccacatccacaagaatgctgatgacagcaccaagaagcccaatgctgagaccaccgtggccagcgagatcaaggagaccaatgacacctggaacagccagtttgggaagaggcctgagagccccagcgagatcagccccatcaagggctctgtgaggacaggcctgtttgagtgggacaatgactttgaggacatccgctctgaggactgcatcctgagcctggacagcgaccccctgctggagatgaaggatgatgacttcaagaaccggctggagaacctgaatgaggccattgaagaagatattgtgcagagcgtgctgcggcccaccaactgcaggacctactgccgggccaacaagaccaagagcagccagggcgccagcaactttgacaagctgatggatggcaccagccaggccctggccaaggccaacagcgagagcagcaaggatggcctgaaccaggccaagaagggcggcgtgtcctgtggcaccagcttccggggcaccgtgggccgcacccgggactacacagtgctgcaccccagctgcctgtctgtgtgcaatgtgaccatccaggacaccatggagaggtccatggatgagttcaccgccagcaccccagctgacctgggggaggccggccgcctgaggaagaaggctgacatcgccaccagcaagaccaccacccgcttccggcccagcaacaccaagagcaagaaggatgtgaagctggagttctttggatttgaggaccacgagactggaggagatgaaggaggcagcggcagcagcaactacaagatcaagtactttggatttgatgacctgtctgagagtgaagatgatgaagatgatgactgccaggtggagaggaagaccagcaagaagaggaccaagacagcccccagccccagcctgcagcccccacctgagagcaatgacaacagccaggacagccagagcggcaccaacaatgctgagaacctggacttcacagaggacctgcccggggtgcctgagagcgtgaagaagcccatcaacaagcagggcgacaagagcaaagaaaacaccaggaagatcttcagcggccccaagaggagccccaccaaggctgtgtacaatgcccggcactggaaccacccagattctgaggagctgcccggcccccctgtggtgaagccccagagcgtgacagtgcggctgagcagcaaggagcccaaccagaaggatgatggagtcttcaaggccccagccccacccagcaaggtgatcaagacagtgaccatccccacccagccctaccaggacatcgtgacagccctgaagtgccggcgggaggacaaggagctgtacacagtggtgcagcacgtgaagcacttcaatgatgtggtggagtttggagagaaccaggagttcacagatgacatcgagtacctgctgagcggcctgaagagcacccagcccctgaacacccgctgcctgagcgtcatcagcctggccaccaagtgtgccatgcccagcttcaggatgcacctgcgggcccacggcatggtggccatggtgttcaagaccctggatgacagccagcaccaccagaacctgagcctgtgcacagctgccctgatgtacatcctgagccgggaccggctgaacatggacctggaccgggccagcctggacctgatgatccggctgctggagctggagcaggatgccagcagcgccaagctgctgaatgagaaggacatgaacaagatcaaggagaagatccggcggctgtgtgagaccgtgcacaacaagcacctggacctggagaacatcaccaccggccacctggccatggagaccctgctgagcctgaccagcaagagagctggggactggttcaaggaggagctgcggctgctgggcggcctggaccacatcgtggacaaggtgaaggaatgtgtggaccacctgagcagagatgaagatgaggagaagctggtggccagcctgtggggcgctgagcgctgcctgcgggtgctggagagcgtgacagtgcacaaccctgagaaccagagctacctgattgcctacaaggacagccagctgattgtgagcagcgccaaggccctgcagcactgtgaggagctgatccagcagtacaacagagctgaggacagcatctgcctggccgacagcaagcccctgccccaccagaatgtgaccaaccacgtgggcaaggctgtggaggactgcatgagggccatcatcggcgtgctgctgaacctgaccaatgacaatgagtggggcagcaccaagacaggagagcaggacggcctcatcggcacagccctgaactgtgtgctgcaggtgcccaagtacctgccccaggagcagagatttgacatccgggtgctgggcctgggcctgctgatcaacctggtggagtacagcgccaggaacagacactgcctggtgaacatggagaccagctgcagctttgacagcagcatctgcagcggggagggagatgacagcctgcgcatcggcggccaggtgcatgctgtgcaggccctggtgcagctgttcctggagcgggagcgggccgcccagctggccgagagcaagacagatgagctgatcaaggatgcccccaccacccagcacgacaagtctggagagtggcaggagaccagcggggagatccagtgggtgtccacagagaagacagatggaacagaggagaagcacaagaaggaggaggaggatgaggagctggacctgaacaaggccctgcagcacgccggcaagcacatggaggactgcatcgtggccagctacacagccctgctgctgggctgcctgtgccaggagagccccatcaacgtgaccaccgtgcgggagtacctgcctgagggggacttcagcatcatgacagagatgctgaagaagttcctgtccttcatgaacctgacctgtgctgtgggcaccaccggccagaagagcatcagcagggtcatcgagtacctggagcactgctag

SEQ ID NO: 176092 - DNA, 3828 bp, synthetic construct
  misc_feature 1..3828: note = Description of Artificial Sequence: Synthetic coding sequence
  source 1..3828: mol_type = other DNA
atggtgcagggccctgtgcagaccccagccctgaccatccacaggaggaagagaagaagaagctgcccccccaacagagccagctacctgcccaaggccgagagcctggccagcctgggcagccacctgcctgccctgctgagccgggcccgggtgcccaggcctcctgctggaagaagagagcgggagaggagaagaagacctgtggccaaggccccagcccggctgcggggggagtatgagaccggggtgaagatgaccagcagatttgggaagacctacagcaggaaaggaggaaatggcagcagcaagtttgatgaggtgttcagcaacaagaggaccaccctgagcaccaagtggggcgagaccaccttcatggccaagctgggccagaagaggcccaacttcaagccagacatccaggagatccccaagaagcccaaggtggaggaggagagcactggagaccccttcggctttgacagtgatgatgagagcctgcctgtgagcagcaagaacctggcccaggtgaagtgcagcagctacagcgagagcagcgaggccgcccagctggaggaggtgacctctgtgctggaggccaacagcaagatcagccacgtggtggtggaggacacagtggtgtctgacaagtgcttccccctggaggacaccctgctgggcaaggagaagagcaccaacagaattgtggaggatgatgccagcatcagcagctgcaacaagctgatcaccagtgacaaggtggagaacttccacgaggagcacgagaagaacagccaccacatccacaagaatgctgatgacagcaccaagaagcccaatgctgagaccaccgtggccagcgagatcaaggagaccaatgacacctggaacagccagtttgggaagaggcctgagagccccagcgagatcagccccatcaagggctctgtgaggacaggcctgtttgagtgggacaatgactttgaggacatccgctctgaggactgcatcctgagcctggacagcgaccccctgctggagatgaaggatgatgacttcaagaaccggctggagaacctgaatgaggccatcgaggaggacatcgtgcagagcgtgctgcggcccaccaactgcaggacctactgccgggccaacaagaccaagagcagccagggcgccagcaactttgacaagctgatggatggcaccagccaggccctggccaaggccaacagcgagagcagcaaggatggcctgaaccaggccaagaagggcggcgtgtcctgtggcaccagcttccggggcaccgtgggccgcacccgggactacacagtgctgcaccccagctgcctgtctgtgtgcaatgtgaccatccaggacaccatggagaggtccatggatgagttcaccgccagcaccccagctgacctgggggaggccggccgcctgaggaagaaggctgacatcgccaccagcaagaccaccacccgcttccggcccagcaacaccaagagcaagaaggatgtgaagctggagttcttcggctttgaagatcatgaaacaggaggagatgagggcggcagcggcagcagcaactacaagatcaagtacttcggctttgatgacctgtctgagagtgaagatgatgaagatgatgactgccaggtggagaggaagaccagcaagaagaggaccaagacagcccccagccccagcctgcagcccccacctgagagcaatgacaacagccaggacagccagagcggcaccaacaatgctgagaacctggacttcacagaggacctgcccggggtgcctgagagcgtgaagaagcccatcaacaagcagggcgacaagagcaaggagaacaccaggaagatcttcagcggccccaagaggagccccaccaaggctgtgtacaatgcccggcactggaaccacccagacagcgaggagctgcccggcccccctgtggtgaagccccagagcgtgacagtgcggctgagcagcaaggagcccaaccagaaggatgatggagtcttcaaggccccagccccacccagcaaggtgatcaagacagtgaccatccccacccagccctaccaggacatcgtgacagccctgaagtgcagaagagaggacaaggagctgtacacagtggtgcagcacgtgaagcacttcaatgatgtggtggagtttggagagaaccaggagttcacagatgacatcgagtacctgctgagcggcctgaagagcacccagcccctgaacacccgctgcctgagcgtcatcagcctggccaccaagtgtgccatgcccagcttcaggatgcacctgcgggcccacggcatggtggccatggtgttcaagaccctggatgacagccagcaccaccagaacctgagcctgtgcacagctgccctgatgtacatcctgagccgggaccggctgaacatggacctggaccgggccagcctggacctgatgatccggctgctggagctggagcaggatgccagcagcgccaagctgctgaatgagaaggacatgaacaagatcaaggagaagatccggcggctgtgtgaaacagtgcacaacaagcacctggacctggagaacatcaccaccggccacctggccatggagaccctgctgagcctgaccagcaagagagctggggactggttcaaggaggagctgcggctgctgggcggcctggaccacatcgtggacaaggtgaaggaatgtgtggaccacctgagcagagatgaagatgaggagaagctggtggccagcctgtggggcgctgagcgctgcctgcgggtgctggagagcgtgacagtgcacaaccctgagaaccagagctacctgattgcctacaaggacagccagctgattgtgtcctctgccaaggccctgcagcactgtgaggagctgatccagcagtacaacagagcagaagattccatctgcctggccgacagcaagcccctgccccaccagaatgtgaccaaccacgtgggcaaggctgtggaggactgcatgagggccatcattggagtgctgctgaacctgaccaatgacaatgagtggggcagcaccaagacaggagagcaggacggcctgattggaacagccctgaactgtgtgctgcaggtgcccaagtacctgccccaggagcagagatttgacatccgggtgctgggcctgggcctgctgatcaacctggtggagtacagcgccaggaacagacactgcctggtgaacatggagaccagctgcagctttgacagcagcatctgcagcggggagggagatgacagcctgagaattggaggccaggtgcatgctgtgcaggccctggtgcagctgttcctggagcgggagagagctgcccagctggccgagagcaagacagatgagctgatcaaggatgcccccaccacccagcacgacaagagcggggagtggcaggagaccagcggggagatccagtgggtgtccacagagaagacagatggaacagaggagaagcacaagaaggaggaggaggatgaggagctggacctgaacaaggccctgcagcacgccggcaagcacatggaggactgcatcgtggccagctacacagccctgctgctgggctgcctgtgccaggagagccccatcaacgtgaccaccgtgcgggagtacctgcctgagggggacttcagcatcatgacagagatgctgaagaagttcctgtccttcatgaacctgacctgtgctgtgggcaccaccggccagaagagcatcagccgggtgattgagtacctggagcactgctag

SEQ ID NO: 176093 - DNA, 1209 bp, synthetic construct; identical to SEQ ID NO: 176090
  misc_feature 1..1209: note = Description of Artificial Sequence: Synthetic coding sequence
  source 1..1209: mol_type = other DNA

SEQ ID NO: 176094 - DNA, 3828 bp, synthetic construct; identical to SEQ ID NO: 176092
  misc_feature 1..3828: note = Description of Artificial Sequence: Synthetic coding sequence
  source 1..3828: mol_type = other DNA

SEQ ID NO: 176095 - DNA, 1509 bp, synthetic construct
  misc_feature 1..1509: note = Description of Artificial Sequence: Synthetic coding sequence
  source 1..1509: mol_type = other DNA
atgtctgggggccccatgggcggccggcctgggggccgcggggccccagctgtgcagcagaacatccccagcaccctgctgcaggaccacgagaaccagaggctgtttgagatgctgggcaggaagtgcctgaccctggccacagctgtggtgcagctgtacctggccctgcccccaggagctgagcactggaccaaggagcactgtggggctgtgtgctttgtgaaggacaacccccagaagagctacttcatccggctgtatggcctgcaggccggccgcctgctgtgggagcaggagctgtacagccagctggtgtacagcacccccacccccttcttccacacctttgctggagatgactgccaggccggcctgaactttgctgatgaagatgaggcccaggccttccgggccctggtgcaggagaagatccagaagaggaaccagaggcagagcggggaccggcggcagctgcccccaccacccaccccagccaatgaggagcggcggggcggcctgccccccctgcccctgcaccctggaggagaccagggcggcccccctgtgggccccctgagcctgggcctggccaccgtggacatccagaacccagacatcaccagcagccgctaccggggcctgcctgcccctggccccagccctgctgacaagaagaggtctgggaagaagaagatcagcaaggctgacatcggggcccccagcggcttcaagcacgtgagccacgtgggctgggacccccagaatggatttgatgtgaacaacctggaccctgacctgcggagcctcttcagccgggccggcatcagcgaggcccagctgacagatgctgagaccagcaagctgatctatgacttcatcgaggaccagggcggcctggaggccgtgcggcaggagatgaggcggcaggagcccctgcccccacctcctccacccagccggggcggcaaccagctgcccaggcctcccatcgtgggcggcaacaagggccgcagcggccccctgccccctgtgcccctgggcatcgcccctcctccacccaccccccggggccccccacctcctggccggggcggccccccacctcctcctcctccagccaccggccgcagcggccccctgcccccacctcctcctggggccggcggcccccccatgcctcctcctcctcctcctcctcctcctccacccagcagtggaaatggacctgcccccccacccctgcccccagccctggtgcctgctgggggcctggcccctgggggcggccgcggggccctgctggaccagatccggcagggcatccagctgaacaagacccctggggcccctgagagcagcgccctgcagcccccaccccagagcagcgagggcctggtgggcgccctgatgcacgtgatgcagaagaggagccgggccatccacagcagtgatgaaggagaggaccaggccggagatgaagatgaagatgatgagtgggatgactag

SEQ ID NO: 176096 - DNA, 654 bp, synthetic construct
  misc_feature 1..654: note = Description of Artificial Sequence: Synthetic coding sequence
  source 1..654: mol_type = other DNA
atgtctgggggccccatgggcggccggcctgggggccgcggggccccagctgtgcagcagaacatccccagcaccctgctgcaggaccacgagaaccagaggctgtttgagatgctgggcaggaagtgcctgaccctggccacagctgtggtgcagctgtacctggccctgcccccaggagctgagcactggaccaaggagcactgtggggctgtgtgctttgtgaaggacaacccccagaagagctacttcatccggctgtatggcctgcaggccggccgcctgctgtgggagcaggagctgtacagccagctggtgtacagcacccccacccccttcttccacacctttgctggagatgactgccaggccggcctgaactttgctgatgaagatgaggcccaggccttccgggccctggtgcaggagaagatccagaagaggaaccagaggcagagcggggaccggcggcagctgcccccaccacccaccccagccaatgaggagcggcggggcggcctgccccccctgcccctgcaccctggaggagaccagggcggcccccctgtgggccccctgagcctgggcctggccaccgtggacatccagaacccagacatcaccagcagccgctaccggggcctgcctgcctag

SEQ ID NO: 176097 - DNA, 4668 bp, synthetic construct
  misc_feature 1..4668: note = Description of Artificial Sequence: Synthetic coding sequence
  source 1..4668: mol_type = other DNA
atggccaaggccatcaaggacagagtgtccctcatcaagaggaagcgggagcagaggcagctggtgcgggaggagcaggagaagaagaagcaggaggagagcagcctgaagcagcaggtggagcagagcagcgccagccagacaggcatcaagcagctgcccagcgccagcacaggcatccccacagccagcaccaccagcgcctctgtgtccacccaggtggagcctgaggagcctgaggccgaccagcaccagcagctgcagtaccagcagcccagcatctctgtgctgagtgatggcaccgtggacagcggccagggcagctctgtgttcacagagagccgggtgagcagccagcagacagtgtcctatggcagccagcacgagcaggcccacagcacaggcaccgtgcccggccacatccccagcacagtgcaggcccagagccagccccacggcgtgtacccacccagctctgtgcagcagggcatccagcagacagccccaccccagcagacagtgcagtacagcctgagccagaccagcaccagcagcgaggccaccacagcccagcctgtgtcccagccccaggccccccaggtgctgccccaggtgtctgctgggaagcagagcacccagggcgtgtcccaggtggccccagctgagcctgtggccgtggcccagacccaggccacccagcccaccaccctggccagctctgtggacagcgcccacagtgatgtggccagcggcatgtctgatggaaatgaaaatgtgcccagcagcagcggcagacatgagggccgcaccaccaagaggcactacaggaagtctgtgcgcagccgcagcagacatgagaagaccagccggcccaagctgcgcatcctgaatgtgagcaacaagggggacagagtggtggagtgccagctggagacccacaacaggaagatggtgaccttcaagtttgacctggatggagacaaccctgaggagatcgccaccatcatggtgaacaatgacttcatcctggccatcgagcgggagagctttgtggaccaggtgcgggagatcatcgagaaggcagatgagatgctgtctgaagatgtgtctgtggagcctgagggggaccagggcctggagagcctgcagggcaaggatgattatggcttcagcggcagccagaagctggagggggagttcaagcagcccatcccagccagctccatgccccagcagatcggcatccccaccagcagcctgacccaggtggtgcacagcgctggaagacgcttcatcgtgtcccctgtgcctgagagccggctgcgggagagcaaggtgttccccagcgagatcacagacacagtggccgccagcacagcccagagccctggcatgaacctgagccacagcgccagcagcctgagcctgcagcaggccttcagcgagctgcggcgggcccagatgacagagggccccaacacagccccacccaacttcagccacacaggccccaccttccctgtggtgccccccttcctgagcagcattgctggggtgcccaccacagctgctgccacagcccctgtgcctgccaccagcagccccccaaatgacatcagcaccagcgtcatccagagcgaggtgacagtgcccacagaggagggcattgctggggtggccaccagcactggagtggtgaccagcggcggcctgcccatcccccctgtgtctgagagccctgtgctgagctctgtggtgagcagcatcaccatcccagctgtggtgtccatcagcaccaccagccccagcctgcaggtgcccaccagcaccagcgagatcgtggtgagcagcacagccctgtaccccagcgtgacagtgtctgccaccagcgccagcgctgggggcagcacagccaccccaggccccaagcccccagctgtggtgtcccagcaggccgccggcagcaccaccgtgggcgccaccctgacctctgtgtccaccaccaccagcttccccagcacagccagccagctgtgcatccagctgagcagcagcaccagcacccccaccctggccgagaccgtggtggtgtctgcccacagcctggacaagaccagccacagcagcaccaccggcctggccttcagcctgagcgcccccagcagcagcagcagccctggggccggcgtgagcagctacatcagccagcccggcggcctgcaccccctggtgatccccagcgtgattgccagcacccccatcctgccccaggccgccggccccaccagcacccccctgctgccccaggtgcccagcatcccccccctggtgcagcctgtggccaacgtgcctgctgtgcagcagaccctcatccacagccagccccagcctgccctgctgcccaaccagccccacacccactgcccagaggtggacagcgacacccagcccaaggcccctggcattgatgacatcaagaccctggaggagaagctgcggagcctcttcagcgagcacagcagcagcggggcccagcacgcctctgtgtccctggagaccagcctggtgattgagagcacagtgaccccaggcatccccaccacagctgtggcccccagcaagctgctgaccagcaccaccagcacctgcctgccccccaccaacctgcccctgggcaccgtggccctgcctgtgacccctgtggtgaccccaggccaggtgtccacccctgtgtccaccaccaccagcggcgtgaagccaggcacagcccccagcaagccacccctgaccaaggcccctgtgctgcctgtgggcacagagctgcctgctggcaccctgcccagcgagcagctgccccccttccctggccccagcctgacccagagccagcagcccctggaggacctggatgcccagctgcggaggaccctgagccctgagatgatcaccgtgaccagcgctgtgggccctgtgtccatggccgcccccacagccatcacagaggccggcacccagccccagaagggcgtgtcccaggtgaaggagggccctgtgctggccaccagcagtggagctggggtcttcaagatgggccgcttccaggtgtctgtggccgcagatggagcccagaaggagggcaagaacaagtcagaagatgccaagtctgtgcactttgagagcagcaccagcgagagctctgtgctgagcagcagcagccctgagagcaccctggtgaagccagagcccaacggcatcaccatccctggcatcagcagtgatgtgcctgagagcgcccacaagaccacagccagcgaggccaagagtgacaccggccagcccaccaaggtgggccgcttccaggtgaccaccacagccaacaaggtgggccgcttctctgtgtccaagacagaggacaagatcacagacaccaagaaggagggccctgtggccagcccccccttcatggacctggagcaggccgtgctgcctgctgtgatccccaagaaggagaagccagagctgtctgagcccagccacctgaatggccccagcagtgaccctgaggccgccttcctgagcagagatgtggatgatggcagcggcagcccccacagcccccaccagctgagcagcaagagcctgcccagccagaacctgagccagagcctgagcaacagcttcaacagcagctacatgagcagtgacaatgaaagtgacattgaagatgaggacctgaagctggagctgcggcggctgcgggacaagcacctgaaggagatccaggacctgcagagccggcagaagcatgaaattgagagcctgtacaccaagctgggcaaggtgcccccagctgtgatcatccccccagctgcccccctgagcggcagaagaagaagacccaccaagagcaagggcagcaagagcagccgcagcagcagcctgggcaacaagagcccccagctgagcggcaacctgagcggccagagcgctgcctctgtgctgcacccccagcagaccctgcaccccccaggcaacatccctgagagcggccagaaccagctgctgcagcccctgaagcccagccccagcagtgacaacctgtacagcgccttcaccagtgatggagccatctctgtgcccagcctgagcgcccctggccagggcaccagcagcaccaacacagtgggcgccaccgtgaacagccaggccgcccaggcccagcccccagccatgaccagcagcaggaagggcaccttcacagatgacctgcacaagctggtggacaactgggccagagatgccatgaacctgagcggccggcggggcagcaagggccacatgaactatgagggccctggcatggccaggaagttcagcgcccctggccagctgtgcatctccatgaccagcaacctgggcggcagcgcccccatctctgctgccagcgccaccagcctgggccacttcaccaagtccatgtgccccccccagcagtatggcttccctgccaccccatttggagcccagtggagcggcactggaggccctgccccccagcccctgggccagttccagcctgtgggcacagccagcctgcagaacttcaacatcagcaacctgcagaagagcatcagcaaccccccaggcagcaacctgcggaccacctag

SEQ ID NO: 176098 - DNA, 7149 bp, synthetic construct
  misc_feature 1..7149: note = Description of Artificial Sequence: Synthetic coding sequence
  source 1..7149: mol_type = other DNA
atgtctgggggcgctgctgagaagcagagcagcaccccaggcagcctcttcctgagccccccagccccagcccccaagaatggcagcagcagtgacagctctgtgggggagaagctgggcgctgctgctgctgatgctgtgacaggccgcacagaggagtacagaagaagaagacacaccatggacaaggacagcagaggagctgctgccaccaccaccaccacagagcaccgcttcttcagaagaagtgtcatctgtgacagcaatgccacagccctggagctgcccggcctgcccctgagcctgccccagcccagcatcccagctgctgtgccccagagcgcccctcctgagccccaccgggaggagaccgtgacagccacagccaccagccaggtggcccagcagcccccagctgctgctgcccctggagagcaggccgtggccggccctgcccccagcacagtgcccagcagcaccagcaaggacaggcctgtgtcccagcccagcctggtgggcagcaaggaggagcccccaccagcccggagcggcagcggcggcggcagcgccaaggagccccaggaggagaggagccagcagcaggatgacatcgaggagctggagaccaaggctgtgggcatgagcaatgatggccgcttcctgaagtttgatattgaaattggccggggcagcttcaagacagtgtacaagggcctggacacagagaccaccgtggaggtggcctggtgtgagctgcaggacaggaagctgaccaagtctgagcggcagcgcttcaaggaggaggccgagatgctgaagggcctgcagcaccccaacatcgtgcgcttctatgacagctgggagagcacagtgaagggcaagaagtgcatcgtgctggtgacagagctgatgaccagcggcaccctgaagacctacctgaagcgcttcaaggtgatgaagatcaaggtgctgcgctcctggtgccggcagatcctgaagggcctgcagttcctgcacaccaggaccccacccatcatccaccgggacctgaagtgtgacaacatcttcatcaccggccccactggatctgtgaagatcggggacctgggcctggccaccctgaagagggccagctttgccaagagcgtcatcggcaccccagagttcatggcccctgagatgtatgaggagaagtatgatgagagcgtggatgtgtatgccttcggcatgtgcatgctggagatggccaccagcgagtacccctacagcgagtgccagaatgctgcccagatctacagaagagtgaccagcggcgtgaagccagccagctttgacaaggtggccatccctgaggtgaaggagatcatcgagggctgcatccggcagaacaaggatgagcgctacagcatcaaggacctgctgaaccacgccttcttccaggaggagactggagtgcgggtggagctggccgaggaggatgatggagagaagatcgccatcaagctgtggctgagaattgaggacatcaagaagctgaagggcaagtacaaggacaatgaggccatcgagttctcctttgacctggagagagatgtgcctgaagatgtggcccaggagatggtggagagcggctacgtgtgtgagggggaccacaagaccatggccaaggccatcaaggacagagtgtccctcatcaagaggaagcgggagcagaggcagctggtgcgggaggagcaggagaagaagaagcaggaggagagcagcctgaagcagcaggtggagcagagcagcgccagccagacaggcatcaagcagctgcccagcgccagcacaggcatccccacagccagcaccaccagcgcctctgtgtccacccaggtggagcctgaggagcctgaggccgaccagcaccagcagctgcagtaccagcagcccagcatctctgtgctgagtgatggcaccgtggacagcggccagggcagcagcgtcttcacagagagccgggtgagcagccagcagacagtgtcctatggcagccagcacgagcaggcccacagcactggaacagtgcccggccacatccccagcacagtgcaggcccagagccagccccatggagtgtacccacccagctctgtggcccagggccagagccagggccagcccagcagcagcagcctgactggagtgagcagcagccagcccatccagcacccccagcagcagcagggcatccagcagacagccccaccccagcagacagtgcagtacagcctgagccagaccagcaccagcagcgaggccaccacagcccagcctgtgtcccagccccaggccccccaggtgctgccccaggtgtctgctgggaagcagctgcctgtgtcccagcctgtgcccaccatccagggcgagccccagatccctgtggccacccagcccagcgtggtgcctgtgcacagcggggcccacttcctgcctgtgggccagcccctgcccacccccctgctgccccagtaccctgtgtcccagatccccatcagcaccccccacgtgtccacagcccagacaggcttcagcagcctgcccatcaccatggctgctggcatcacccagcccctgctgaccctggccagcagcgccaccacagctgccatccctggggtgtccacagtggtgcccagccagctgcccaccctgctgcagcctgtgacccagctgcccagccaggtgcacccccagctgctgcagcctgctgtgcagagcatgggcatcccagccaacctgggccaggccgctgaggtgcccctgagcagtggagatgtgctgtaccagggcttccccccccggctgcccccccagtacccaggggacagcaacatcgcccccagcagcaatgtggcctctgtgtgcatccacagcacagtgctgagcccccccatgcccacagaggtgctggccaccccaggctacttccccaccgtggtgcagccctacgtggagagcaacctgctggtgcccatgggcggcgtgggcggccaggtgcaggtgtcccagcccggcggcagcctggcccaggcccccaccaccagcagccagcaggccgtgctggagagcacccagggcgtgtcccaggtggccccagctgagcctgtggccgtggcccagacccaggccacccagcccaccaccctggccagctctgtggacagcgcccacagtgatgtggccagcggcatgtctgatggaaatgaaaatgtgcccagcagcagcggcagacatgagggccgcaccaccaagaggcactacaggaagtctgtgcgcagccgcagcagacatgagaagaccagccggcccaagctgcgcatcctgaatgtgagcaacaagggggacagagtggtggagtgccagctggagacccacaacaggaagatggtgaccttcaagtttgacctggatggagacaaccctgaggagatcgccaccatcatggtgaacaatgacttcatcctggccatcgagcgggagagctttgtggaccaggtgcgggagatcatcgagaaggcagatgagatgctgtctgaagatgtgtctgtggagcctgagggggaccagggcctggagagcctgcagggcaaggatgattatggcttcagcggcagccagaagctggagggggagttcaagcagcccatcccagccagctccatgccccagcagatcggcatccccaccagcagcctgacccaggtggtgcacagcgctggccgccgcttcatcgtgtcccctgtgcctgagagccggctgcgggagagcaaggtgttccccagcgagatcacagacacagtggccgccagcacagcccagagccctggcatgaacctgagccacagcgccagcagcctgagcctgcagcaggccttcagcgagctgcggcgggcccagatgacagagggccccaacacagccccacccaacttcagccacacaggccccaccttccctgtggtgccccccttcctgagcagcattgctggggtgcccaccacagctgctgccacagcccctgtgcctgccaccagcagccccccaaatgacatcagcaccagcgtcatccagagcgaggtgacagtgcccacagaggagggcattgctggggtggccaccagcactggagtggtgaccagcggcggcctgcccatcccccctgtgtctgagagccctgtgctgagctctgtggtgagcagcatcaccatcccagctgtggtgtccatcagcaccaccagccccagcctgcaggtgcccaccagcaccagcgagatcgtggtgagcagcacagccctgtaccccagcgtgacagtgtctgccaccagcgccagcgctgggggcagcacagccaccccaggccccaagcccccagctgtggtgtcccagcaggccgccggcagcaccaccgtgggcgccaccctgacctctgtgtccaccaccaccagcttccccagcacagccagccagctgtgcatccagctgagcagcagcaccagcacccccaccctggccgagaccgtggtggtgtctgcccacagcctggacaagaccagccacagcagcaccaccggcctggccttcagcctgagcgcccccagcagcagcagcagccctggagctggggtgtcctcctacatcagccagcccggcggcctgcaccccctggtgatccccagcgtcatcgccagcacccccatcctgccccaggccgccggccccaccagcacccccctgctgccccaggtgcccagcatcccccccctggtgcagcctgtggccaacgtgcctgctgtgcagcagaccctcatccacagccagccccagcctgccctgctgcccaaccagccccacacccactgcccagaggtggacagcgacacccagcccaaggcccctggcattgatgacatcaagaccctggaggagaagctgcggagcctcttcagcgagcacagcagcagcggggcccagcacgcctctgtgtccctggagaccagcctggtgattgagagcacagtgaccccaggcatccccaccacagctgtggcccccagcaagctgctgaccagcaccaccagcacctgcctgccccccaccaacctgcccctgggcaccgtggccctgcctgtgacccctgtggtgaccccaggccaggtgtccacccctgtgtccaccaccaccagcggcgtgaagccaggcacagcccccagcaagccacccctgaccaaggcccctgtgctgcctgtgggcacagagctgcctgctggcaccctgcccagcgagcagctgccccccttccctggccccagcctgacccagagccagcagcccctggaggacctggatgcccagctgcggaggaccctgagccctgagatgatcaccgtgaccagcgctgtgggccctgtgtccatggccgcccccacagccatcacagaagctggcacccagccccagaagggcgtgtcccaggtgaaggagggccctgtgctggccaccagcagcggggccggggtcttcaagatgggccgcttccaggtgtctgtggccgcagatggagcccagaaggagggcaagaacaagtcagaagatgccaagtctgtgcactttgagagcagcaccagcgagagctctgtgctgagcagcagcagccctgagagcaccctggtgaagccagagcccaacggcatcaccatccctggcatcagcagtgatgtgcctgagagcgcccacaagaccacagccagcgaggccaagagtgacaccggccagcccaccaaggtgggccgcttccaggtgaccaccacagccaacaaggtgggccgcttctctgtgtccaagacagaggacaagatcacagacaccaagaaggagggccctgtggccagcccccccttcatggacctggagcaggccgtgctgcctgctgtgatccccaagaaggagaagccagagctgtctgagcccagccacctgaatggccccagcagtgaccctgaggccgccttcctgagcagagatgtggatgatggcagcggcagcccccacagcccccaccagctgagcagcaagagcctgcccagccagaacctgagccagagcctgagcaacagcttcaacagcagctacatgagcagtgacaatgaaagtgacattgaagatgaggacctgaagctggagctgcggcggctgcgggacaagcacctgaaggagatccaggacctgcagagccggcagaagcatgaaattgagagcctgtacaccaagctgggcaaggtgcccccagctgtgatcatccccccagctgcccccctgtctggaagaagaagaagacccaccaagagcaagggcagcaagagcagccgcagcagcagcctgggcaacaagagcccccagctgagcggcaacctgagcggccagagcgctgcctctgtgctgcacccccagcagaccctgcaccccccaggcaacatccctgagagcggccagaaccagctgctgcagcccctgaagcccagccccagcagtgacaacctgtacagcgccttcaccagtgatggagccatctctgtgcccagcctgagcgcccctggccagggcaccagcagcaccaacacagtgggcgccaccgtgaacagccaggccgcccaggcccagcccccagccatgaccagcagcaggaagggcaccttcacagatgacctgcacaagctggtggacaactgggccagagatgccatgaacctgtctggaagaagaggcagcaagggccacatgaactatgagggccctggcatggccaggaagttcagcgcccctggccagctgtgcatctccatgaccagcaacctgggcggcagcgcccccatctctgctgccagcgccaccagcctgggccacttcaccaagtccatgtgccccccccagcagtatggcttccctgccaccccatttggagcccagtggagcggcaccggcggccctgccccccagcccctgggccagttccagcctgtgggcacagccagcctgcagaacttcaacatcagcaacctgcagaagagcatcagcaaccccccaggcagcaacctgcggaccacctag

SEQ ID NO: 176099 - DNA, 5928 bp, synthetic construct
  misc_feature 1..5928: note = Description of Artificial Sequence: Synthetic coding sequence
  source 1..5928: mol_type = other DNA
atggacatcaagaagaaggacttctgcagcgtgtttgtgatcatcaacagccactgctgctgctgcccccagaaggactgcatcaatgaaggagtgaagccagccagctttgacaaggtggccatccctgaggtgaaggagatcatcgagggctgcatccggcagaacaaggatgagcgctacagcatcaaggacctgctgaaccacgccttcttccaggaggagaccggggtgcgggtggagctggccgaggaggatgatggagagaagatcgccatcaagctgtggctgagaattgaggacatcaagaagctgaagggcaagtacaaggacaatgaggccatcgagttctcctttgacctggagagagatgtgcctgaagatgtggcccaggagatggtggagagcggctacgtgtgtgagggggaccacaagaccatggccaaggccatcaaggacagagtgtccctcatcaagaggaagcgggagcagaggcagctggtgcgggaggagcaggagaagaagaagcaggaggagagcagcctgaagcagcaggtggagcagagcagcgccagccagacaggcatcaagcagctgcccagcgccagcacaggcatccccacagccagcaccaccagcgcctctgtgtccacccaggtggagcctgaggagcctgaggccgaccagcaccagcagctgcagtaccagcagcccagcatctctgtgctgagtgatggcaccgtggacagcggccagggcagctctgtgttcacagagagccgggtgagcagccagcagacagtgtcctatggcagccagcacgagcaggcccacagcacaggcaccgtgcccggccacatccccagcacagtgcaggcccagagccagccccacggcgtgtacccacccagctctgtggcccagggccagagccagggccagcccagcagcagcagcctgactggagtgagcagcagccagcccatccagcacccccagcagcagcagggcatccagcagacagccccaccccagcagacagtgcagtacagcctgagccagaccagcaccagcagcgaggccaccacagcccagcctgtgtcccagccccaggccccccaggtgctgccccaggtgtctgctgggaagcagctgcctgtgtcccagcctgtgcccaccatccagggcgagccccagatccctgtggccacccagcccagcgtggtgcctgtgcacagcggggcccacttcctgcctgtgggccagcccctgcccacccccctgctgccccagtaccctgtgtcccagatccccatcagcacccctcatgtgtccacagcccagacaggcttcagcagcctgcccatcaccatggccgccggcatcacccagcccctgctgaccctggccagcagcgccaccacagctgccatccctggggtgtccacagtggtgcccagccagctgcccaccctgctgcagcctgtgacccagctgcccagccaggtgcacccccagctgctgcagcctgctgtgcagagcatgggcatcccagccaacctgggccaggccgctgaggtgcccctgagcagtggagatgtgctgtaccagggcttccccccccggctgcccccccagtacccaggggacagcaacatcgcccccagcagcaatgtggcctctgtgtgcatccacagcacagtgctgagcccccccatgcccacagaggtgctggccaccccaggctacttccccaccgtggtgcagccctacgtggagagcaacctgctggtgcccatgggcggcgtgggcggccaggtgcaggtgtcccagcccggcggcagcctggcccaggcccccaccaccagcagccagcaggccgtgctggagagcacccagggcgtgtcccaggtggccccagctgagcctgtggccgtggcccagacccaggccacccagcccaccaccctggccagctctgtggacagcgcccacagtgatgtggccagcggcatgtctgatggaaatgaaaatgtgcccagcagcagcggcagacatgagggccgcaccaccaagaggcactacaggaagtctgtgcgcagccgcagcagacatgagaagaccagccggcccaagctgcgcatcctgaatgtgagcaacaagggggacagagtggtggagtgccagctggagacccacaacaggaagatggtgaccttcaagtttgacctggatggagacaaccctgaggagatcgccaccatcatggtgaacaatgacttcatcctggccatcgagcgggagagctttgtggaccaggtgcgggagatcatcgagaaggcagatgagatgctgtctgaagatgtgtctgtggagcctgagggggaccagggcctggagagcctgcagggcaaggatgattatggcttcagcggcagccagaagctggagggggagttcaagcagcccatcccagccagctccatgccccagcagatcggcatccccaccagcagcctgacccaggtggtgcacagcgctggaagacgcttcatcgtgtcccctgtgcctgagagccggctgcgggagagcaaggtgttccccagcgagatcacagacacagtggccgccagcacagcccagagccctggcatgaacctgagccacagcgccagcagcctgagcctgcagcaggccttcagcgagctgcggcgggcccagatgacagagggccccaacacagccccacccaacttcagccacacaggccccaccttccctgtggtgccccccttcctgagcagcattgctggggtgcccaccacagctgctgccacagcccctgtgcctgccaccagcagccccccaaatgacatcagcaccagcgtcatccagagcgaggtgacagtgcccacagaggagggcattgctggggtggccaccagcactggagtggtgaccagcggcggcctgcccatcccccctgtgtctgagagccctgtgctgagctctgtggtgagcagcatcaccatcccagctgtggtgtccatcagcaccaccagccccagcctgcaggtgcccaccagcaccagcgagatcgtggtgagcagcacagccctgtaccccagcgtgacagtgtctgccaccagcgccagcgctgggggcagcacagccaccccaggccccaagcccccagctgtggtgtcccagcaggccgccggcagcaccaccgtgggcgccaccctgacctctgtgtccaccaccaccagcttccccagcacagccagccagctgtgcatccagctgagcagcagcaccagcacccccaccctggccgagaccgtggtggtgtctgcccacagcctggacaagaccagccacagcagcaccaccggcctggccttcagcctgagcgcccccagcagcagcagcagccctggggccggcgtgagcagctacatcagccagcccggcggcctgcaccccctggtgatccccagcgtgattgccagcacccccatcctgccccaggccgccggccccaccagcacccccctgctgccccaggtgcccagcatcccccccctggtgcagcctgtggccaacgtgcctgctgtgcagcagaccctcatccacagccagccccagcctgccctgctgcccaaccagccccacacccactgcccagaggtggacagcgacacccagcccaaggcccctggcattgatgacatcaagaccctggaggagaagctgcggagcctcttcagcgagcacagcagcagcggggcccagcacgcctctgtgtccctggagaccagcctggtgattgagagcacagtgaccccaggcatccccaccacagctgtggcccccagcaagctgctgaccagcaccaccagcacctgcctgccccccaccaacctgcccctgggcaccgtggccctgcctgtgacccctgtggtgaccccaggccaggtgtccacccctgtgtccaccaccaccagcggcgtgaagccaggcacagcccccagcaagccacccctgaccaaggcccctgtgctgcctgtgggcacagagctgcctgctggcaccctgcccagcgagcagctgccccccttccctggccccagcctgacccagagccagcagcccctggaggacctggatgcccagctgcggaggaccctgagccctgagatgatcaccgtgaccagcgctgtgggccctgtgtccatggccgcccccacagccatcacagaggccggcacccagccccagaagggcgtgtcccaggtgaaggagggccctgtgctggccaccagcagtggagctggggtcttcaagatgggccgcttccaggtgtctgtggccgcagatggagcccagaaggagggcaagaacaagtcagaagatgccaagtctgtgcactttgagagcagcaccagcgagagctctgtgctgagcagcagcagccctgagagcaccctggtgaagccagagcccaacggcatcaccatccctggcatcagcagtgatgtgcctgagagcgcccacaagaccacagccagcgaggccaagagtgacaccggccagcccaccaaggtgggccgcttccaggtgaccaccacagccaacaaggtgggccgcttctctgtgtccaagacagaggacaagatcacagacaccaagaaggagggccctgtggccagcccccccttcatggacctggagcaggccgtgctgcctgctgtgatccccaagaaggagaagccagagctgtctgagcccagccacctgaatggccccagcagtgaccctgaggccgccttcctgagcagagatgtggatgatggcagcggcagcccccacagcccccaccagctgagcagcaagagcctgcccagccagaacctgagccagagcctgagcaacagcttcaacagcagctacatgagcagtgacaatgaaagtgacattgaagatgaggacctgaagctggagctgcggcggctgcgggacaagcacctgaaggagatccaggacctgcagagccggcagaagcatgaaattgagagcctgtacaccaagctgggcaaggtgcccccagctgtgatcatccccccagctgcccccctgagcggcagaagaagaagacccaccaagagcaagggcagcaagagcagccgcagcagcagcctgggcaacaagagcccccagctgagcggcaacctgagcggccagagcgctgcctctgtgctgcacccccagcagaccctgcaccccccaggcaacatccctgagagcggccagaaccagctgctgcagcccctgaagcccagccccagcagtgacaacctgtacagcgccttcaccagtgatggagccatctctgtgcccagcctgagcgcccctggccagggcaccagcagcaccaacacagtgggcgccaccgtgaacagccaggccgcccaggcccagcccccagccatgaccagcagcaggaagggcaccttcacagatgacctgcacaagctggtggacaactgggccagagatgccatgaacctgagcggccggcggggcagcaagggccacatgaactatgagggccctggcatggccaggaagttcagcgcccctggccagctgtgcatctccatgaccagcaacctgggcggcagcgcccccatctctgctgccagcgccaccagcctgggccacttcaccaagtccatgtgccccccccagcagtatggcttccctgccaccccatttggagcccagtggagcggcactggaggccctgccccccagcccctgggccagttccagcctgtgggcacagccagcctgcagaacttcaacatcagcaacctgcagaagagcatcagcaaccccccaggcagcaacctgcggaccacctag

SEQ ID NO: 176100 - DNA, 1182 bp, synthetic construct
  misc_feature 1..1182: note = Description of Artificial Sequence: Synthetic coding sequence
  source 1..1182: mol_type = other DNA
atgtctgggggcgctgctgagaagcagagcagcaccccaggcagcctcttcctgagccccccagccccagcccccaagaatggcagcagcagtgacagctctgtgggggagaagctgggcgctgctgctgctgatgctgtgacaggccgcacagaggagtacagaagaagaagacacaccatggacaaggacagcagaggagctgctgccaccaccaccaccacagagcaccgcttcttcagaagaagtgtcatctgtgacagcaatgccacagccctggagctgcccggcctgcccctgagcctgccccagcccagcatcccagctgctgtgccccagagcgcccctcctgagccccaccgggaggagaccgtgacagccacagccaccagccaggtggcccagcagcccccagctgctgctgcccctggagagcaggccgtggccggccctgcccccagcacagtgcccagcagcaccagcaaggacaggcctgtgtcccagcccagcctggtgggcagcaaggaggagcccccaccagcccggagcggcagcggcggcggcagcgccaaggagccccaggaggagaggagccagcagcaggatgacatcgaggagctggagaccaaggctgtgggcatgagcaatgatggccgcttcctgaagtttgatattgaaattggccggggcagcttcaagacagtgtacaagggcctggacacagagaccaccgtggaggtggcctggtgtgagctgcaggacaggaagctgaccaagtctgagcggcagcgcttcaaggaggaggccgagatgctgaagggcctgcagcaccccaacatcgtgcgcttctatgacagctgggagagcacagtgaagggcaagaagtgcatcgtgctggtgacagagctgatgaccagcggcaccctgaagacctacctgaagcgcttcaaggtgatgaagatcaaggtgctgcgctcctggtgccggcagatcctgaagggcctgcagttcctgcacaccaggaccccacccatcatccaccgggacctgaagtgtgacaacatcttcatcaccggccccactggatctgtgaagatcggggacctgggcctggccaccctgaagagggccagctttgccaagagcgtcatcggcatgttccaggtgtacctgggcgcctag

SEQ ID NO: 176101 - DNA, 8643 bp, synthetic construct
  misc_feature 1..8643: note = Description of Artificial Sequence: Synthetic coding sequence
  source 1..8643: mol_type = other DNA
atgtctgggggcgctgctgagaagcagagcagcaccccaggcagcctcttcctgagccccccagccccagcccccaagaatggcagcagcagtgacagctctgtgggggagaagctgggcgctgctgctgctgatgctgtgacaggccgcacagaggagtacagaagaagaagacacaccatggacaaggacagcagaggagctgctgccaccaccaccaccacagagcaccgcttcttcagaagaagtgtcatctgtgacagcaatgccacagccctggagctgcccggcctgcccctgagcctgccccagcccagcatcccagctgctgtgccccagagcgcccctcctgagccccaccgggaggagaccgtgacagccacagccaccagccaggtggcccagcagcccccagctgctgctgcccctggagagcaggccgtggccggccctgcccccagcacagtgcccagcagcaccagcaaggacaggcctgtgtcccagcccagcctggtgggcagcaaggaggagcccccaccagcccggagcggcagcggcggcggcagcgccaaggagccccaggaggagaggagccagcagcaggatgacatcgaggagctggagaccaaggctgtgggcatgagcaatgatggccgcttcctgaagtttgatattgaaattggccggggcagcttcaagacagtgtacaagggcctggacacagagaccaccgtggaggtggcctggtgtgagctgcaggacaggaagctgaccaagtctgagcggcagcgcttcaaggaggaggccgagatgctgaagggcctgcagcaccccaacatcgtgcgcttctatgacagctgggagagcacagtgaagggcaagaagtgcatcgtgctggtgacagagctgatgaccagcggcaccctgaagacctacctgaagcgcttcaaggtgatgaagatcaaggtgctgcgctcctggtgccggcagatcctgaagggcctgcagttcctgcacaccaggaccccacccatcatccaccgggacctgaagtgtgacaacatcttcatcaccggccccactggatctgtgaagatcggggacctgggcctggccaccctgaagagggccagctttgccaagagcgtcatcggcaccccagagttcatggcccctgagatgtatgaggagaagtatgatgagagcgtggatgtgtatgccttcggcatgtgcatgctggagatggccaccagcgagtacccctacagcgagtgccagaatgctgcccagatctacagaagagtgaccagcggcgtgaagccagccagctttgacaaggtggccatccctgaggtgaaggagatcatcgagggctgcatccggcagaacaaggatgagcgctacagcatcaaggacctgctgaaccacgccttcttccaggaggagactggagtgcgggtggagctggccgaggaggatgatggagagaagatcgccatcaagctgtggctgagaattgaggacatcaagaagctgaagggcaagtacaaggacaatgaggccatcgagttctcctttgacctggagagagatgtgcctgaagatgtggcccaggagatggtggagagcggctacgtgtgtgagggggaccacaagaccatggccaaggccatcaaggacagagtgtccctcatcaagaggaagcgggagcagaggcagctggtgcgggaggagcaggagaagaagaagcaggaggagagcagcctgaagcagcaggtggagcagagcagcgccagccagacaggcatcaagcagctgcccagcgccagcacaggcatccccacagccagcaccaccagcgcctctgtgtccacccaggtggagcctgaggagcctgaggccgaccagcaccagcagctgcagtaccagcagcccagcatctctgtgctgagtgatggcaccgtggacagcggccagggcagcagcgtcttcacagagagccgggtgagcagccagcagacagtgtcctatggcagccagcacgagcaggcccacagcactggaacagtgcccggccacatccccagcacagtgcaggcccagagccagccccatggagtgtacccacccagctctgtgccccggcggggccgctccatgtctgtgtgtgtgcccatcttcctgctgctgcccctgtgcccagccagcctgcctgtgctcttccaccccacagccagcacagtgtgcaccagcttctccttccccccaccagactgcccagaggagacctttgctgagaagctgagcaaggccctggagagcgtgctgcccatgcacagcgccagccagaggaagcacagaagaagcagcctgcccagcctgtttgtgtccaccccccagagcatggcccacccctgtggcggcacccccacctacccagagagccagatcttcttccccaccatccacgagaggcctgtgtccttcagccccccacccacctgcccccccaaggtggccatcagccagaggaggaagagcaccagcttcctggaggcccagacccaccacttccagcccctgctgaggacagtgggccagagcctgctgcccccaggcggcagccccaccaactggaccccagaggccgtggtgatgctgggcaccacagccagccgggtgactggagagagctgtgagatccaggtgcaccccatgtttgagcccagccaggtgtacagcgactaccggcccggcctggtgctgcctgaggaggcccactacttcatcccccaggaggccgtgtatgtggccggcgtgcactaccaggcccgggtggccgagcagtatgagggcatcccctacaacagctctgtgctgagcagccccatgaagcagatccctgagcagaagcctgtgcagggcggccccaccagcagctctgtgtttgagttccccagcggccaggccttcctggtgggccacctgcagaacctgcggctggacagcggcctgggccctggcagccccctgagcagcatcagcgcccccatcagcacagatgccacccggctgaagttccaccctgtgtttgtgccccacagcgccccagctgtgctgacccacaacaatgaaagccgcagcaactgtgtgtttgagttccacgtgcacacccccagcagcagcagtggagagggcggcggcatcctgccccagagggtgtacagaaaccggcaggtggccgtggacctgaaccaggaggagctgcccccccagagcgtgggcctgcacggctacctgcagcctgtgacagaggagaagcacaactaccacgcccctgagctgactgtgtctgtggtggagcccatcggccagaactggcccatcggcagccctgagtacagcagtgacagcagccagatcaccagcagtgaccccagcgacttccagagccccccacccactggaggagctgctgcccccttcggcagtgatgtgtccatgcccttcatccacctgccccagacagtgctgcaggagagccccctcttcttctgcttcccccagggcaccaccagccagcaggtgctgacagccagcttcagcagcggcggcagcgccctgcacccccaggcccagggccagagccagggccagcccagcagcagcagcctgactggagtgagcagcagccagcccatccagcacccccagcagcagcagggcatccagcagacagccccaccccagcagacagtgcagtacagcctgagccagaccagcaccagcagcgaggccaccacagcccagcctgtgtcccagccccaggccccccaggtgctgccccaggtgtctgctgggaagcagctgcctgtgtcccagcctgtgcccaccatccagggcgagccccagatccctgtggccacccagcccagcgtggtgcctgtgcacagcggggcccacttcctgcctgtgggccagcccctgcccacccccctgctgccccagtaccctgtgtcccagatccccatcagcaccccccacgtgtccacagcccagacaggcttcagcagcctgcccatcaccatggctgctggcatcacccagcccctgctgaccctggccagcagcgccaccacagctgccatccctggggtgtccacagtggtgcccagccagctgcccaccctgctgcagcctgtgacccagctgcccagccaggtgcacccccagctgctgcagcctgctgtgcagagcatgggcatcccagccaacctgggccaggccgctgaggtgcccctgagcagtggagatgtgctgtaccagggcttccccccccggctgcccccccagtacccaggggacagcaacatcgcccccagcagcaatgtggcctctgtgtgcatccacagcacagtgctgagcccccccatgcccacagaggtgctggccaccccaggctacttccccaccgtggtgcagccctacgtggagagcaacctgctggtgcccatgggcggcgtgggcggccaggtgcaggtgtcccagcccggcggcagcctggcccaggcccccaccaccagcagccagcaggccgtgctggagagcacccagggcgtgtcccaggtggccccagctgagcctgtggccgtggcccagacccaggccacccagcccaccaccctggccagctctgtggacagcgcccacagtgatgtggccagcggcatgtctgatggaaatgaaaatgtgcccagcagcagcggcagacatgagggccgcaccaccaagaggcactacaggaagtctgtgcgcagccgcagcagacatgagaagaccagccggcccaagctgcgcatcctgaatgtgagcaacaagggggacagagtggtggagtgccagctggagacccacaacaggaagatggtgaccttcaagtttgacctggatggagacaaccctgaggagatcgccaccatcatggtgaacaatgacttcatcctggccatcgagcgggagagctttgtggaccaggtgcgggagatcatcgagaaggcagatgagatgctgtctgaagatgtgtctgtggagcctgagggggaccagggcctggagagcctgcagggcaaggatgattatggcttcagcggcagccagaagctggagggggagttcaagcagcccatcccagccagctccatgccccagcagatcggcatccccaccagcagcctgacccaggtggtgcacagcgctggccgccgcttcatcgtgtcccctgtgcctgagagccggctgcgggagagcaaggtgttccccagcgagatcacagacacagtggccgccagcacagcccagagccctggcatgaacctgagccacagcgccagcagcctgagcctgcagcaggccttcagcgagctgcggcgggcccagatgacagagggccccaacacagccccacccaacttcagccacacaggccccaccttccctgtggtgccccccttcctgagcagcattgctggggtgcccaccacagctgctgccacagcccctgtgcctgccaccagcagccccccaaatgacatcagcaccagcgtcatccagagcgaggtgacagtgcccacagaggagggcattgctggggtggccaccagcactggagtggtgaccagcggcggcctgcccatcccccctgtgtctgagagccctgtgctgagctctgtggtgagcagcatcaccatcccagctgtggtgtccatcagcaccaccagccccagcctgcaggtgcccaccagcaccagcgagatcgtggtgagcagcacagccctgtaccccagcgtgacagtgtctgccaccagcgccagcgctgggggcagcacagccaccccaggccccaagcccccagctgtggtgtcccagcaggccgccggcagcaccaccgtgggcgccaccctgacctctgtgtccaccaccaccagcttccccagcacagccagccagctgtgcatccagctgagcagcagcaccagcacccccaccctggccgagaccgtggtggtgtctgcccacagcctggacaagaccagccacagcagcaccaccggcctggccttcagcctgagcgcccccagcagcagcagcagccctggagctggggtgtcctcctacatcagccagcccggcggcctgcaccccctggtgatccccagcgtcatcgccagcacccccatcctgccccaggccgccggccccaccagcacccccctgctgccccaggtgcccagcatcccccccctggtgcagcctgtggccaacgtgcctgctgtgcagcagaccctcatccacagccagccccagcctgccctgctgcccaaccagccccacacccactgcccagaggtggacagcgacacccagcccaaggcccctggcattgatgacatcaagaccctggaggagaagctgcggagcctcttcagcgagcacagcagcagcggggcccagcacgcctctgtgtccctggagaccagcctggtgattgagagcacagtgaccccaggcatccccaccacagctgtggcccccagcaagctgctgaccagcaccaccagcacctgcctgccccccaccaacctgcccctgggcaccgtggccctgcctgtgacccctgtggtgaccccaggccaggtgtccacccctgtgtccaccaccaccagcggcgtgaagccaggcacagcccccagcaagccacccctgaccaaggcccctgtgctgcctgtgggcacagagctgcctgctggcaccctgcccagcgagcagctgccccccttccctggccccagcctgacccagagccagcagcccctggaggacctggatgcccagctgcggaggaccctgagccctgagatgatcaccgtgaccagcgctgtgggccctgtgtccatggccgcccccacagccatcacagaagctggcacccagccccagaagggcgtgtcccaggtgaaggagggccctgtgctggccaccagcagcggggccggggtcttcaagatgggccgcttccaggtgtctgtggccgcagatggagcccagaaggagggcaagaacaagtcagaagatgccaagtctgtgcactttgagagcagcaccagcgagagctctgtgctgagcagcagcagccctgagagcaccctggtgaagccagagcccaacggcatcaccatccctggcatcagcagtgatgtgcctgagagcgcccacaagaccacagccagcgaggccaagagtgacaccggccagcccaccaaggtgggccgcttccaggtgaccaccacagccaacaaggtgggccgcttctctgtgtccaagacagaggacaagatcacagacaccaagaaggagggccctgtggccagcccccccttcatggacctggagcaggccgtgctgcctgctgtgatccccaagaaggagaagccagagctgtctgagcccagccacctgaatggccccagcagtgaccctgaggccgccttcctgagcagagatgtggatgatggcagcggcagcccccacagcccccaccagctgagcagcaagagcctgcccagccagaacctgagccagagcctgagcaacagcttcaacagcagctacatgagcagtgacaatgaaagtgacattgaagatgaggacctgaagctggagctgcggcggctgcgggacaagcacctgaaggagatccaggacctgcagagccggcagaagcatgaaattgagagcctgtacaccaagctgggcaaggtgcccccagctgtgatcatccccccagctgcccccctgtctggaagaagaagaagacccaccaagagcaagggcagcaagagcagccgcagcagcagcctgggcaacaagagcccccagctgagcggcaacctgagcggccagagcgctgcctctgtgctgcacccccagcagaccctgcaccccccaggcaacatccctgagagcggccagaaccagctgctgcagcccctgaagcccagccccagcagtgacaacctgtacagcgccttcaccagtgatggagccatctctgtgcccagcctgagcgcccctggccagggcaccagcagcaccaacacagtgggcgccaccgtgaacagccaggccgcccaggcccagcccccagccatgaccagcagcaggaagggcaccttcacagatgacctgcacaagctggtggacaactgggccagagatgccatgaacctgtctggaagaagaggcagcaagggccacatgaactatgagggccctggcatggccaggaagttcagcgcccctggccagctgtgcatctccatgaccagcaacctgggcggcagcgcccccatctctgctgccagcgccaccagcctgggccacttcaccaagtccatgtgccccccccagcagtatggcttccctgccaccccatttggagcccagtggagcggcaccggcggccctgccccccagcccctgggccagttccagcctgtgggcacagccagcctgcagaacttcaacatcagcaacctgcagaagagcatcagcaaccccccaggcagcaacctgcggaccacctag

SEQ ID NO: 176102 - DNA, 6405 bp, synthetic construct
  misc_feature 1..6405: note = Description of Artificial Sequence: Synthetic coding sequence
  source 1..6405: mol_type = other DNA
atgtctgggggcgctgctgagaagcagagcagcaccccaggcagcctcttcctgagccccccagccccagcccccaagaatggcagcagcagtgacagctctgtgggggagaagctgggcgctgctgctgctgatgctgtgacaggccgcacagaggagtacagaagaagaagacacaccatggacaaggacagcagaggagctgctgccaccaccaccaccacagagcaccgcttcttcagaagaagtgtcatctgtgacagcaatgccacagccctggagctgcccggcctgcccctgagcctgccccagcccagcatcccagctgctgtgccccagagcgcccctcctgagccccaccgggaggagaccgtgacagccacagccaccagccaggtggcccagcagcccccagctgctgctgcccctggagagcaggccgtggccggccctgcccccagcacagtgcccagcagcaccagcaaggacaggcctgtgtcccagcccagcctggtgggcagcaaggaggagcccccaccagcccggagcggcagcggcggcggcagcgccaaggagccccaggaggagaggagccagcagcaggatgacatcgaggagctggagaccaaggctgtgggcatgagcaatgatggccgcttcctgaagtttgatattgaaattggccggggcagcttcaagacagtgtacaagggcctggacacagagaccaccgtggaggtggcctggtgtgagctgcaggacaggaagctgaccaagtctgagcggcagcgcttcaaggaggaggccgagatgctgaagggcctgcagcaccccaacatcgtgcgcttctatgacagctgggagagcacagtgaagggcaagaagtgcatcgtgctggtgacagagctgatgaccagcggcaccctgaagacctacctgaagcgcttcaaggtgatgaagatcaaggtgctgcgctcctggtgccggcagatcctgaagggcctgcagttcctgcacaccaggaccccacccatcatccaccgggacctgaagtgtgacaacatcttcatcaccggccccactggatctgtgaagatcggggacctgggcctggccaccctgaagagggccagctttgccaagagcgtcatcggcaccccagagttcatggcccctgagatgtatgaggagaagtatgatgagagcgtggatgtgtatgccttcggcatgtgcatgctggagatggccaccagcgagtacccctacagcgagtgccagaatgctgcccagatctacagaagagtgaccagcggcgtgaagccagccagctttgacaaggtggccatccctgaggtgaaggagatcatcgagggctgcatccggcagaacaaggatgagcgctacagcatcaaggacctgctgaaccacgccttcttccaggaggagactggagtgcgggtggagctggccgaggaggatgatggagagaagatcgccatcaagctgtggctgagaattgaggacatcaagaagctgaagggcaagtacaaggacaatgaggccatcgagttctcctttgacctggagagagatgtgcctgaagatgtggcccaggagatggtggagagcggctacgtgtgtgagggggaccacaagaccatggccaaggccatcaaggacagagtgtccctcatcaagaggaagcgggagcagaggcagctggtgcgggaggagcaggagaagaagaagcaggaggagagcagcctgaagcagcaggtggagcagagcagcgccagccagacaggcatcaagcagctgcccagcgccagcacaggcatccccacagccagcaccaccagcgcctctgtgtccacccaggtggagcctgaggagcctgaggccgaccagcaccagcagctgcagtaccagcagcccagcatctctgtgctgagtgatggcaccgtggacagcggccagggcagcagcgtcttcacagagagccgggtgagcagccagcagacagtgtcctatggcagccagcacgagcaggcccacagcactggaacagtgcccggccacatccccagcacagtgcaggcccagagccagccccatggagtgtacccacccagctctgtggcccagggccagagccagggccagcccagcagcagcagcctgactggagtgagcagcagccagcccatccagcacccccagcagcagggcatccagcagacagccccaccccagcagacagtgcagtacagcctgagccagaccagcaccagcagcgaggccaccacagcccagcctgtgtcccagccccaggccccccaggtgctgccccaggtgtctgctgggaagcagagcacccagggcgtgtcccaggtggccccagctgagcctgtggccgtggcccagacccaggccacccagcccaccaccctggccagctctgtggacagcgcccacagtgatgtggccagcggcatgtctgatggaaatgaaaatgtgcccagcagcagcggcagacatgagggccgcaccaccaagaggcactacaggaagtctgtgcgcagccgcagcagacatgagaagaccagccggcccaagctgcgcatcctgaatgtgagcaacaagggggacagagtggtggagtgccagctggagacccacaacaggaagatggtgaccttcaagtttgacctggatggagacaaccctgaggagatcgccaccatcatggtgaacaatgacttcatcctggccatcgagcgggagagctttgtggaccaggtgcgggagatcatcgagaaggcagatgagatgctgtctgaagatgtgtctgtggagcctgagggggaccagggcctggagagcctgcagggcaaggatgattatggcttcagcggcagccagaagctggagggggagttcaagcagcccatcccagccagctccatgccccagcagatcggcatccccaccagcagcctgacccaggtggtgcacagcgctggaagacgcttcatcgtgtcccctgtgcctgagagccggctgcgggagagcaaggtgttccccagcgagatcacagacacagtggccgccagcacagcccagagccctggcatgaacctgagccacagcgccagcagcctgagcctgcagcaggccttcagcgagctgcggcgggcccagatgacagagggccccaacacagccccacccaacttcagccacacaggccccaccttccctgtggtgccccccttcctgagcagcattgctggggtgcccaccacagctgctgccacagcccctgtgcctgccaccagcagccccccaaatgacatcagcaccagcgtcatccagagcgaggtgacagtgcccacagaggagggcattgctggggtggccaccagcactggagtggtgaccagcggcggcctgcccatcccccctgtgtctgagagccctgtgctgagctctgtggtgagcagcatcaccatcccagctgtggtgtccatcagcaccaccagccccagcctgcaggtgcccaccagcaccagcgagatcgtggtgagcagcacagccctgtaccccagcgtgacagtgtctgccaccagcgccagcgctgggggcagcacagccaccccaggccccaagcccccagctgtggtgtcccagcaggccgccggcagcaccaccgtgggcgccaccctgacctctgtgtccaccaccaccagcttccccagcacagccagccagctgtgcatccagctgagcagcagcaccagcacccccaccctggccgagaccgtggtggtgtctgcccacagcctggacaagaccagccacagcagcaccaccggcctggccttcagcctgagcgcccccagcagcagcagcagccctggggccggcgtgagcagctacatcagccagcccggcggcctgcaccccctggtgatccccagcgtgattgccagcacccccatcctgccccaggccgccggccccaccagcacccccctgctgccccaggtgcccagcatcccccccctggtgcagcctgtggccaacgtgcctgctgtgcagcagaccctcatccacagccagccccagcctgccctgctgcccaaccagccccacacccactgcccagaggtggacagcgacacccagcccaaggcccctggcattgatgacatcaagaccctggaggagaagctgcggagcctcttcagcgagcacagcagcagcggggcccagcacgcctctgtgtccctggagaccagcctggtgattgagagcacagtgaccccaggcatccccaccacagctgtggcccccagcaagctgctgaccagcaccaccagcacctgcctgccccccaccaacctgcccctgggcaccgtggccctgcctgtgacccctgtggtgaccccaggccaggtgtccacccctgtgtccaccaccaccagcggcgtgaagccaggcacagcccccagcaagccacccctgaccaaggcccctgtgctgcctgtgggcacagagctgcctgctggcaccctgcccagcgagcagctgccccccttccctggccccagcctgacccagagccagcagcccctggaggacctggatgcccagctgcggaggaccctgagccctgagatgatcaccgtgaccagcgctgtgggccctgtgtccatggccgcccccacagccatcacagaggccggcacccagccccagaaggtgtcccaggtgaaggagggccctgtgctggccaccagcagcggggccggggtcttcaagatgggccgcttccaggtgtctgtggccgcagatggagcccagaaggagggcaagaacaagtcagaagatgccaagtctgtgcactttgagagcagcaccagcgagagctctgtgctgagcagcagcagccctgagagcaccctggtgaagccagagcccaacggcatcaccatccctggcatcagcagtgatgtgcctgagagcgcccacaagaccacagccagcgaggccaagagtgacaccggccagcccaccaaggtgggccgcttccaggtgaccaccacagccaacaaggtgggccgcttctctgtgtccaagacagaggacaagatcacagacaccaagaaggagggccctgtggccagcccccccttcatggacctggagcaggccgtgctgcctgctgtgatccccaagaaggagaagccagagctgtctgagcccagccacctgaatggccccagcagtgaccctgaggccgccttcctgagcagagatgtggatgatggcagcggcagcccccacagcccccaccagctgagcagcaagagcctgcccagccagaacctgagccagagcctgagcaacagcttcaacagcagctacatgagcagtgacaatgaaagtgacattgaagatgaggacctgaagctggagctgcggcggctgcgggacaagcacctgaaggagatccaggacctgcagagccggcagaagcatgaaattgagagcctgtacaccaagctgggcaaggtgcccccagctgtgatcatccccccagctgcccccctgtctggaagaagaagaagacccaccaagagcaagggcagcaagagcagccgcagcagcagcctgggcaacaagagcccccagctgagcggcaacctgagcggccagagcgctgcctctgtgctgcacccccagcagaccctgcaccccccaggcaacatccctgagagcggccagaaccagctgctgcagcccctgaagcccagccccagcagtgacaacctgtacagcgccttcaccagtgatggagccatctctgtgcccagcctgagcgcccctggccagggcaccagcagcaccaacacagtgggcgccaccgtgaacagccaggccgcccaggcccagcccccagccatgaccagcagcaggaagggcaccttcacagatgacctgcacaagctggtggacaactgggccagagatgccatgaacctgtctggaagaagaggcagcaagggccacatgaactatgagggccctggcatggccaggaagttcagcgcccctggccagctgtgcatctccatgaccagcaacctgggcggcagcgcccccatctctgctgccagcgccaccagcctgggccacttcaccaagtccatgtgccccccccagcagtatggcttccctgccaccccatttggagcccagtggagcggcaccggcggccctgccccccagcccctgggccagttccagcctgtgggcacagccagcctgcagaacttcaacatcagcaacctgcagaagagcatcagcaaccccccaggcagcaacctgcggaccacctag

SEQ ID NO: 176103 - DNA, 975 bp, synthetic construct
  misc_feature 1..975: note = Description of Artificial Sequence: Synthetic coding sequence
  source 1..975: mol_type = other DNA
atgagcagtgacaatgaaagtgacattgaagatgaggacctgaagctggagctgcggcggctgcgggacaagcacctgaaggagatccaggacctgcagagccggcagaagcatgaaattgagagcctgtacaccaagctgggcaaggtgcccccagctgtgatcatccccccagctgcccccctgtctggaagaagaagaagacccaccaagagcaagggcagcaagagcagccgcagcagcagcctgggcaacaagagcccccagctgagcggcaacctgagcggccagagcgctgcctctgtgctgcacccccagcagaccctgcaccccccaggcaacatccctgagagcggccagaaccagctgctgcagcccctgaagcccagccccagcagtgacaacctgtacagcgccttcaccagtgatggagccatctctgtgcccagcctgagcgcccctggccagggcaccagcagcaccaacacagtgggcgccaccgtgaacagccaggccgcccaggcccagcccccagccatgaccagcagcaggaagggcaccttcacagatgacctgcacaagctggtggacaactgggccagagatgccatgaacctgtctggaagaagaggcagcaagggccacatgaactatgagggccctggcatggccaggaagttcagcgcccctggccagctgtgcatctccatgaccagcaacctgggcggcagcgcccccatctctgctgccagcgccaccagcctgggccacttcaccaagtccatgtgccccccccagcagtatggcttccctgccaccccatttggagcccagtggagcggcaccggcggccctgccccccagcccctgggccagttccagcctgtgggcacagccagcctgcagaacttcaacatcagcaacctgcagaagagcatcagcaaccccccaggcagcaacctgcggaccacctag

SEQ ID NO: 176104 - DNA, 7929 bp, synthetic construct
  misc_feature 1..7929: note = Description of Artificial Sequence: Synthetic coding sequence
  source 1..7929: mol_type = other DNA
atgtctgggggcgctgctgagaagcagagcagcaccccaggcagcctcttcctgagccccccagccccagcccccaagaatggcagcagcagtgacagctctgtgggggagaagctgggcgctgctgctgctgatgctgtgacaggccgcacagaggagtacagaagaagaagacacaccatggacaaggacagcagaggagctgctgccaccaccaccaccacagagcaccgcttcttcagaagaagtgtcatctgtgacagcaatgccacagccctggagctgcccggcctgcccctgagcctgccccagcccagcatcccagctgctgtgccccagagcgcccctcctgagccccaccgggaggagaccgtgacagccacagccaccagccaggtggcccagcagcccccagctgctgctgcccctggagagcaggccgtggccggccctgcccccagcacagtgcccagcagcaccagcaaggacaggcctgtgtcccagcccagcctggtgggcagcaaggaggagcccccaccagcccggagcggcagcggcggcggcagcgccaaggagccccaggaggagaggagccagcagcaggatgacatcgaggagctggagaccaaggctgtgggcatgagcaatgatggccgcttcctgaagtttgatattgaaattggccggggcagcttcaagacagtgtacaagggcctggacacagagaccaccgtggaggtggcctggtgtgagctgcaggacaggaagctgaccaagtctgagcggcagcgcttcaaggaggaggccgagatgctgaagggcctgcagcaccccaacatcgtgcgcttctatgacagctgggagagcacagtgaagggcaagaagtgcatcgtgctggtgacagagctgatgaccagcggcaccctgaagacctacctgaagcgcttcaaggtgatgaagatcaaggtgctgcgctcctggtgccggcagatcctgaagggcctgcagttcctgcacaccaggaccccacccatcatccaccgggacctgaagtgtgacaacatcttcatcaccggccccactggatctgtgaagatcggggacctgggcctggccaccctgaagagggccagctttgccaagagcgtcatcggcaccccagagttcatggcccctgagatgtatgaggagaagtatgatgagagcgtggatgtgtatgccttcggcatgtgcatgctggagatggccaccagcgagtacccctacagcgagtgccagaatgctgcccagatctacagaagagtgaccagcggcgtgaagccagccagctttgacaaggtggccatccctgaggtgaaggagatcatcgagggctgcatccggcagaacaaggatgagcgctacagcatcaaggacctgctgaaccacgccttcttccaggaggagactggagtgcgggtggagctggccgaggaggatgatggagagaagatcgccatcaagctgtggctgagaattgaggacatcaagaagctgaagggcaagtacaaggacaatgaggccatcgagttctcctttgacctggagagagatgtgcctgaagatgtggcccaggagatggtggagagcggctacgtgtgtgagggggaccacaagaccatggccaaggccatcaaggacagagtgtccctcatcaagaggaagcgggagcagaggcagctggtgcgggaggagcaggagaagaagaagcaggaggagagcagcctgaagcagcaggtggagcagagcagcgccagccagacaggcatcaagcagctgcccagcgccagcacaggcatccccacagccagcaccaccagcgcctctgtgtccacccaggtggagcctgaggagcctgaggccgaccagcaccagcagctgcagtaccagcagcccagcatctctgtgctgagtgatggcaccgtggacagcggccagggcagcagcgtcttcacagagagccgggtgagcagccagcagacagtgtcctatggcagccagcacgagcaggcccacagcactggaacagtgcccggccacatccccagcacagtgcaggcccagagccagccccatggagtgtacccacccagctctgtgccccagagcatggcccacccctgtggcggcacccccacctacccagagagccagatcttcttccccaccatccacgagaggcctgtgtccttcagccccccacccacctgcccccccaaggtggccatcagccagaggaggaagagcaccagcttcctggaggcccagacccaccacttccagcccctgctgaggacagtgggccagagcctgctgcccccaggcggcagccccaccaactggaccccagaggccgtggtgatgctgggcaccacagccagccgggtgactggagagagctgtgagatccaggtgcaccccatgtttgagcccagccaggtgtacagcgactacagacctggcctggtgctgcctgaggaggcccactacttcatcccccaggaggccgtgtatgtggccggcgtgcactaccaggcccgggtggccgagcagtatgagggcatcccctacaacagctctgtgctgagcagccccatgaagcagatccctgagcagaagcctgtgcagggcggccccaccagcagctctgtgtttgagttccccagcggccaggccttcctggtgggccacctgcagaacctgcggctggacagcggcctgggccctggcagccccctgagcagcatcagcgcccccatcagcacagatgccacccggctgaagttccaccctgtgtttgtgccccacagcgccccagctgtgctgacccacaacaatgaaagccgcagcaactgtgtgtttgagttccacgtgcacacccccagcagcagcagcggggagggcggcggcatcctgccccagagggtgtacagaaaccggcaggtggccgtggacctgaaccaggaggagctgcccccccagagcgtgggcctgcacggctacctgcagcctgtgacagaggagaagcacaactaccacgcccctgagctgactgtgtctgtggtggagcccatcggccagaactggcccatcggcagccctgagtacagcagtgacagcagccagatcaccagcagtgaccccagcgacttccagagccccccacccaccggcggggccgccgccccctttggaagtgatgtgtccatgcccttcatccacctgccccagacagtgctgcaggagagccccctcttcttctgcttcccccagggcaccaccagccagcaggtgctgacagccagcttcagcagcggcggcagcgccctgcacccccaggcccagggccagagccagggccagcccagcagcagcagcctgactggagtgagcagcagccagcccatccagcacccccagcagcagcagggcatccagcagacagccccaccccagcagacagtgcagtacagcctgagccagaccagcaccagcagcgaggccaccacagcccagcctgtgtcccagccccaggccccccaggtgctgccccaggtgtctgctgggaagcagggcttccccccccggctgcccccccagtacccaggggacagcaacatcgcccccagcagcaatgtggcctctgtgtgcatccacagcacagtgctgagcccccccatgcccacagaggtgctggccaccccaggctacttccccaccgtggtgcagccctacgtggagagcaacctgctggtgcccatgggcggcgtgggcggccaggtgcaggtgtcccagcccggcggcagcctggcccaggcccccaccaccagcagccagcaggccgtgctggagagcacccagggcgtgtcccaggtggccccagctgagcctgtggccgtggcccagacccaggccacccagcccaccaccctggccagctctgtggacagcgcccacagtgatgtggccagcggcatgtctgatggaaatgaaaatgtgcccagcagcagcggcagacatgagggccgcaccaccaagaggcactacaggaagtctgtgcgcagccgcagcagacatgagaagaccagccggcccaagctgcgcatcctgaatgtgagcaacaagggggacagagtggtggagtgccagctggagacccacaacaggaagatggtgaccttcaagtttgacctggatggagacaaccctgaggagatcgccaccatcatggtgaacaatgacttcatcctggccatcgagcgggagagctttgtggaccaggtgcgggagatcatcgagaaggcagatgagatgctgtctgaagatgtgtctgtggagcctgagggggaccagggcctggagagcctgcagggcaaggatgattatggcttcagcggcagccagaagctggagggggagttcaagcagcccatcccagccagctccatgccccagcagatcggcatccccaccagcagcctgacccaggtggtgcacagcgctggccgccgcttcatcgtgtcccctgtgcctgagagccggctgcgggagagcaaggtgttccccagcgagatcacagacacagtggccgccagcacagcccagagccctggcatgaacctgagccacagcgccagcagcctgagcctgcagcaggccttcagcgagctgcggcgggcccagatgacagagggccccaacacagccccacccaacttcagccacacaggccccaccttccctgtggtgccccccttcctgagcagcattgctggggtgcccaccacagctgctgccacagcccctgtgcctgccaccagcagccccccaaatgacatcagcaccagcgtcatccagagcgaggtgacagtgcccacagaggagggcattgctggggtggccaccagcactggagtggtgaccagcggcggcctgcccatcccccctgtgtctgagagccctgtgctgagctctgtggtgagcagcatcaccatcccagctgtggtgtccatcagcaccaccagccccagcctgcaggtgcccaccagcaccagcgagatcgtggtgagcagcacagccctgtaccccagcgtgacagtgtctgccaccagcgccagcgctgggggcagcacagccaccccaggccccaagcccccagctgtggtgtcccagcaggccgccggcagcaccaccgtgggcgccaccctgacctctgtgtccaccaccaccagcttccccagcacagccagccagctgtgcatccagctgagcagcagcaccagcacccccaccctggccgagaccgtggtggtgtctgcccacagcctggacaagaccagccacagcagcaccaccggcctggccttcagcctgagcgcccccagcagcagcagcagccctggagctggggtgtcctcctacatcagccagcccggcggcctgcaccccctggtgatccccagcgtcatcgccagcacccccatcctgccccaggccgccggccccaccagcacccccctgctgccccaggtgcccagcatcccccccctggtgcagcctgtggccaacgtgcctgctgtgcagcagaccctcatccacagccagccccagcctgccctgctgcccaaccagccccacacccactgcccagaggtggacagcgacacccagcccaaggcccctggcattgatgacatcaagaccctggaggagaagctgcggagcctcttcagcgagcacagcagcagcggggcccagcacgcctctgtgtccctggagaccagcctggtgattgagagcacagtgaccccaggcatccccaccacagctgtggcccccagcaagctgctgaccagcaccaccagcacctgcctgccccccaccaacctgcccctgggcaccgtggccctgcctgtgacccctgtggtgaccccaggccaggtgtccacccctgtgtccaccaccaccagcggcgtgaagccaggcacagcccccagcaagccacccctgaccaaggcccctgtgctgcctgtgggcacagagctgcctgctggcaccctgcccagcgagcagctgccccccttccctggccccagcctgacccagagccagcagcccctggaggacctggatgcccagctgcggaggaccctgagccctgagatgatcaccgtgaccagcgctgtgggccctgtgtccatggccgcccccacagccatcacagaagctggcacccagccccagaagggcgtgtcccaggtgaaggagggccctgtgctggccaccagcagcggggccggggtcttcaagatgggccgcttccaggtgtctgtggccgcagatggagcccagaaggagggcaagaacaagtcagaagatgccaagtctgtgcactttgagagcagcaccagcgagagctctgtgctgagcagcagcagccctgagagcaccctggtgaagccagagcccaacggcatcaccatccctggcatcagcagtgatgtgcctgagagcgcccacaagaccacagccagcgaggccaagagtgacaccggccagcccaccaaggtgggccgcttccaggtgaccaccacagccaacaaggtgggccgcttctctgtgtccaagacagaggacaagatcacagacaccaagaaggagggccctgtggccagcccccccttcatggacctggagcaggccgtgctgcctgctgtgatccccaagaaggagaagccagagctgtctgagcccagccacctgaatggccccagcagtgaccctgaggccgccttcctgagcagagatgtggatgatggcagcggcagcccccacagcccccaccagctgagcagcaagagcctgcccagccagaacctgagccagagcctgagcaacagcttcaacagcagctacatgagcagtgacaatgaaagtgacattgaagatgaggacctgaagctggagctgcggcggctgcgggacaagcacctgaaggagatccaggacctgcagagccggcagaagcatgaaattgagagcctgtacaccaagctgggcaaggtgcccccagctgtgatcatccccccagctgcccccctgtctggaagaagaagaagacccaccaagagcaagggcagcaagagcagccgcagcagcagcctgggcaacaagagcccccagctgagcggcaacctgagcggccagagcgctgcctctgtgctgcacccccagcagaccctgcaccccccaggcaacatccctgagagcggccagaaccagctgctgcagcccctgaagcccagccccagcagtgacaacctgtacagcgccttcaccagtgatggagccatctctgtgcccagcctgagcgcccctggccagggcaccagcagcaccaacacagtgggcgccaccgtgaacagccaggccgcccaggcccagcccccagccatgaccagcagcaggaagggcaccttcacagatgacctgcacaagctggtggacaactgggccagagatgccatgaacctgtctggaagaagaggcagcaagggccacatgaactatgagggccctggcatggccaggaagttcagcgcccctggccagctgtgcatctccatgaccagcaacctgggcggcagcgcccccatctctgctgccagcgccaccagcctgggccacttcaccaagtccatgtgccccccccagcagtatggcttccctgccaccccatttggagcccagtggagcggcaccggcggccctgccccccagcccctgggccagttccagcctgtgggcacagccagcctgcagaacttcaacatcagcaacctgcagaagagcatcagcaaccccccaggcagcaacctgcggaccacctag

SEQ ID NO: 176105 - DNA, 6894 bp, synthetic construct
  misc_feature 1..6894: note = Description of Artificial Sequence: Synthetic coding sequence
  source 1..6894: mol_type = other DNA
atggatggagatggcggcagaagagatgtgcccggcaccctgatggagcccggcagaggagctggccctgctggcatggccgagccccgggccaaggccgcccggcccggcccccagcgcttcctgcggcgctctgtggtggagagtgaccaggaggagcccccaggcctggaggccgctgaggcccctggcccccagcccccccagcccctgcagaggagagtgctgctgctgtgcaagacccggcggctgattgctgagcgggcccggggccggcctgctgccccagccccagctgccctggtggcccagcccggggcccctggggccccagcagatgctggccctgagcctgtgggcacccaggagcccggccctgaccccatcgctgctgctgtggagacagccccagccccagatggcggcccccgggaggaggccgccgccaccgtgaggaaggaggatgaaggagctgctgaggccaagccagagcccggccgcaccaggagagatgagcctgaggaggaggaggatgatgaagatgacctgaaggctgtggccaccagcctggatggccgcttcctgaagtttgatattgagctgggccggggcagcttcaagacagtgtacaagggcctggacacagagacctgggtggaggtggcctggtgtgagctgcaggacaggaagctgaccaagctggagcggcagcgcttcaaggaggaggccgagatgctgaagggcctgcagcaccccaacatcgtgcgcttctatgacttctgggagagcagcgccaagggcaagcgctgcatcgtgctggtgacagagctgatgaccagcggcaccctgaagacctacctgaagcgcttcaaggtgatgaagcccaaggtgctgcgctcctggtgccggcagatcctgaagggcctgctcttcctgcacaccaggaccccacccatcatccaccgggacctgaagtgtgacaacatcttcatcaccggccccactggatctgtgaagatcggggacctgggcctggccaccctgaagagggccagctttgccaagagcgtcatcggcaccccagagttcatggcccctgagatgtatgaggagcactatgatgagagcgtggatgtgtatgccttcggcatgtgcatgctggagatggccaccagcgagtacccctacagcgagtgccagaatgctgcccagatctacaggaaggtgacctgtggcatcaagccagccagctttgagaaggtgcatgaccctgagatcaaggagatcatcggggagtgcatctgcaagaacaaggaggagagatatgagatcaaggacctgctgagccacgccttctttgctgaagatactggagtgcgggtggagctggccgaggaggaccacggcaggaagagcaccatcgccctgcggctgtgggtggaggaccccaagaagctgaagggcaagcccaaggacaatggagccatcgagttcacctttgacctggagaaggagaccccagatgaggtggcccaggagatgattgaaagtggcttcttccatgaaagtgatgtgaagatcgtggccaagagcatccgggacagagtggccctgatccagtggaggcgggagcgcatctggccagccctgcagcccaaggagcagcaggatgtgggcagcccagacaaggcccggggcccccctgtgcccctgcaggtgcaggtgacctaccacgcccaggccggccagcccggccccccagagcctgaggagcctgaggccgaccagcacctgctgccccccaccctgcccaccagcgccaccagcctggccagtgacagcacctttgacagcggccagggcagcacagtgtacagcgacagccagagcagccagcagagcgtgatgctgggcagcctggctgatgctgcccccagccctgcccagtgtgtgtgcagcccccctgtgtctgagggccctgtgctgccccagagcctgcccagcctgggcgcctaccagcagcccacagctgcccctggcctgcctgtgggctctgtgcctgccccagcctgcccccccagcctgcagcagcacttcccagaccctgccatgagctttgcccctgtgctgcccccacccagcacccccatgcccactggacctggccagcctgcccctcctggccagcagcccccacccctggcccagcccacccccctgccccaggtgctggccccccagcctgtggtgcccctgcagcctgtgcccccccacctgcccccctacctggccccagccagccaggtgggcgccccagcccagctgaagcccctgcagatgccccaggcccccctgcagcccctggcccaggtgcccccccagatgccacccatccctgtggtgccccccatcacccccctggccggcattgatggcctgcccccagccctgcctgacctgcccacagccaccgtgccccctgtgcccccaccccagtacttcagccctgctgtgatcctgcccagcctggccgcccccctgcccccagccagccctgccctgcccctgcaggccgtgaagctgccccaccccccaggggcccccctggccatgccctgcaggaccatcgtgcccaatgccccagccaccatccccctgctggccgtggcccctcctggggtggccgccctgagcatccacagcgctgtggcccagctgcccggccagcctgtgtacccagctgccttcccccagatggcccccacagatgtgccccccagcccccaccacacagtgcagaacatgagggccaccccaccccagcctgccctgcccccccagcccaccctgcccccccagcctgtgctgcccccccagcccaccctgcccccccagcctgtgctgcccccccagcccaccaggcctccccagcctgtgctgcccccccagcccatgctgcccccccagcctgtgctgcccccccagcctgccctgcctgtgcggcctgagcccctgcagccccacctgcctgagcaggccgccccagctgccaccccaggcagccagatcctgctgggccacccagccccctatgctgtggatgtggccgcccaggtgcccaccgtgcctgtgcccccagctgctgtgctgagcccccccctgcctgaggtgctgctgcctgctgcccctgagctgctgccccagttccccagcagcctggccaccgtgtctgcctctgtgcagagcgtgcccacccagacagccaccctgctgcccccagccaacccccccctgcccggcggccctggcatcgccagcccctgccccaccgtgcagctgactgtggagcctgtgcaggaggagcaggccagccaggacaagcccccaggcctgccccagagctgtgagagctatggaggcagtgatgtgaccagcggcaaggagctgagtgacagctgtgagggcgcctttggaggcggccgcctggagggccgggccgccaggaagcaccaccggcgcagcacccgggcccggagccggcaggagcgggccagccggccccggctgaccatcctgaatgtgtgcaacacaggagacaagatggtggagtgccagctggagacccacaaccacaagatggtgaccttcaagtttgacctggatggagatgccccagatgagatcgccacctacatggtggagcatgacttcatcctgcaggccgagcgggagaccttcatcgagcagatgaaggatgtgatggacaaggccgaggacatgctgtctgaggacacagatgctgaccggggcagtgaccccggcaccagccccccccacctgagcacctgtggcctgggcactggagaggagagccggcagagccaggccaatgcccctgtgtaccagcagaatgtgctgcacacaggcaagcgctggttcatcatctgccctgtggccgagcacccagcccctgaggcccctgagagcagcccccccctgcccctgagcagcctgcccccagaggccagccagggcccctgccggggcctgaccctgccctgcctgccctggaggcgggccgcctgtggggctgtgttcctgagcctcttctctgctgagagcgcccagagcaagcagcccccagattctgccccctacaaggaccagctgagcagcaaggagcagcccagcttcctggccagccagcagctgctgagccaggccggccccagcaaccccccaggggcccccccagcccccctggcccccagcagcccccctgtgacagccctgccccaggatggagctgccccagccaccagcaccatgcctgagcccgccagcggcacagccagccaggccggcggccctggcaccccccagggcctgaccagcgagctggagaccagccagcccctggccgagacccatgaggcccccctggccgtgcagcccctggtggtgggcctggccccctgcaccccagcccctgaggccgccagcaccagagatgccagcgccccccgggagcccctgcccccaccagcccctgagcccagcccccacagcggcaccccccagcctgccctgggccagcctgcccccctgctgcctgctgctgtgggcgctgtgtccctggccaccagccagctgcccagcccccccctgggccccaccgtgcccccccagccccccagcgccctggagagtgatggagagggccccccaccccgggtgggctttgtggacagcaccatcaagagcctggatgagaagctgcggaccctgctgtaccaggagcacgtgcccaccagcagcgccagcgctggcacccctgtggaggtgggggaccgggacttcaccctggagcccctgcggggggaccagcccaggtctgaggtgtgtggcggggacctggccctgccccctgtgcccaaggaggccgtgtctggccgggtgcagctgccccagcccctggtggagaagtctgagctggcccccaccagaggagctgtgatggagcagggcaccagcagctccatgacagctgagagcagccccaggtccatgctgggctatgacagagatggccggcaggtggccagtgacagccacgtggtgcccagcgtgccccaggatgtgcctgcctttgtgcggcctgcccgggtggagcccacagacagagatggaggagaggccggggagagcagcgctgagcccccacccagcgacatgggcaccgtgggcggccaggccagccacccccagaccctgggcgcccgggccctgggcagccccaggaagaggcctgagcagcaggatgtgagcagccctgccaagacagtgggccgcttctctgtggtgtccacccaggatgagtggaccctggccagcccccacagcctgcgctacagcgcccccccagatgtgtacctggatgaggcccccagcagcccagatgtgaagctggccgtgcggcgggcccagacagccagcagcattgaggtgggcgtgggggagcctgtgtccagtgacagcggagatgagggcccccgggcccggccccctgtgcagaagcaggccagcctgcctgtgtctggctctgtggccggggactttgtgaagaaggccacagccttcctgcagaggcccagcagagctggcagcctgggccctgagacccccagccgggtgggcatgaaggtgcccaccatctctgtgaccagcttccacagccagagcagctacatcagcagtgacaatgattctgagctggaggatgctgacatcaagaaggagctgcagagcctgcgggagaagcacctgaaggagatcagcgagctgcagagccagcagaagcaggagattgaggccctgtacagaaggctgggcaagcccctgccccccaacgtgggcttcttccacacagccccacccaccggcagaagaaggaagaccagcaagagcaagctgaaggccggcaagctgctgaaccccctggtgcggcagctgaaggtggtggccagcagcacaggccacctggccgacagcagccggggccccccagccaaggaccctgcccaggcctctgtgggcctgacagctgacagcacaggcctgagcggcaaggctgtgcagacccagcagccctgcagcgtgcgggccagcctgagcagtgacatctgcagcggcctggccagtgatggcggcggggcccggggccagggctggacagtgtaccaccccaccagcgagcgggtgacctacaagagcagcagcaagccccgggcccgcttcctgagcggccctgtgtctgtgtccatctggagcgccctgaagaggctgtgcctgggcaaggagcacagcagccgcagcagcaccagcagcctggcccctggccctgagcccggcccccagcctgccctgcacgtgcaggcccaggtgaacaacagcaacaacaagaagggcaccttcacagatgacctgcacaagctggtggatgagtggaccagcaagacagtgggcgccgcccagctgaagcccaccctgaaccagctgaagcagacccagaagctgcaggacatggaggcccaggccggctgggccgcccctggagaggcccgggccatgacagcccccagggctggggtgggcatgccccggctgcccccagcccctggccccctgagcaccaccgtcatccctggagctgcccccaccctgtctgtgcccaccccagatggagccctgggcacagcccggaggaaccaggtgtggtttggcctgcgggtgcccccaacagcctgctgcggccacagcacccagccccggggcggccagagggtgggcagcaagacagccagctttgctgccagtgaccctgtgcgctcctag

SEQ ID NO: 176106 - DNA, 5601 bp, synthetic construct
  misc_feature 1..5601: note = Description of Artificial Sequence: Synthetic coding sequence
  source 1..5601: mol_type = other DNA
atggccaccagcgagtacccctacagcgagtgccagaatgctgcccagatctacaggaaggtgacctgtggcatcaagccagccagctttgagaaggtgcatgaccctgagatcaaggagatcatcggggagtgcatctgcaagaacaaggaggagagatatgagatcaaggacctgctgagccacgccttctttgctgaagatactggagtgcgggtggagctggccgaggaggaccacggcaggaagagcaccatcgccctgcggctgtgggtggaggaccccaagaagctgaagggcaagcccaaggacaatggagccatcgagttcacctttgacctggagaaggagaccccagatgaggtggcccaggagatgattgaaagtggcttcttccatgaaagtgatgtgaagatcgtggccaagagcatccgggacagagtggccctgatccagtggaggcgggagcgcatctggccagccctgcagcccaaggagcagcaggatgtgggcagcccagacaaggcccggggcccccctgtgcccctgcaggtgcaggtgacctaccacgcccaggccggccagcccggccccccagagcctgaggagcctgaggccgaccagcacctgctgccccccaccctgcccaccagcgccaccagcctggccagtgacagcacctttgacagcggccagggcagcacagtgtacagcgacagccagagcagccagcagagcgtgatgctgggcagcctggctgatgctgcccccagccctgcccagtgtgtgtgcagcccccctgtgtctgagggccctgtgctgccccagagcctgcccagcctgggcgcctaccagcagcccacagctgcccctggcctgcctgtgggctctgtgcctgccccagcctgcccccccagcctgcagcagcacttcccagaccctgccatgagctttgcccctgtgctgcccccacccagcacccccatgcccactggacctggccagcctgcccctcctggccagcagcccccacccctggcccagcccacccccctgccccaggtgctggccccccagcctgtggtgcccctgcagcctgtgcccccccacctgcccccctacctggccccagccagccaggtgggcgccccagcccagctgaagcccctgcagatgccccaggcccccctgcagcccctggcccaggtgcccccccagatgccacccatccctgtggtgccccccatcacccccctggccggcattgatggcctgcccccagccctgcctgacctgcccacagccaccgtgccccctgtgcccccaccccagtacttcagccctgctgtgatcctgcccagcctggccgcccccctgcccccagccagccctgccctgcccctgcaggccgtgaagctgccccaccccccaggggcccccctggccatgccctgcaggaccatcgtgcccaatgccccagccaccatccccctgctggccgtggcccctcctggggtggccgccctgagcatccacagcgctgtggcccagctgcccggccagcctgtgtacccagctgccttcccccagatggcccccacagatgtgccccccagcccccaccacacagtgcagaacatgagggccaccccaccccagcctgccctgcccccccagcccaccctgcccccccagcctgtgctgcccccccagcccaccctgcccccccagcctgtgctgcccccccagcccaccaggcctccccagcctgtgctgcccccccagcccatgctgcccccccagcctgtgctgcccccccagcctgccctgcctgtgcggcctgagcccctgcagccccacctgcctgagcaggccgccccagctgccaccccaggcagccagatcctgctgggccacccagccccctatgctgtggatgtggccgcccaggtgcccaccgtgcctgtgcccccagctgctgtgctgagcccccccctgcctgaggtgctgctgcctgctgcccctgagctgctgccccagttccccagcagcctggccaccgtgtctgcctctgtgcagagcgtgcccacccagacagccaccctgctgcccccagccaacccccccctgcccggcggccctggcatcgccagcccctgccccaccgtgcagctgactgtggagcctgtgcaggaggagcaggccagccaggacaagcccccaggcctgccccagagctgtgagagctatggaggcagtgatgtgaccagcggcaaggagctgagtgacagctgtgagggcgcctttggaggcggccgcctggagggccgggccgccaggaagcaccaccggcgcagcacccgggcccggagccggcaggagcgggccagccggccccggctgaccatcctgaatgtgtgcaacacaggagacaagatggtggagtgccagctggagacccacaaccacaagatggtgaccttcaagtttgacctggatggagatgccccagatgagatcgccacctacatggtggagcatgacttcatcctgcaggccgagcgggagaccttcatcgagcagatgaaggatgtgatggacaaggccgaggacatgctgtctgaggacacagatgctgaccggggcagtgaccccggcaccagccccccccacctgagcacctgtggcctgggcactggagaggagagccggcagagccaggccaatgcccctgtgtaccagcagaatgtgctgcacacaggcaagcgctggttcatcatctgccctgtggccgagcacccagcccctgaggcccctgagagcagcccccccctgcccctgagcagcctgcccccagaggccagccagggcccctgccggggcctgaccctgccctgcctgccctggaggcgggccgcctgtggggctgtgttcctgagcctcttctctgctgagagcgcccagagcaagcagcccccagattctgccccctacaaggaccagctgagcagcaaggagcagcccagcttcctggccagccagcagctgctgagccaggccggccccagcaaccccccaggggcccccccagcccccctggcccccagcagcccccctgtgacagccctgccccaggatggagctgccccagccaccagcaccatgcctgagcccgccagcggcacagccagccaggccggcggccctggcaccccccagggcctgaccagcgagctggagaccagccagcccctggccgagacccatgaggcccccctggccgtgcagcccctggtggtgggcctggccccctgcaccccagcccctgaggccgccagcaccagagatgccagcgccccccgggagcccctgcccccaccagcccctgagcccagcccccacagcggcaccccccagcctgccctgggccagcctgcccccctgctgcctgctgctgtgggcgctgtgtccctggccaccagccagctgcccagcccccccctgggccccaccgtgcccccccagccccccagcgccctggagagtgatggagagggccccccaccccgggtgggctttgtggacagcaccatcaagagcctggatgagaagctgcggaccctgctgtaccaggagcacgtgcccaccagcagcgccagcgctggcacccctgtggaggtgggggaccgggacttcaccctggagcccctgcggggggaccagcccaggtctgaggtgtgtggcggggacctggccctgccccctgtgcccaaggaggccgtgtctggccgggtgcagctgccccagcccctggtggagaagtctgagctggcccccaccagaggagctgtgatggagcagggcaccagcagctccatgacagctgagagcagccccaggtccatgctgggctatgacagagatggccggcaggtggccagtgacagccacgtggtgcccagcgtgccccaggatgtgcctgcctttgtgcggcctgcccgggtggagcccacagacagagatggaggagaggccggggagagcagcgctgagcccccacccagcgacatgggcaccgtgggcggccaggccagccacccccagaccctgggcgcccgggccctgggcagccccaggaagaggcctgagcagcaggatgtgagcagccctgccaagacagtgggccgcttctctgtggtgtccacccaggatgagtggaccctggccagcccccacagcctgcgctacagcgcccccccagatgtgtacctggatgaggcccccagcagcccagatgtgaagctggccgtgcggcgggcccagacagccagcagcattgaggtgggcgtgggggagcctgtgtccagtgacagcggagatgagggcccccgggcccggccccctgtgcagaagcaggccagcctgcctgtgtctggctctgtggccggggactttgtgaagaaggccacagccttcctgcagaggcccagcagagctggcagcctgggccctgagacccccagccgggtgggcatgaaggtgcccaccatctctgtgaccagcttccacagccagagcagctacatcagcagtgacaatgattctgagctggaggatgctgacatcaagaaggagctgcagagcctgcgggagaagcacctgaaggagatcagcgagctgcagagccagcagaagcaggagattgaggccctgtacagaaggctgggcaagcccctgccccccaacgtgggcttcttccacacagccccacccaccggcagaagaaggaagaccagcaagagcaagctgaaggccggcaagctgctgaaccccctggtgcggcagctgaaggtggtggccagcagcacaggccacctggccgacagcagccggggccccccagccaaggaccctgcccaggcctctgtgggcctgacagctgacagcacaggcctgagcggcaaggctgtgcagacccagcagccctgcagcgtgcgggccagcctgagcagtgacatctgcagcggcctggccagtgatggcggcggggcccggggccagggctggacagtgtaccaccccaccagcgagcgggtgacctacaagagcagcagcaagccccgggcccgcttcctgagcggccctgtgtctgtgtccatctggagcgccctgaagaggctgtgcctgggcaaggagcacagcagccgcagcagcaccagcagcctggcccctggccctgagcccggcccccagcctgccctgcacgtgcaggcccaggtgaacaacagcaacaacaagaagggcaccttcacagatgacctgcacaagctggtggatgagtggaccagcaagacagtgggcgccgcccagctgaagcccaccctgaaccagctgaagcagacccagaagctgcaggacatggaggcccaggccggctgggccgcccctggagaggcccgggccatgacagcccccagggctggggtgggcatgccccggctgcccccagcccctggccccctgagcaccaccgtcatccctggagctgcccccaccctgtctgtgcccaccccagaccctgagagcgagaagccagactag

SEQ ID NO: 176107 - DNA, 1092 bp, synthetic construct
  misc_feature 1..1092: note = Description of Artificial Sequence: Synthetic coding sequence
  source 1..1092: mol_type = other DNA
atggagcagggcaccagcagctccatgacagagagcagccccaggtccatgctgggctatgacagagatggccggcaggtggccagtgacagccacgtggtgcccagcgtgccccaggatgtgcctgcctttgtgcggcctgcccgggtggagcccacagacagagatggaggagaggccggggagagcagcgctgagcccccacccagcgacatgggcaccgtgggcggccaggccagccacccccagaccctgggcgcccgggccctgggcagccccaggaagaggcctgagcagcaggatgtgagcagccctgccaagacagtgggccgcttctctgtggtgtccacccaggatgagtggaccctggccagcccccacagcctgcgctacagcgcccccccagatgtgtacctggatgaggcccccagcagcccagatgtgaagctggccgtgagaagagcccagacagccagcagcattgaggtgggcgtgggggagcctgtgtccagtgacagcggagatgagggcccccgggcccggccccctgtgcagaagcaggccagcctgcctgtgtctggctctgtggccggggactttgtgaagaaggccaccagctgccggggcctgctgggccccagcctgggccctgagacccccagccgggtgggcatgaaggtgcccaccatctctgtgaccagcttccacagccagagcagctacatcagcagtgacaatgacagcgagctggaggatgctgacatcaagaaggagctgcagagcctgcgggagaagcacctgaaggagatcagcgagctgcagagccagcagaagcaggagattgaggccctgtaccgccgcctgggcaagcccctgcccccaaatgtgggcttcttccacacagcccccccaactggaagaagaaggaagaccagcaagagcaagctgaaggccggcaagctgctgaaccccctggtgcggcagctgaaggtggtggccagcagcacaggccacctggccgacagcagccggggccccccagccaaggaccccaagcctgtgtggggcagcctgcagacagcccgggcctag

SEQ ID NO: 176108 - DNA, 2340 bp, synthetic construct
  misc_feature 1..2340: note = Description of Artificial Sequence: Synthetic coding sequence
  source 1..2340: mol_type = other DNA
atggagcccggcagaggagctggccctgctggcatggccgagccccgggccaaggccgcccggcccggcccccagcgcttcctgcggcgctctgtggtggagagtgaccaggaggagcccccaggcctggaggccgctgaggcccctggcccccagcccccccagcccctgcagaggagagtgctgctgctgtgcaagacccggcggctgattgctgagcgggcccggggccggcctgctgccccagccccagctgccctggtggcccagcccggggcccctggggccccagcagatgctggccctgagcctgtgggcacccaggagcccggccctgaccccatcgctgctgctgtggagacagccccagccccagatggcggcccccgggaggaggccgccgccaccgtgaggaaggaggatgaaggagctgctgaggccaagccagagcccggccgcaccaggagagatgagcctgaggaggaggaggatgatgaagatgacctgaaggctgtggccaccagcctggatggccgcttcctgaagtttgatattgagctgggccggggcagcttcaagacagtgtacaagggcctggacacagagacctgggtggaggtggcctggtgtgagctgcaggacaggaagctgaccaagctggagcggcagcgcttcaaggaggaggccgagatgctgaagggcctgcagcaccccaacatcgtgcgcttctatgacttctgggagagcagcgccaagggcaagcgctgcatcgtgctggtgacagagctgatgaccagcggcaccctgaagacctacctgaagcgcttcaaggtgatgaagcccaaggtgctgcgctcctggtgccggcagatcctgaagggcctgctcttcctgcacaccaggaccccacccatcatccaccgggacctgaagtgtgacaacatcttcatcaccggccccactggatctgtgaagatcggggacctgggcctggccaccctgaagagggccagctttgccaagagcgtcatcggcaccccagagttcatggcccctgagatgtatgaggagcactatgatgagagcgtggatgtgtatgccttcggcatgtgcatgctggagatggccaccagcgagtacccctacagcgagtgccagaatgctgcccagatctacaggaaggtgacctgtggcatcaagccagccagctttgagaaggtgcatgaccctgagatcaaggagatcatcggggagtgcatctgcaagaacaaggaggagagatatgagatcaaggacctgctgagccacgccttctttgctgaagatactggagtgcgggtggagctggccgaggaggaccacggcaggaagagcaccatcgccctgcggctgtgggtggaggaccccaagaagctgaagggcaagcccaaggacaatggagccatcgagttcacctttgacctggagaaggagaccccagatgaggtggcccaggagatgattgaaagtggcttcttccatgaaagtgatgtgaagatcgtggccaagagcatccgggacagagtggccctgatccagtggaggcgggagcgcatctggccagccctgcagcccaaggagcagcaggatgtgggcagcccagacaaggcccggggcccccctgtgcccctgcaggtgcaggtgacctaccacgcccaggccggccagcccggccccccagagcctgaggagcctgaggccgaccagcacctgctgccccccaccctgcccaccagcgccaccagcctggccagtgacagcacctttgacagcggccagggcagcacagtgtacagcgacagccagagcagccagcagagcgtgatgctgggcagcctggctgatgctgcccccagccctgcccagtgtgtgtgcagcccccctgtgtctgagggccctgtgctgccccagagcctgcccagcctgggcgcctaccagcagcccacagctgcccccccacccctggcccagcccacccccctgccccaggtgctggccccccagcctgtggtgcccctgcagcctgtgcccccccacctgcccccctacctggccccagccagccaggtgggcgccccagcccagctgaagcccctgcagatgccccaggcccccctgcagcccctggcccaggtgcccccccagatgccacccatccctgtggtgccccccatcacccccctggccggcattgatggcctgcccccagccctgcctgacctgcccacagccaccgtgccccctgtgcccccaccccagtacttcagccctgctgtgatcctgcccagcctggccgcctag

SEQ ID NO: 176109 - DNA, 6654 bp, synthetic construct
  misc_feature 1..6654: note = Description of Artificial Sequence: Synthetic coding sequence
  source 1..6654: mol_type = other DNA
atggatggagatggcggcagaagagatgtgcccggcaccctgatggagcccggcagaggagctggccctgctggcatggccgagccccgggccaaggccgcccggcccggcccccagcgcttcctgcggcgctctgtggtggagagtgaccaggaggagcccccaggcctggaggccgctgaggcccctggcccccagcccccccagcccctgcagaggagagtgctgctgctgtgcaagacccggcggctgattgctgagcgggcccggggccggcctgctgccccagccccagctgccctggtggcccagcccggggcccctggggccccagcagatgctggccctgagcctgtgggcacccaggagcccggccctgaccccatcgctgctgctgtggagacagccccagccccagatggcggcccccgggaggaggccgccgccaccgtgaggaaggaggatgaaggagctgctgaggccaagccagagcccggccgcaccaggagagatgagcctgaggaggaggaggatgatgaagatgacctgaaggctgtggccaccagcctggatggccgcttcctgaagtttgatattgagctgggccggggcagcttcaagacagtgtacaagggcctggacacagagacctgggtggaggtggcctggtgtgagctgcaggacaggaagctgaccaagctggagcggcagcgcttcaaggaggaggccgagatgctgaagggcctgcagcaccccaacatcgtgcgcttctatgacttctgggagagcagcgccaagggcaagcgctgcatcgtgctggtgacagagctgatgaccagcggcaccctgaagacctacctgaagcgcttcaaggtgatgaagcccaaggtgctgcgctcctggtgccggcagatcctgaagggcctgctcttcctgcacaccaggaccccacccatcatccaccgggacctgaagtgtgacaacatcttcatcaccggccccactggatctgtgaagatcggggacctgggcctggccaccctgaagagggccagctttgccaagagcgtcatcggcaccccagagttcatggcccctgagatgtatgaggagcactatgatgagagcgtggatgtgtatgccttcggcatgtgcatgctggagatggccaccagcgagtacccctacagcgagtgccagaatgctgcccagatctacaggaaggtgacctgtggcatcaagccagccagctttgagaaggtgcatgaccctgagatcaaggagatcatcggggagtgcatctgcaagaacaaggaggagagatatgagatcaaggacctgctgagccacgccttctttgctgaagatactggagtgcgggtggagctggccgaggaggaccacggcaggaagagcaccatcgccctgcggctgtgggtggaggaccccaagaagctgaagggcaagcccaaggacaatggagccatcgagttcacctttgacctggagaaggagaccccagatgaggtggcccaggagatgattgaaagtggcttcttccatgaaagtgatgtgaagatcgtggccaagagcatccgggacagagtggccctgatccagtggaggcgggagcgcatctggccagccctgcagcccaaggagcagcaggatgtgggcagcccagacaaggcccggggcccccctgtgcccctgcaggtgcaggtgacctaccacgcccaggccggccagcccggccccccagagcctgaggagcctgaggccgaccagcacctgctgccccccaccctgcccaccagcgccaccagcctggccagtgacagcacctttgacagcggccagggcagcacagtgtacagcgacagccagagcagccagcagagcgtgatgctgggcagcctggctgatgctgcccccagccctgcccagtgtgtgtgcagcccccctgtgtctgagggccctgtgctgccccagagcctgcccagcctgggcgcctaccagcagcccacagctgcccctggcctgcctgtgggctctgtgcctgccccagcctgcccccccagcctgcagcagcacttcccagaccctgccatgagctttgcccctgtgctgcccccacccagcacccccatgcccactggacctggccagcctgcccctcctggccagcagcccccacccctggcccagcccacccccctgccccaggtgctggccccccagcctgtggtgcccctgcagcctgtgcccccccacctgcccccctacctggccccagccagccaggtgggcgccccagcccagctgaagcccctgcagatgccccaggcccccctgcagcccctggcccaggtgcccccccagatgccacccatccctgtggtgccccccatcacccccctggccggcattgatggcctgcccccagccctgcctgacctgcccacagccaccgtgccccctgtgcccccaccccagtacttcagccctgctgtgatcctgcccagcctggccgcccccctgcccccagccagccctgccctgcccctgcaggccgtgaagctgccccaccccccaggggcccccctggccatgccctgcaggaccatcgtgcccaatgccccagccaccatccccctgctggccgtggcccctcctggggtggccgccctgagcatccacagcgctgtggcccagctgcccggccagcctgtgtacccagctgccttcccccagatggcccccacagatgtgccccccagcccccaccacacagtgcagaacatgagggccaccccaccccagcctgccctgcccccccagcccaccctgcccccccagcctgtgctgcccccccagcccaccctgcccccccagcctgtgctgcccccccagcccaccaggcctccccagcctgtgctgcccccccagcccatgctgcccccccagcctgtgctgcccccccagcctgccctgcctgtgcggcctgagcccctgcagccccacctgcctgagcaggccgccccagctgccaccccaggcagccagatcctgctgggccacccagccccctatgctgtggatgtggccgcccaggtgcccaccgtgcctgtgcccccagctgctgtgctgagcccccccctgcctgaggtgctgctgcctgctgcccctgagctgctgccccagttccccagcagcctggccaccgtgtctgcctctgtgcagagcgtgcccacccagacagccaccctgctgcccccagccaacccccccctgcccggcggccctggcatcgccagcccctgccccaccgtgcagctgactgtggagcctgtgcaggaggagcaggccagccaggacaagcccccaggcctgccccagagctgtgagagctatggaggcagtgatgtgaccagcggcaaggagctgagtgacagctgtgagggcgcctttggaggcggccgcctggagggccgggccgccaggaagcaccaccggcgcagcacccgggcccggagccggcaggagcgggccagccggccccggctgaccatcctgaatgtgtgcaacacaggagacaagatggtggagtgccagctggagacccacaaccacaagatggtgaccttcaagtttgacctggatggagatgccccagatgagatcgccacctacatggtggagcatgacttcatcctgcaggccgagcgggagaccttcatcgagcagatgaaggatgtgatggacaaggccgaggacatgctgtctgaggacacagatgctgaccggggcagtgaccccggcaccagccccccccacctgagcacctgtggcctgggcactggagaggagagccggcagagccaggccaatgcccctgtgtaccagcagaatgtgctgcacacaggcaagcgctggttcatcatctgccctgtggccgagcacccagcccctgaggcccctgagagcagcccccccctgcccctgagcagcctgcccccagaggccagccaggacagcgccccctacaaggaccagctgagcagcaaggagcagcccagcttcctggccagccagcagctgctgagccaggccggccccagcaaccccccaggggcccccccagcccccctggcccccagcagcccccctgtgacagccctgccccaggatggagctgccccagccaccagcaccatgcctgagcccgccagcggcacagccagccaggccggcggccctggcaccccccagggcctgaccagcgagctggagaccagccagcccctggccgagacccatgaggcccccctggccgtgcagcccctggtggtgggcctggccccctgcaccccagcccctgaggccgccagcaccagagatgccagcgccccccgggagcccctgcccccaccagcccctgagcccagcccccacagcggcaccccccagcctgccctgggccagcctgcccccctgctgcctgctgctgtgggcgctgtgtccctggccaccagccagctgcccagcccccccctgggccccaccgtgcccccccagcccccatctgccctggagagtgatggagagggccccccaccccgggtgggctttgtggacagcaccatcaagagcctggatgagaagctgcggaccctgctgtaccaggagcacgtgcccaccagcagcgccagcgctggcacccctgtggaggtgggggaccgggacttcaccctggagcccctgcggggggaccagcccaggtctgaggtgtgtggcggggacctggccctgccccctgtgcccaaggaggccgtgtctggccgggtgcagctgccccagcccctggtggagaagtctgagctggcccccaccagaggagctgtgatggagcagggcaccagcagctccatgacagctgagagcagccccaggtccatgctgggctatgacagagatggccggcaggtggccagtgacagccacgtggtgcccagcgtgccccaggatgtgcctgcctttgtgcggcctgcccgggtggagcccacagacagagatggaggagaggccggggagagcagcgctgagcccccacccagcgacatgggcaccgtgggcggccaggccagccacccccagaccctgggcgcccgggccctgggcagccccaggaagaggcctgagcagcaggatgtgagcagccctgccaagacagtgggccgcttctctgtggtgtccacccaggatgagtggaccctggccagcccccacagcctgcgctacagcgcccccccagatgtgtacctggatgaggcccccagcagcccagatgtgaagctggccgtgagaagagcccagacagccagcagcattgaggtgggcgtgggggagcctgtgtccagtgacagcggagatgagggcccccgggcccggccccctgtgcagaagcaggccagcctgcctgtgtctggctctgtggccggggactttgtgaagaaggccacagccttcctgcagaggcccagccgggccggcagcctgggccctgagacccccagccgggtgggcatgaaggtgcccaccatctctgtgaccagcttccacagccagagcagctacatcagcagtgacaatgacagcgagctggaggatgctgacatcaagaaggagctgcagagcctgcgggagaagcacctgaaggagatcagcgagctgcagagccagcagaagcaggagattgaggccctgtaccgccgcctgggcaagcccctgcccccaaatgtgggcttcttccacacagcccccccaactggaagaagaaggaagaccagcaagagcaagctgaaggccggcaagctgctgaaccccctggtgcggcagctgaaggtggtggccagcagcacaggccacctggccgacagcagccggggccccccagccaaggaccctgcccaggcctctgtgggcctgacagctgacagcacaggcctgagcggcaaggctgtgcagacccagcagccctgcagcgtgcgggccagcctgagcagtgacatctgcagcggcctggccagtgatggcggcggggcccggggccagggctggacagtgtaccaccccaccagcgagcgggtgacctacaagagcagcagcaagccccgggcccgcttcctgagcggccctgtgtctgtgtccatctggagcgccctgaagaggctgtgcctgggcaaggagcacagcagccgcagcagcaccagcagcctggcccctggccctgagcccggcccccagcctgccctgcacgtgcaggcccaggtgaacaacagcaacaacaagaagggcaccttcacagatgacctgcacaagctggtggatgagtggaccagcaagacagtgggcgccgcccagctgaagcccaccctgaaccagctgaagcagacccagaagctgcaggacatggaggcccaggccggctgggccgcccctggagaggcccgggccatgacagccccccgggccggcgtgggcatgccccggctgcccccagcccctggccccctgagcaccaccgtcatccctggggccgcccccaccctgtctgtgcccaccccagaccctgagagcgagaagccagactag

SEQ ID NO: 176110 - DNA, 5511 bp, synthetic construct
  misc_feature 1..5511: note = Description of Artificial Sequence: Synthetic coding sequence
  source 1..5511: mol_type = other DNA
atggccaccagcgagtacccctacagcgagtgccagaatgctgcccagatctacaggaaggtgacctgtggcatcaagccagccagctttgagaaggtgcatgaccctgagatcaaggagatcatcggggagtgcatctgcaagaacaaggaggagagatatgagatcaaggacctgctgagccacgccttctttgctgaagatactggagtgcgggtggagctggccgaggaggaccacggcaggaagagcaccatcgccctgcggctgtgggtggaggaccccaagaagctgaagggcaagcccaaggacaatggagccatcgagttcacctttgacctggagaaggagaccccagatgaggtggcccaggagatgattgaaagtggcttcttccatgaaagtgatgtgaagatcgtggccaagagcatccgggacagagtggccctgatccagtggaggcgggagcgcatctggccagccctgcagcccaaggagcagcaggatgtgggcagcccagacaaggcccggggcccccctgtgcccctgcaggtgcaggtgacctaccacgcccaggccggccagcccggccccccagagcctgaggagcctgaggccgaccagcacctgctgccccccaccctgcccaccagcgccaccagcctggccagtgacagcacctttgacagcggccagggcagcacagtgtacagcgacagccagagcagccagcagagcgtgatgctgggcagcctggctgatgctgcccccagccctgcccagtgtgtgtgcagcccccctgtgtctgagggccctgtgctgccccagagcctgcccagcctgggcgcctaccagcagcccacagctgcccctggcctgcctgtgggctctgtgcctgccccagcctgcccccccagcctgcagcagcacttcccagaccctgccatgagctttgcccctgtgctgcccccacccagcacccccatgcccactggacctggccagcctgcccctcctggccagcagcccccacccctggcccagcccacccccctgccccaggtgctggccccccagcctgtggtgcccctgcagcctgtgcccccccacctgcccccctacctggccccagccagccaggtgggcgccccagcccagctgaagcccctgcagatgccccaggcccccctgcagcccctggcccaggtgcccccccagatgccacccatccctgtggtgccccccatcacccccctggccggcattgatggcctgcccccagccctgcctgacctgcccacagccaccgtgccccctgtgcccccaccccagtacttcagccctgctgtgatcctgcccagcctggccgcccccctgcccccagccagccctgccctgcccctgcaggccgtgaagctgccccaccccccaggggcccccctggccatgccctgcaggaccatcgtgcccaatgccccagccaccatccccctgctggccgtggcccctcctggggtggccgccctgagcatccacagcgctgtggcccagctgcccggccagcctgtgtacccagctgccttcccccagatggcccccacagatgtgccccccagcccccaccacacagtgcagaacatgagggccaccccaccccagcctgccctgcccccccagcccaccctgcccccccagcctgtgctgcccccccagcccaccctgcccccccagcctgtgctgcccccccagcccaccaggcctccccagcctgtgctgcccccccagcccatgctgcccccccagcctgtgctgcccccccagcctgccctgcctgtgcggcctgagcccctgcagccccacctgcctgagcaggccgccccagctgccaccccaggcagccagatcctgctgggccacccagccccctatgctgtggatgtggccgcccaggtgcccaccgtgcctgtgcccccagctgctgtgctgagcccccccctgcctgaggtgctgctgcctgctgcccctgagctgctgccccagttccccagcagcctggccaccgtgtctgcctctgtgcagagcgtgcccacccagacagccaccctgctgcccccagccaacccccccctgcccggcggccctggcatcgccagcccctgccccaccgtgcagctgactgtggagcctgtgcaggaggagcaggccagccaggacaagcccccaggcctgccccagagctgtgagagctatggaggcagtgatgtgaccagcggcaaggagctgagtgacagctgtgagggcgcctttggaggcggccgcctggagggccgggccgccaggaagcaccaccggcgcagcacccgggcccggagccggcaggagcgggccagccggccccggctgaccatcctgaatgtgtgcaacacaggagacaagatggtggagtgccagctggagacccacaaccacaagatggtgaccttcaagtttgacctggatggagatgccccagatgagatcgccacctacatggtggagcatgacttcatcctgcaggccgagcgggagaccttcatcgagcagatgaaggatgtgatggacaaggccgaggacatgctgtctgaggacacagatgctgaccggggcagtgaccccggcaccagccccccccacctgagcacctgtggcctgggcactggagaggagagccggcagagccaggccaatgcccctgtgtaccagcagaatgtgctgcacacaggcaagcgctggttcatcatctgccctgtggccgagcacccagcccctgaggcccctgagagcagcccccccctgcccctgagcagcctgcccccagaggccagccaggacagcgccccctacaaggaccagctgagcagcaaggagcagcccagcttcctggccagccagcagctgctgagccaggccggccccagcaaccccccaggggcccccccagcccccctggcccccagcagcccccctgtgacagccctgccccaggatggagctgccccagccaccagcaccatgcctgagcccgccagcggcacagccagccaggccggcggccctggcaccccccagggcctgaccagcgagctggagaccagccagcccctggccgagacccatgaggcccccctggccgtgcagcccctggtggtgggcctggccccctgcaccccagcccctgaggccgccagcaccagagatgccagcgccccccgggagcccctgcccccaccagcccctgagcccagcccccacagcggcaccccccagcctgccctgggccagcctgcccccctgctgcctgctgctgtgggcgctgtgtccctggccaccagccagctgcccagcccccccctgggccccaccgtgcccccccagcccccatctgccctggagagtgatggagagggccccccaccccgggtgggctttgtggacagcaccatcaagagcctggatgagaagctgcggaccctgctgtaccaggagcacgtgcccaccagcagcgccagcgctggcacccctgtggaggtgggggaccgggacttcaccctggagcccctgcggggggaccagcccaggtctgaggtgtgtggcggggacctggccctgccccctgtgcccaaggaggccgtgtctggccgggtgcagctgccccagcccctggtggagaagtctgagctggcccccaccagaggagctgtgatggagcagggcaccagcagctccatgacagctgagagcagccccaggtccatgctgggctatgacagagatggccggcaggtggccagtgacagccacgtggtgcccagcgtgccccaggatgtgcctgcctttgtgcggcctgcccgggtggagcccacagacagagatggaggagaggccggggagagcagcgctgagcccccacccagcgacatgggcaccgtgggcggccaggccagccacccccagaccctgggcgcccgggccctgggcagccccaggaagaggcctgagcagcaggatgtgagcagccctgccaagacagtgggccgcttctctgtggtgtccacccaggatgagtggaccctggccagcccccacagcctgcgctacagcgcccccccagatgtgtacctggatgaggcccccagcagcccagatgtgaagctggccgtgagaagagcccagacagccagcagcattgaggtgggcgtgggggagcctgtgtccagtgacagcggagatgagggcccccgggcccggccccctgtgcagaagcaggccagcctgcctgtgtctggctctgtggccggggactttgtgaagaaggccacagccttcctgcagaggcccagccgggccggcagcctgggccctgagacccccagccgggtgggcatgaaggtgcccaccatctctgtgaccagcttccacagccagagcagctacatcagcagtgacaatgacagcgagctggaggatgctgacatcaagaaggagctgcagagcctgcgggagaagcacctgaaggagatcagcgagctgcagagccagcagaagcaggagattgaggccctgtaccgccgcctgggcaagcccctgcccccaaatgtgggcttcttccacacagcccccccaactggaagaagaaggaagaccagcaagagcaagctgaaggccggcaagctgctgaaccccctggtgcggcagctgaaggtggtggccagcagcacaggccacctggccgacagcagccggggccccccagccaaggaccctgcccaggcctctgtgggcctgacagctgacagcacaggcctgagcggcaaggctgtgcagacccagcagccctgcagcgtgcgggccagcctgagcagtgacatctgcagcggcctggccagtgatggcggcggggcccggggccagggctggacagtgtaccaccccaccagcgagcgggtgacctacaagagcagcagcaagccccgggcccgcttcctgagcggccctgtgtctgtgtccatctggagcgccctgaagaggctgtgcctgggcaaggagcacagcagccgcagcagcaccagcagcctggcccctggccctgagcccggcccccagcctgccctgcacgtgcaggcccaggtgaacaacagcaacaacaagaagggcaccttcacagatgacctgcacaagctggtggatgagtggaccagcaagacagtgggcgccgcccagctgaagcccaccctgaaccagctgaagcagacccagaagctgcaggacatggaggcccaggccggctgggccgcccctggagaggcccgggccatgacagccccccgggccggcgtgggcatgccccggctgcccccagcccctggccccctgagcaccaccgtcatccctggggccgcccccaccctgtctgtgcccaccccaggcagctgtggccccagggctgtgtccacccccaccagctacacctag

SEQ ID NO: 176111 - DNA, 5403 bp, synthetic construct
  misc_feature 1..5403: note = Description of Artificial Sequence: Synthetic coding sequence
  source 1..5403: mol_type = other DNA
atggccacagattctggggaccctgccagcacagaggacagcgagaagccagatggcatcagctttgaaaatagagtgccccaggtggccgccaccctgactgtggaggcccggctgaaggagaagaacagcaccttcagcgccagcggggagaccgtggagaggaagcgcttcttcaggaagtctgtggagatgacagaagatgacaaggtggccgagagcagccccaaggatgagcgcatcaaggccgccatgaacatcccccgggtggacaagctgcccagcaatgtgctgcggggcggccaggaggtgaagtatgagcagtgcagcaagagcaccagcgagatcagcaaggactgcttcaaggagaagaatgagaaggagatggaggaggaggccgagatgaaggctgtggccaccagccccagcggccgcttcctgaagtttgatattgagctgggccgcggggccttcaagacagtgtacaagggcctggacacagagacctgggtggaggtggcctggtgtgagctgcaggacaggaagctgaccaaggccgagcagcagcgcttcaaggaggaggccgagatgctgaagggcctgcagcaccccaacatcgtgcgcttctatgacagctgggagagcatcctgaagggcaagaagtgcatcgtgctggtgacagagctgatgaccagcggcaccctgaagacctacctgaagcgcttcaaggtgatgaagcccaaggtgctgcgctcctggtgccggcagatcctgaagggcctgcagttcctgcacaccaggaccccacccatcatccaccgggacctgaagtgtgacaacatcttcatcaccggccccactggatctgtgaagatcggggacctgggcctggccaccctgatgaggaccagctttgccaagagcgtcatcggcaccccagagttcatggcccctgagatgtatgaggagcactatgatgagagcgtggatgtgtatgccttcggcatgtgcatgctggagatggccaccagcgagtacccctacagcgagtgccagaatgctgcccagatctacaggaaggtgaccagcggcatcaagccagccagcttcaacaaggtgacagatcctgaggtgaaggagatcatcgagggctgcatccggcagaacaagtctgagcggctgagcatccgggacctgctgaaccacgccttctttgctgaggacaccggcctgcgggtggagctggccgaggaggatgactgcagcaacagcagcctggccctgcggctgtgggtggaggaccccaagaagctgaagggcaagcacaaggacaatgaggccatcgagttctccttcaacctggagacagacaccccagaggaggtggcctatgagatggtgaagagcggcttcttccatgaaagtgacagcaaggctgtggccaagagcatccgggacagagtgacccccatcaagaagacccgggagaagaagccagctggctgcctggaggagcggcgggacagccagtgcaagtccatgggaaatgtgttcccccagccccagaacaccaccctgcccctggccccagcccagcagacaggagcagaatgtgaggagacagaggtggaccagcacgtgcggcagcagctgctgcagaggaagccccagcagcactgcagctctgtgactggagacaacctgtctgaggccggggccgccagcgtcatccacagcgacaccagcagccagcccagcgtggcctacagcagcaaccagaccatgggcagccagatggtgagcaacatcccccaggccgaggtgaatgtgcccggccagatctacagcagccagcagctggtgggccactaccagcaggtgtctggcctgcagaagcacagcaagctgacccagccccagatcctgcccctggtgcagggccagagcacagtgctgcctgtgcacgtgctgggccccaccgtggtgtcccagccccaggtgagccccctgactgtgcagaaggtgccccagatcaagcctgtgtcccagcctgtgggcgctgagcagcaggccgccctgctgaagccagacctggtgcgcagcctgaaccaggatgtggccaccaccaaggaaaatgtgagcagcccagacaaccccagcggaaatggcaagcaggaccgcatcaagcagaggcgggccagctgccccaggcctgagaagggcaccaagttccagctgactgtgctgcaggtgtccaccagcggggacaacatggtggagtgccagctggagacccacaacaacaagatggtgaccttcaagtttgatgtggatggagatgccccagaagatattgctgactacatggtggaggacaactttgtgctggagagcgagaaggagaagtttgtggaggagctgcgggccatcgtgggccaggcccaggagatcctgcacgtgcactttgccacagagcgggccaccggggtggacagcatcaccgtggacagcaacagcagccagacaggcagcagcgagcaggtgcagatcaacagcaccagcacccagaccagcaatgaaagtgccccccagagcagccctgtgggccgctggaggttctgcatcaaccagaccatccggaaccgggagacccagagcccccccagcctgcagcacagcatgtctgctgtgcccggccgccaccccctgcccagccccaagaacaccagcaacaaggagatcagccgggacaccctgctgaccatcgagaacaacccctgccaccgggccctcttcaccagcaagtctgagcacaaggatgtggtggatggcaagatcagtgaatgtgcctctgtggagaccaagcagcctgccatcctgtaccaggtggaggacaaccggcagatcatggcccctgtgaccaacagcagcagctacagcaccacctctgtgcgggctgtgcctgcagaatgtgagggcctgaccaagcaggccagcatcttcatccctgtgtacccctgccaccagacagccagccaggctgatgccctgatgagccaccctggagagagcacccagaccagcggcaacagcctgaccaccctggcctttgaccagaagccccagaccctgtctgtgcagcagcctgccatggatgctgagttcatcagccaggagggggagaccaccgtgaacacagaggccagcagccccaagacagtcatccccacccagaccccaggcctggagcccaccaccctgcagcccaccaccgtgctggagagtgatggagagcggccccccaagctggagtttgctgacaaccgcatcaagaccctggatgagaagctgaggaacctgctgtaccaggagcacagcatcagcagcatctacccagagagccagaaggacacccagagcattgacagccccttcagcagcagcgctgaggacaccctgagctgccctgtgacagaggtgattgccatcagccactgcggcatcaaggacagccctgtgcagagccccaacttccagcagacaggcagcaagctgctgagcaatgtggccgccagccagcctgccaacatcagcgtcttcaagagggacctgaatgtcatcacctctgtgcccagcgagctgtgcctgcacgagatgagcagtgatgccagcctgcccggggaccctgaggcctacccagctgctgtgagcagcggcggggccatccacctgcagacaggaggcggctacttcggcctgtccttcacctgccccagcctgaagaaccccatcagcaagaagtcctggaccaggaagctgaagtcctgggcctaccgcctgcggcagagcaccagcttcttcaagaggagcaaggtgcggcaggtggagacagaggagatgaggtctgccatcgccccagaccccatccccctgacccgggagagcacagctgacacccgggccctgaaccgctgcaaggccatgagcggcagcttccagaggggccgcttccaggtgatcaccatcccccagcagcagagcgccaagatgaccagctttggaattgagcacatctctgtgttcagcgagaccaaccacagcagcgaggaggccttcatcaagacagccaagagccagctggtggagattgaaccagccacccagaaccccaagaccagcttctcctatgagaagctgcaggccctgcaggagacctgcaaggagaacaagggcgtgcccaagcagggcgacaacttcctgtccttctctgctgcctgtgaaacagatgtgtcctctgtgaccccagagaaggagtttgaggagaccagcgccaccggcagctccatgcagagcggcagcgagctgctgctgaaggagcgggagatcctgacagctgggaagcagcccagcagtgacagcgagttcagcgccagcctggccggcagcggcaagtctgtggccaagacaggccctgagagcaaccagtgcctgccccaccacgaggagcaggcctatgcccagacccagagcagcctcttctacagccccagcagccccatgagcagtgatgatgagagcgagattgaagatgaggacctgaaggtggagctgcagaggctgcgggagaagcacatccaggaggtggtgaacctgcagacccagcagaacaaggagctgcaggagctgtatgagcggctgcggagcatcaaggacagcaagacccagagcacagagatccccctgcccccagccagcccccggcggcccaggagcttcaagagcaagctgcggagccggccccagagcctgacccacgtggacaatggcatcgtggccaccgggaagagctgcctgatcaatgagctggagaaccccctgtgtgtggagagcaatgctgccagctgccagcagagccctgccagcaagaagggcatgttcacagatgacctgcacaagctggtggatgactggaccaaggaggccgtgggcaacagcctcatcaagcccagcctgaaccagctgaagcagagccagcacaagctggagacagagaactggaacaaggtgtctgagaacacccccagcaccatgggctacaccagcacctggatcagcagcctgagccagatcagaggagctgtgcccaccagcctgccccagggcctgagcctgcccagcttccctggccccctgagcagctatggcatgccccacgtgtgccagtacaatgctgtggccggggccggctaccctgtgcagtgggtgggcatcagcggcaccacccagcagagcgtggtgatcccagcccagagcggcggccccttccagcccggcatgaacatgcaggccttccccaccagctctgtgcagaacccagccaccatccccccaggccccaagtag

SEQ ID NO: 176112 - DNA, 5403 bp, synthetic construct; identical to SEQ ID NO: 176111
  misc_feature 1..5403: note = Description of Artificial Sequence: Synthetic coding sequence
  source 1..5403: mol_type = other DNA

SEQ ID NO: 176113 - DNA, 5232 bp, synthetic construct
  misc_feature 1..5232: note = Description of Artificial Sequence: Synthetic coding sequence
  source 1..5232: mol_type = other DNA
atggccacagattctggggaccctgccagcacagaggacagcgagaagccagatggcatcagctttgaaaatagagtgccccaggtggccgccaccctgactgtggaggcccggctgaaggagaagaacagcaccttcagcgccagcggggagaccgtggagaggaagcgcttcttcaggaagtctgtggagatgacagaagatgacaaggtggccgagagcagccccaaggatgagcgcatcaaggccgccatgaacatcccccgggtggacaagctgcccagcaatgtgctgcggggcggccaggaggtgaagtatgagcagtgcagcaagagcaccagcgagatcagcaaggactgcttcaaggagaagaatgagaaggagatggaggaggaggccgagatgaaggctgtggccaccagccccagcggccgcttcctgaagtttgatattgagctgggccgcggggccttcaagacagtgtacaagggcctggacacagagacctgggtggaggtggcctggtgtgagctgcaggacaggaagctgaccaaggccgagcagcagcgcttcaaggaggaggccgagatgctgaagggcctgcagcaccccaacatcgtgcgcttctatgacagctgggagagcatcctgaagggcaagaagtgcatcgtgctggtgacagagctgatgaccagcggcaccctgaagacctacctgaagcgcttcaaggtgatgaagcccaaggtgctgcgctcctggtgccggcagatcctgaagggcctgcagttcctgcacaccaggaccccacccatcatccaccgggacctgaagtgtgacaacatcttcatcaccggccccactggatctgtgaagatcggggacctgggcctggccaccctgatgaggaccagctttgccaagagcgtcatcggcaccccagagttcatggcccctgagatgtatgaggagcactatgatgagagcgtggatgtgtatgccttcggcatgtgcatgctggagatggccaccagcgagtacccctacagcgagtgccagaatgctgcccagatctacaggaaggtgaccagcggcatcaagccagccagcttcaacaaggtgacagatcctgaggtgaaggagatcatcgagggctgcatccggcagaacaagtctgagcggctgagcatccgggacctgctgaaccacgccttctttgctgaggacaccggcctgcgggtggagctggccgaggaggatgactgcagcaacagcagcctggccctgcggctgtgggtggaggaccccaagaagctgaagggcaagcacaaggacaatgaggccatcgagttctccttcaacctggagacagacaccccagaggaggtggcctatgagatggtgaagagcggcttcttccatgaaagtgacagcaaggctgtggccaagagcatccgggacagagtgacccccatcaagaagacccgggagaagaagccagctggctgcctggaggagcggcgggacagccagtgcaagtccatgggaaatgtgttcccccagccccagaacaccaccctgcccctggccccagcccagcagacaggagcagaatgtgaggagacagaggtggaccagcacgtgcggcagcagctgctgcagaggaagccccagcagcactgcagctctgtgactggagacaacctgtctgaggccggggccgccagcgtcatccacagcgacaccagcagccagcccagcgtggcctacagcagcaaccagaccatgggcagccagatggtgagcaacatcccccaggccgaggtgaatgtgcccggccagatctacagcagccagcagctggtgggccactaccagcaggtgtctggcctgcagaagcacagcaagctgacccagccccagatcctgcccctggtgcagggccagagcacagtgctgcctgtgcacgtgctgggccccaccgtggtgtcccagccccaggtgagccccctgactgtgcagaaggtgccccagatcaagcctgtgtcccagcctgtgggcgctgagcagcaggccgccctgctgaagccagacctggtgcgcagcctgaaccaggatgtggccaccaccaaggaaaatgtgagcagcccagacaaccccagcggaaatggcaagcaggaccgcatcaagcagaggcgggccagctgccccaggcctgagaagggcaccaagttccagctgactgtgctgcaggtgtccaccagcggggacaacatggtggagtgccagctggagacccacaacaacaagatggtgaccttcaagtttgatgtggatggagatgccccagaagatattgctgactacatggtggaggacaactttgtgctggagagcgagaaggagaagtttgtggaggagctgcgggccatcgtgggccaggcccaggagatcctgcacgtgcactttgccacagagcgggccaccggggtggacagcatcaccgtggacagcaacagcagccagacaggcagcagcgagcaggtgcagatcaacagcaccagcacccagaccagcaatgaaagtgccccccagagcagccctgtgggccgctggaggttctgcatcaaccagaccatccggaaccgggagacccagagcccccccagcctgcagcacagcatgtctgctgtgcccggccgccaccccctgcccagccccaagaacaccagcaacaaggagatcagccgggacaccctgctgaccatcgagaacaacccctgccaccgggccctcttcaccagcaagtctgagcacaaggatgtggtggatggcaagatcagtgaatgtgcctctgtggagaccaagcagcctgccatcctgtaccaggtggaggacaaccggcagatcatggcccctgtgaccaacagcagcagctacagcaccacctctgtgcgggctgtgcctgcagaatgtgagggcctgaccaagcaggccagcatcttcatccctgtgtacccctgccaccagacagccagccaggctgatgccctgatgagccaccctggagagagcacccagaccagcggcaacagcctgaccaccctggcctttgaccagaagccccagaccctgtctgtgcagcagcctgccatggatgctgagttcatcagccaggagggggagaccaccgtgaacacagaggccagcagccccaagacagtcatccccacccagaccccaggcctggagcccaccaccctgcagcccaccaccgtgctggagagtgatggagagcggccccccaagctggagtttgctgacaaccgcatcaagaccctggatgagaagctgaggaacctgctgtaccaggagcacagcatcagcagcatctacccagagagccagaaggacacccagagcattgacagccccttcagcagcagcgctgaggacaccctgagctgccctgtgacagaggtgattgccatcagccactgcggcatcaaggacagccctgtgcagagccccaacttccagcagacaggcagcaagctgctgagcaatgtggccgccagccagcctgccaacatcagcgtcttcaagagggacctgaatgtcatcacctctgtgcccagcgagctgtgcctgcacgagatgagcagtgatgccagcctgcccggggaccctgaggcctacccagctgctgtgagcagcggcggggccatccacctgcagacaggagtggagacagaggagatgaggtctgccatcgccccagaccccatccccctgacccgggagagcacagctgacacccgggccctgaaccgctgcaaggccatgagcggcagcttccagaggggccgcttccaggtgatcaccatcccccagcagcagagcgccaagatgaccagctttggcatcgagcacatcagcgtcttcagcgagaccaaccacagcagcgaggaggccttcatcaagacagccaagagccagctggtggagattgagcccgccacccagaaccccaagaccagcttctcctatgagaagctgcaggccctgcaggagacctgcaaggaaaataaaggagtgcccaagcagggcgacaacttcctgtccttctctgctgcctgtgaaacagatgtgtcctctgtgaccccagagaaggagtttgaggagaccagcgccaccggcagctccatgcagagcggcagcgagctgctgctgaaggagcgggagatcctgacagctgggaagcagcccagcagtgacagcgagttcagcgccagcctggccggcagcggcaagtctgtggccaagacaggccctgagagcaaccagtgcctgccccaccacgaggagcaggcctatgcccagacccagagcagcctcttctacagccccagcagccccatgagcagtgatgatgaaagtgaaattgaagatgaggacctgaaggtggagctgcagaggctgcgggagaagcacatccaggaggtggtgaacctgcagacccagcagaacaaggagctgcaggagctgtatgaaaggctgcggagcatcaaggacagcaagacccagagcacagagatccccctgcccccagccagcccccggcggcccaggagcttcaagagcaagctgcggagccggccccagagcctgacccacgtggacaatggaattgtggccacagaccccctgtgtgtggagagcaatgctgccagctgccagcagagccctgccagcaagaagggcatgttcacagatgacctgcacaagctggtggatgactggaccaaggaggccgtgggcaacagcctcatcaagcccagcctgaaccagctgaagcagagccagcacaagctggagacagagaactggaacaaggtgtctgagaacacccccagcaccatgggctacaccagcacctggatcagcagcctgagccagatcagaggagctgtgcccaccagcctgccccagggcctgagcctgcccagcttccctggccccctgagcagctatggcatgcctcatgtgtgccagtacaatgctgtggccggggccggctaccctgtgcagtgggtgggcatcagcggcaccacccagcagagcgtggtgatcccagcccagagcggcggccccttccagcccggcatgaacatgcaggccttccccaccagctctgtgcagaacccagccaccatccccccaggccccaagtag

SEQ ID NO: 176114 - DNA, 498 bp, synthetic construct
  misc_feature 1..498: note = Description of Artificial Sequence: Synthetic coding sequence
  source 1..498: mol_type = other DNA
atggccacagattctggggaccctgccagcacagaggacagcgagaagccagatggcatcagctttgaaaatagagtgccccaggtggccgccaccctgactgtggaggcccggctgaaggagaagaacagcaccttcagcgccagcggggagaccgtggagaggaagcgcttcttcaggaagtctgtggagatgacagaagatgacaaggtggccgagagcagccccaaggatgagcgcatcaaggccgccatgaacatcccccgggtggacaagctgcccagcaatgtgctgcggggcggccaggaggtgaagtatgagcagtgcagcaagagcaccagcgagatcagcaaggactgcttcaaggagaagaatgagaaggagatggaggaggaggccgagatgaaggctgtggccaccagccccagcggccgcttcctgaagtttgatattgagctgggccgcggggccttcaagacagtgtacaagggcctgtag

SEQ ID NO: 176115 - DNA, 3732 bp, synthetic construct
  misc_feature 1..3732: note = Description of Artificial Sequence: Synthetic coding sequence
  source 1..3732: mol_type = other DNA
atgctggccagccctgccacagagaccaccgtgctgatgagccagacagaggccgacctggccctgcggcccccaccacccctgggcacagctggccagccccggctgggccccccaccaagaagagcccggcgcttcagcggcaaggccgagccccggcccaggagcagccggctgagcagaagaagctctgtggacctgggcctgctgagctcctggagcctgcctgccagccctgccccagaccccccagaccccccagattctgctggccctggccctgcccggagccccccacccagcagcaaggagcccccagagggcacctggacagaaggagcccctgtgaaggctgctgaggacagcgcccggcctgagctgcctgacagcgctgtgggccctggcagccgggagcccctgcgggtgcctgaggccgtggccctggagaggagaagagagcaggaggagaaggaggacatggagacccaggccgtggccaccagcccagatggccgctacctgaagtttgacatcgagatcggccggggcagcttcaagacagtgtaccggggcctggacacagacaccaccgtggaggtggcctggtgtgagctgcagaccaggaagctgagcagagctgagcggcagcgcttcagcgaggaggtggagatgctgaagggcctgcagcaccccaacatcgtgcgcttctatgacagctggaagtctgtgctgcggggccaggtgtgcatcgtgctggtgacagagctgatgaccagcggcaccctgaagacctacctgcggcgcttccgggagatgaagccccgggtgctgcagcgctggagccggcagatcctgcggggcctgcacttcctgcacagccgggtgccccccatcctgcaccgggacctgaagtgtgacaacgtgttcatcaccggccccaccggctctgtgaagattggagacctgggcctggccaccctgaagagggccagctttgccaagtctgtgattggcaccccagagttcatggcccctgagatgtatgaggagaagtatgatgaagctgtggatgtgtatgccttcggcatgtgcatgctggagatggccaccagcgagtacccctacagcgagtgccagaatgctgcccagatctacaggaaggtgaccagcggcaggaagcccaacagcttccacaaggtgaagatccctgaggtgaaggagatcatcgagggctgcatcagaacagacaagaatgaacgcttcaccatccaggacctgctggcccacgccttcttccgggaggagcggggcgtgcacgtggagctggccgaggaggatgatggagagaagccaggcctgaagctgtggctgaggatggaggatgccaggagaggaggccggccccgggacaaccaggccatcgagttcctgttccagctgggcagagatgctgctgaggaggtggcccaggagatggtggccctgggcctggtgtgtgaggccgactaccagcctgtggcccgggctgtgcgggagcgggtggccgccatccagaggaagcgggagaagctgaggaaggcccgggagctggaggccctgcccccagagcccggccccccaccagccaccgtgcccatggcccctggcccccccagcgtcttccccccagagcctgaggagcctgaggccgaccagcaccagcccttcctgttcagacatgccagctacagcagcaccaccagtgactgtgaaacagatggctacctgagcagcagcggcttcctggatgccagtgaccctgccctgcagcccccaggaggagtgcccagcagcctggccgagagccacctgtgcctgcccagcgcctttgccctgagcatccccaggagcggccctggcagtgacttcagccctggggacagctatgccagtgatgctgccagcggcctgagtgatgtgggggagggcatgggccagatgagaagacctcctggcaggaacctgcggcggcggcccaggagccggctgcgggtgacctctgtgtctgaccagaatgacagagtggtggagtgccagctgcagacccacaacagcaagatggtgaccttccgctttgacctggatggagacagccctgaggagattgctgctgccatggtgtacaatgagttcatcctgcccagcgagagagatggcttcctgcggcgcatccgggagatcatccagagggtggagaccctgctgaagagggacaccggccccatggaggccgctgaggacaccctgagcccccaggaggagcccgcccccctgcctgccctgcctgtgcccctgcctgaccccagcaatgaggagctgcagagcagcaccagcctggagcaccgctcctggacagccttcagcaccagcagcagcagccctggcacccccctgagccctggcaaccccttcagccctggcacccccatcagccctggccccatcttccccatcaccagccccccctgccaccccagccccagccccttcagccccatcagcagccaggtgagcagcaaccccagcccccaccccaccagcagccccctgcccttcagcagcagcaccccagagttccctgtgcccctgagccagtgcccctggagcagcctgcccaccaccagcccccccaccttcagccccacctgcagccaggtgaccctgagcagccccttcttccccccctgccccagcaccagcagcttccccagcaccacagctgcccccctgctgagcctggccagcgccttcagcctggccgtgatgacagtggcccagagcctgctgagccccagccctggcctgctgagccagagccccccagccccacccagccccctgcccagcctgcccctgcccccacctgtggcccctgggggccaggagagccccagcccccacacagctgaggtggagagcgaggccagccccccaccagcccggcccctgcctggagaggcccggctggcccccatcagcgaggagggcaagccccagctggtgggccgcttccaggtgaccagcagcaaggagcctgctgagcccctgcccctgcagcccaccagccccaccctgagcggcagccccaagcccagcaccccccagctgaccagcgagagcagtgacacagaagattctgctgggggcggccctgagacccgggaggccctggccgagagtgacagagctgctgagggcctgggcgctggggtggaggaggagggagatgatggcaaggagccccaggtgggcggcagcccccagcccctgagccaccccagccctgtgtggatgaactacagctacagcagcctgtgcctgagcagcgaggagagcgagagcagcggggaggatgaggagttctgggccgagctgcagagcctgcggcagaagcacctgtctgaggtggagaccctgcagaccctgcagaagaaggagattgaagatctctacagccggctgggcaagcagcccccacctggcatcgtggccccagctgccatgctgagcagccggcagaggcggctgagcaagggcagcttccccaccagcagaagaaacagcctgcagaggtctgagcccccaggccctggcatcatgagaagaaacagcctgagcggcagcagcacaggcagccaggagcagagggccagcaagggcgtgacctttgctggagatgtgggccgcatgtag

SEQ ID NO: 176116 - DNA, 1992 bp, synthetic construct
  misc_feature 1..1992: note = Description of Artificial Sequence: Synthetic coding sequence
  source 1..1992: mol_type = other DNA
atgagaagacggcagcagggcgctgctgggggcaacttccctgtgggcggcagcttcccagaagatgtgagcccccaccaggacagcggctacgcccccagcccccgctacctgcggcgcttccgggagatgaagccccgggtgctgcagcgctggagccggcagatcctgcggggcctgcacttcctgcacagccgggtgccccccatcctgcaccgggacctgaagtgtgacaacgtgttcatcaccggccccaccggctctgtgaagattggagacctgggcctggccaccctgaagagggccagctttgccaagtctgtgattggcaccccagagttcatggcccctgagatgtatgaggagaagtatgatgaagctgtggatgtgtatgccttcggcatgtgcatgctggagatggccaccagcgagtacccctacagcgagtgccagaatgctgcccagatctacaggaaggtgaccagcggcaggaagcccaacagcttccacaaggtgaagatccctgaggtgaaggagatcatcgagggctgcatcagaacagacaagaatgaacgcttcaccatccaggacctgctggcccacgccttcttccgggaggagcggggcgtgcacgtggagctggccgaggaggatgatggagagaagccaggcctgaagctgtggctgaggatggaggatgccaggagaggaggccggccccgggacaaccaggccatcgagttcctgttccagctgggcagagatgctgctgaggaggtggcccaggagatggtggccctgggcctggtgtgtgaggccgactaccagcctgtggcccgggctgtgcgggagcgggtggccgccatccagaggaagcgggagaagctgaggaaggcccgggagctggaggccctgcccccagagcccggccccccaccagccaccgtgcccatggcccctggcccccccagcgtcttccccccagagcctgaggagcctgaggccgaccagcaccagcccttcctgttcagacatgccagctacagcagcaccaccagtgactgtgaaacagatggctacctgagcagcagcggcttcctggatgccagtgaccctgccctgcagcccccaggaggagtgcccagcagcctggccgagagccacctgtgcctgcccagcgcctttgccctgagcatccccaggagcggccctggcagtgacttcagccctggggacagctatgccagtgatgctgccagcggcctgagtgatgtgggggagggcatgggccagatgagaagacctcctggcaggaacctgcggcggcggcccaggagccggctgcgggtgacctctgtgtctgaccagaatgacagagtggtggagtgccagctgcagacccacaacagcaagatggtgaccttccgctttgacctggatggagacagccctgaggagattgctgctgccatggtgtacaatgagttcatcctgcccagcgagagagatggcttcctgcggcgcatccgggagatcatccagagggtggagaccctgctgaagagggacaccggccccatggaggccgctgaggacaccctgagcccccaggaggagcccgcccccctgcctgccctgcctgtgcccctgcctgaccccagcaatgaggagctgcagagcagcaccagcctggagcaccgctcctggacagccttcagcaccagcagcagcagccctggcacccccctgagccctggcaaccccttcagccctggcacccccatcagccctggccccatcgccctgcagcgggagagccgctccttcagcctgcagagggcccagatccagaggacagtgctggaggccggccagaggcctgggaagctgtggctgcgggccaccgtgcagctgcgggtgtggggcctggagctgcggaggaaggagatgatgggcaggaaccccaagctgggcgccgcccccaacccctag

SEQ ID NO: 176117 - DNA, 471 bp, synthetic construct
  misc_feature 1..471: note = Description of Artificial Sequence: Synthetic coding sequence
  source 1..471: mol_type = other DNA
atgggccagatgagaagacctcctggcaggaacctgcggcggcggcccaggagccggctgcgggtgacctctgtgtctgaccagaatgacagagtggtggagtgccagctgcagacccacaacagcaagatggtgaccttccgctttgacctggatggagacagccctgaggagattgctgctgccatggtgtacaatgagttcatcctgcccagcgagagagatggcttcctgcggcgcatccgggagatcatccagagggtggagaccctgctgaagagggacaccggccccatggaggccgctgaggacaccctgagcccccaggtgcggcccctgggcggccacttccagggcaagtggaccctgtgcagccgggtgtactacagcctgcccagcgctgtgcccctggacctgacccccctgcacctgtgggaccccaagacagtggccctcttcttcttcttctag

SEQ ID NO: 176118 - DNA, 894 bp, synthetic construct
  misc_feature 1..894: note = Description of Artificial Sequence: Synthetic coding sequence
  source 1..894: mol_type = other DNA
atggccaaggtgtctgagctgtatgatgtgacctgggaggagatgagggacaagatgaggaagtggagggaggagaacagcaggaacagcgagcagatcgtggaggtgggggaggagctgatcaatgaatatgccagcaagctgggagatgacatctggatcatctatgagcaggtgatgattgctgccctggactatggaagagatgacctggccctcttctgcctgcaggagctgcggcggcagtttcctggcagccaccgggtgaagaggctgaccggcatgagatttgaggccatggagagatatgatgatgccatccagctgtatgaccgcatcctgcaggaggaccccaccaacacagctgccaggaagaggaagatcgccatcaggaaggcccagggcaagaatgtggaggccatccgggagctgaatgagtacctggagcagtttgtgggggaccaggaggcctggcatgagctggccgagctgtacatcaatgaacatgactatgccaaggccgccttctgcctggaggagctgatgatgaccaacccccacaaccacctgtactgccagcagtatgcagaggtgaagtacacccagggcggcctggagaacctggagctgagcaggaagtactttgcccaggccctgaagctgaacaacagaaacatgagggccctgtttggcctgtacatgtctgccagccacatcgccagcaaccccaaggccagcgccaagaccaagaaggacaacatgaagtatgcctcctgggccgccagccagatcaacagagcctaccagtttgctggccgcagcaagaaggagaccaagtacagcctgaaggctgtggaggacatgctggagaccctgcagatcacccagagctag

SEQ ID NO: 176119 - DNA, 1104 bp, synthetic construct
  misc_feature 1..1104: note = Description of Artificial Sequence: Synthetic coding sequence
  source 1..1104: mol_type = other DNA
atgcgctggttcctgccctggaccctggccgctgtgacagctgctgctgccagcacagtgctggccacagccctgagccctgcccccaccaccatggacttcaccccagcccccctggaggacaccagcagccggccccagttctgcaagtggccctgtgagtgcccccccagccccccacgctgccccctgggcgtgtccctcatcacagatggctgtgagtgctgcaagatgtgtgcccagcagctgggggacaactgcacagaggccgccatctgtgacccccaccggggcctgtactgtgactacagcggggaccggcccaggtatgccatcggcgtgtgtgcccaggtggtgggcgtgggctgtgtgctggatggagtgcgctacaacaacggccagagcttccagcccaactgcaagtacaactgcacctgcattgatggagctgtgggctgcacccccctgtgcctgcgggtgcggcccccccggctgtggtgcccccaccccaggagagtgtccatccctggccactgctgtgagcagtgggtgtgtgaagatgatgccaagaggcccaggaagacagccccccgggacaccggggcctttgatgctgtgggggaggtggaggcctggcacaggaactgcatcgcctacaccagcccctggagcccctgcagcaccagctgtggcctgggcgtgtccacccgcatcagcaatgtgaatgcccagtgctggccagagcaggagagccggctgtgcaacctgcggccctgtgatgtggacatccacaccctcatcaaggccggcaagaagtgcctggccgtgtaccagcctgaggcctccatgaacttcaccctggccggctgcatcagcaccaggagctaccagcccaagtactgcggcgtgtgcatggacaaccgctgctgcatcccctacaagagcaagaccattgatgtgtccttccagtgcccagatggcctgggcttcagccggcaggtgctgtggatcaatgcctgcttctgcaacctgagctgcaggaaccccaatgacatctttgctgacctggagagctacccagacttcagcgagatcgccaactag

SEQ ID NO: 176120 - DNA, 588 bp, synthetic construct
  misc_feature 1..588: note = Description of Artificial Sequence: Synthetic coding sequence
  source 1..588: mol_type = other DNA
atgcctgtgcccctgaccagcagacatgaggtggtgcctgccctggatgctggcagcagtgacagcagcagccggcagcacaggcctggccatgatgctgtgggggaggtggaggcctggcacaggaactgcatcgcctacaccagcccctggagcccctgcagcaccagctgtggcctgggcgtgtccacccgcatcagcaatgtgaatgcccagtgctggccagagcaggagagccggctgtgcaacctgcggccctgtgatgtggacatccacaccctcatcaaggccggcaagaagtgcctggccgtgtaccagcctgaggcctccatgaacttcaccctggccggctgcatcagcaccaggagctaccagcccaagtactgcggcgtgtgcatggacaaccgctgctgcatcccctacaagagcaagaccattgatgtgtccttccagtgcccagatggcctgggcttcagccggcaggtgctgtggatcaatgcctgcttctgcaacctgagctgcaggaaccccaatgacatctttgctgacctggagagctacccagacttcagcgagatcgccaactag

SEQ ID NO: 176121 - DNA, 468 bp, synthetic construct
  misc_feature 1..468: note = Description of Artificial Sequence: Synthetic coding sequence
  source 1..468: mol_type = other DNA
atgcgctggttcctgccctggaccctggccgctgtgacagctgctgctgccagcacagtgctggccacagccctgagccctgcccccaccaccatggacttcaccccagcccccctggaggacaccagcagccggccccagttctgcaagtggccctgtgagtgcccccccagccccccacgctgccccctgggcgtgtccctcatcacagatggctgtgagtgctgcaagatgtgtgcccagcagctgggggacaactgcacagaggccgccatctgtgacccccaccggggcctgtactgtgactacagcggggaccggcccaggtatgccatcggcgtgtgtgcccggcgggaggaggtgtctggctgtgtgcctgcccggggcatccacgagctgcacacctgtggcctgcaccagcacaccctgctgagcacccaggtgctgtggagcctgcacggccagtag

SEQ ID NO: 176122 - DNA, 369 bp, synthetic construct
  misc_feature 1..369: note = Description of Artificial Sequence: Synthetic coding sequence
  source 1..369: mol_type = other DNA
atgcgctggttcctgccctggaccctggccgctgtgacagctgctgctgccagcacagtgctggccacagctgggaagaagtgcctggccgtgtaccagcctgaggcctccatgaacttcaccctggccggctgcatcagcaccaggagctaccagcccaagtactgcggcgtgtgcatggacaaccgctgctgcatcccctacaagagcaagaccattgatgtgtccttccagtgcccagatggcctgggcttcagccggcaggtgctgtggatcaatgcctgcttctgcaacctgagctgcaggaaccccaatgacatctttgctgacctggagagctacccagacttcagcgagatcgccaactag

SEQ ID NO: 176123 - DNA, 753 bp, synthetic construct
  misc_feature 1..753: note = Description of Artificial Sequence: Synthetic coding sequence
  source 1..753: mol_type = other DNA
atgaggggcacccccaagacccacctgctggccttcagcctgctgtgcctgctgagcaaggtgaggacccagctgtgccccaccccctgcacctgcccctggcccccaccccgctgccccctgggcgtgcccctggtgctggatggctgcggctgctgccgggtgtgtgcccggcggctgggggagccctgtgaccagctgcacgtgtgtgatgccagccagggcctggtgtgccagcccggggccggccctgggggccgcggggccctgtgcctgctggctgaagatgacagcagctgtgaggtgaatggccgcctgtaccgggagggggagaccttccagccccactgcagcatccgctgccgctgtgaagatggcggcttcacctgtgtgcccctgtgcagtgaagatgtgcggctgcccagctgggactgcccccaccccaggagagtggaggtgctgggcaagtgctgcccagagtgggtgtgtggccagggcggcggcctgggcacccagcccctgcctgcccagggcccccagttcagcggcctggtgagcagcctgcccccaggagtgccctgcccagagtggagcacagcctggggcccctgcagcaccacctgtggcctgggcatggccaccagggtgagcaaccagaaccgcttctgccgcctggagacccagaggcggctgtgcctgagccggccctgcccccccagccggggccgcagcccccagaacagcgccttctag

SEQ ID NO: 176124 - DNA, 657 bp, synthetic construct
  misc_feature 1..657: note = Description of Artificial Sequence: Synthetic coding sequence
  source 1..657: mol_type = other DNA
atgaggggcacccccaagacccacctgctggccttcagcctgctgtgcctgctgagcaaggtgaggacccagctgtgccccaccccctgcacctgcccctggcccccaccccgctgccccctgggcgtgcccctggtgctggatggctgcggctgctgccgggtgtgtgcccggcggctgggggagccctgtgaccagctgcacgtgtgtgatgccagccagggcctggtgtgccagcccggggccggccctgggggccgcggggccctgtgcctgtgcaagcaggaccccagcttcctggccctgagcctgccctgccccctggtgtccccagcccagaatggagcccggcctggggaccctgcccggccccctgtgggctgggcctggcccccaggctgccccaccaggacagccagcgctgactggaggcccagcgctgcctgtgcctgccccggccctgcccaccccccaggagtggccgtgcacaagacagtgcccagccgggccggcctgggcatgggcacccgctgcccccccagccctgctgggggccctgtgcccggcccctgggcagatggccgctggagcgtgccccggcccctggccgccggcaacaccctggcctgggtgcaccacgccgagcaccagtactag

SEQ ID NO: 176125 - DNA, 753 bp, synthetic construct; identical to SEQ ID NO: 176123
  misc_feature 1..753: note = Description of Artificial Sequence: Synthetic coding sequence
  source 1..753: mol_type = other DNA

SEQ ID NO: 176126 - DNA, 2571 bp, synthetic construct
  misc_feature 1..2571: note = Description of Artificial Sequence: Synthetic coding sequence
  source 1..2571: mol_type = other DNA
atggagagcgaggacctgagcggccgggagctgaccatcgacagcatcatgaacaaggtgcgggacatcaagaacaagttcaagaatgaagacctgacagatgagctgagcctgaacaagatctctgctgacaccacagacaacagcggcaccgtgaaccagatcatgatgatggccaacaaccctgaggactggctgagcctgctgctgaagctggagaagaacagcgtgcccctgagtgatgccctgctgaacaagctgattggccgctacagccaggccatcgaggccctgcccccagacaagtatggccagaatgaaagctttgcccgcatccaggtgcgctttgctgagctgaaggccatccaggagccagatgatgcccgggactacttccagatggcccgggccaactgcaagaagtttgcctttgtgcacatcagctttgcccagtttgagctgagccagggcaatgtgaagaagagcaagcagctgctgcagaaggctgtggagagaggagctgtgcccctggagatgctggagatcgccctgaggaacctgaacctgcagaagaagcagctgctgtctgaggaggagaagaagaacctgagcgccagcacagtgctgacagcccaggagagcttcagcggcagcctgggccacctgcagaacagaaacaacagctgtgacagccggggccagaccaccaaggcccgcttcctgtatggagagaacatgccaccccaggatgctgagatcggctacagaaacagcctgcggcagaccaacaagaccaagcagagctgccccttcggccgggtgcctgtgaacctgctgaacagcccagactgtgatgtgaagacagatgattctgtggtgccctgcttcatgaagaggcagaccagccgctcagaatgtcgggacctggtggtgcccggcagcaagcccagcggaaatgacagctgtgagctgaggaacctgaagtctgtgcagaacagccacttcaaggagcccctggtgtctgatgagaagagcagcgagctgatcatcacagacagcatcaccctgaagaacaagacagagagcagcctgctggccaagctggaggagaccaaggagtaccaggagcctgaggtgcctgagagcaaccagaagcagtggcagagcaagaggaagtctgagtgcatcaaccagaacccagctgccagcagcaaccactggcagatccctgagctggccaggaaggtgaacacagagaagcacaccacctttgagcagcctgtgttttctgtgtccaagcagagcccccccatcagcaccagcaagtggtttgaccccaagagcatctgcaagacccccagcagcaacaccctggatgactacatgagctgcttccgcacccctgtggtgaagaatgacttccccccagcctgccagctgagcaccccctacggccagcctgcctgcttccagcagcagcagcaccagatcctggccacccccctgcagaacctgcaggtgctggccagcagcagcgccaatgaatgcatctctgtgaagggccgcatctacagcatcctgaagcagatcggcagcggcggcagcagcaaggtgttccaggtgctgaatgagaagaagcagatctatgccatcaagtatgtgaacctggaggaggccgacaaccagaccctggacagctacagaaatgaaattgcctacctgaacaagctgcagcagcacagcgacaagatcatccggctgtatgactatgagatcacagaccagtacatctacatggtgatggagtgtggcaacatcgacctgaacagctggctgaagaagaagaagagcattgacccctgggagaggaagagctactggaagaacatgctggaggccgtgcacaccatccaccagcacggcatcgtgcacagcgacctgaagccagccaacttcctgattgtggatggcatgctgaagctgattgactttggcatcgccaaccagatgcagcctgacaccacctctgtggtgaaggacagccaggtgggcaccgtgaactacatgcctcctgaggccatcaaggacatgagcagcagccgggagaatggcaagagcaagagcaagatcagccccaagagtgatgtgtggagcctgggctgcatcctgtactacatgacctacggcaagacccccttccagcagatcatcaaccagatcagcaagctgcacgccatcatcgaccccaaccatgaaattgagttcccagacatccctgagaaggacctgcaggatgtgctgaagtgctgcctgaagagggaccccaagcagaggatcagcatccctgagctgctggcccacccctacgtgcagatccagacccaccctgtgaaccagatggccaagggcaccacagaggagatgaagtatgtgctgggccagctggtgggcctgaacagccccaacagcatcctgaaggccgccaagaccctgtatgagcactacagcggcggggagagccacaacagcagcagcagcaagacctttgagaagaagaggggcaagaagtag

SEQ ID NO: 176127 - DNA, 1119 bp, synthetic construct
  misc_feature 1..1119: note = Description of Artificial Sequence: Synthetic coding sequence
  source 1..1119: mol_type = other DNA
atgaacaagaggcggctgctgtaccccagcggctggctgcacggccccagcgacatgcagggcctgctcttcagcaccctgctgctggccggcctggcccagttctgctgccgggtgcagggcaccggccccctggacaccaccccagagggccggcctggagaggtgtctgatgccccccagaggaagcagttctgccactggccctgcaagtgcccccagcagaagccccgctgccccccaggagtgtccctggtgagagatggctgcggctgctgcaagatctgtgccaagcagcccggggagatctgcaatgaagctgacctgtgtgacccccacaagggcctgtactgtgactacagcgtggaccggcccaggtatgaaacaggagtgtgtgcctacctggtggccgtgggctgtgagttcaaccaggtgcactaccacaacggccaggtgttccagcccaaccccctcttcagctgcctgtgtgtgtctggggccatcggctgcacccccctcttcatccccaagctggccggcagccactgcagcggggccaagggcggcaagaagagtgaccagagcaactgcagcctggagcccctgctgcagcagctgagcaccagctacaagaccatgcctgcctacagaaacctgcccctcatctggaagaagaagtgcctggtgcaggccaccaagtggaccccctgcagcaggacctgtggcatgggcatcagcaacagagtgaccaatgaaaacagcaactgtgagatgaggaaggagaagaggctgtgctacatccagccctgtgacagcaacatcctgaagaccatcaagatccccaagggcaagacctgccagcccaccttccagctgagcaaggccgagaagtttgtgttttctggctgcagcagcacccagagctacaagcccaccttctgtggcatctgcctggacaagcgctgctgcatccccaacaagagcaagatgatcaccatccagtttgactgccccaatgaaggcagcttcaagtggaagatgctgtggatcaccagctgtgtgtgccagaggaactgccgggagcccggggacatcttcagcgagctgaagatcctgtag

SEQ ID NO: 176128 - DNA, 996 bp, synthetic construct
  misc_feature 1..996: note = Description of Artificial Sequence: Synthetic coding sequence
  source 1..996: mol_type = other DNA
atgaagatcagccggggccgggtgtgcctggagagcgagaacaaggatgctggggtggccggcaggaagcagttctgccactggccctgcaagtgcccccagcagaagccccgctgccccccaggagtgtccctggtgagagatggctgcggctgctgcaagatctgtgccaagcagcccggggagatctgcaatgaagctgacctgtgtgacccccacaagggcctgtactgtgactacagcgtggaccggcccaggtatgaaacaggagtgtgtgcctgcaagtctgtgggctgtgagttcaaccaggtgcactaccacaacggccaggtgttccagcccaaccccctcttcagctgcctgtgtgtgtctggggccatcggctgcacccccctcttcatccccaagctggccggcagccactgcagcggggccaagggcggcaagaagagtgaccagagcaactgcagcctggagcccctgctgcagcagctgagcaccagctacaagaccatgcctgcctacagaaacctgcccctcatctggaagaagaagtgcctggtgcaggccaccaagtggaccccctgcagcaggacctgtggcatgggcatcagcaacagagtgaccaatgaaaacagcaactgtgagatgaggaaggagaagaggctgtgctacatccagccctgtgacagcaacatcctgaagaccatcaagatccccaagggcaagacctgccagcccaccttccagctgagcaaggccgagaagtttgtgttcagcggctgcagcagcacccagagctacaagcccaccttctgtggcatctgcctggacaagcgctgctgcatccccaacaagagcaagatgatcaccatccagtttgactgccccaatgaaggcagcttcaagtggaagatgctgtggatcaccagctgtgtgtgccagaggaactgccgggagcccggggacatcttcagcgagctgaagatcctgtag

SEQ ID NO: 176129 - DNA, 1065 bp, synthetic construct; identical to SEQ ID NO: 157286
  misc_feature 1..1065: note = Description of Artificial Sequence: Synthetic coding sequence
  source 1..1065: mol_type = other DNA

SEQ ID NO: 176130 - DNA, 693 bp, synthetic construct
  misc_feature 1..693: note = Description of Artificial Sequence: Synthetic coding sequence
  source 1..693: mol_type = other DNA
atgcagggcctgctcttcagcaccctgctgctggccggcctggcccagttctgctgccgggtgcagggcaccggccccctggacaccaccccagagggccggcctggagaggtgtctgatgccccccagaggaagcagttctgccactggccctgcaagtgcccccagcagaagccccgctgccccccaggagtgtccctggtgagagatggctgcggctgctgcaagatctgtgccaagcagcccggggagatctgcaatgaagctgacctgtgtgacccccacaagggcctgtactgtgactacagcgtggaccggcccaggtatgaaacaggagtgtgtgcctacctggtggccgtgggctgtgagttcaaccaggtgcactaccacaacggccaggtgttccagcccaaccccctcttcagctgcctgtgtgtgtctggggccatcggctgcacccccctcttcatccccaagctggccggcagccactgcagcggggccaagggcggcaagaagagtgaccagagcaactgcagcctggagcccctgctgcagcagctgagcaccagctacaagaccatgcctgcctacagaaacctgcccctcatctggaagaagaatgtgctgtgcaagcagcagaatggcctgcctgcccctgagcacgtgggctgggagtacctgactggatag

SEQ ID NO: 176131 - DNA, 393 bp, synthetic construct
  misc_feature 1..393: note = Description of Artificial Sequence: Synthetic coding sequence
  source 1..393: mol_type = other DNA
atgggcatcagcaacagagtgaccaatgaaaacagcaactgtgagatgaggaaggagaagaggctgtgctacatccagccctgtgacagcaacatcctgaagaccatcaagatccccaagggcaagacctgccagcccaccttccagctgagcaaggccgagaagtttgtgttttctggctgcagcagcacccagagctacaagcccaccttctgtggcatctgcctggacaagcgctgctgcatccccaacaagagcaagatgatcaccatccagtttgactgccccaatgaaggcagcttcaagtggaagatgctgtggatcaccagctgtgtgtgccagaggaactgccgggagcccggggacatcttcagcgagctgaagatcctgtag

SEQ ID NO: 176132 - DNA, 1626 bp, synthetic construct
  misc_feature 1..1626: note = Description of Artificial Sequence: Synthetic coding sequence
  source 1..1626: mol_type = other DNA
atggccggggccatcatcgagaacatgagcaccaagaagctgtgcatcgtgggcggcatcctgctggtgttccagatcatcgccttcctggtgggcggcctgattgcccctggccccaccacagctgtgtcctacatgtctgtgaagtgtgtggatgccaggaagaaccaccacaagaccaagtggtttgtgccctggggccccaaccactgtgacaagatccgggacatcgaggaggccatcccccgggagattgaggccaatgacatcgtgttttctgtgcacatccccctgccccacatggagatgagcccctggttccagttcatgctgttcatcctgcagctggacatcgccttcaagctgaacaaccagatccgggagaatgctgaggtgtccatggatgtgtccctggcctacagagatgatgcctttgctgagtggacagagatggcccacgagcgggtgcccaggaagctgaagtgcaccttcaccagccccaagaccccagagcacgagggccgctactatgaatgtgatgtgctgcccttcatggagatcggctctgtggcccacaagttctacctgctgaacatccggctgcctgtgaatgagaagaagaagatcaacgtgggcattggagagatcaaggacatccggctggtgggcatccaccagaatggaggcttcaccaaggtgtggtttgccatgaagaccttcctgacccccagcatcttcatcatcatggtgtggtactggaggcgcatcaccatgatgagccggccccctgtgctgctggagaaggtgatctttgccctgggcatctccatgaccttcatcaacatccctgtggagtggttcagcattggatttgactggacctggatgctgctgtttggagacatccggcagggcatcttctacgccatgctgctgtccttctggatcatcttctgtggggagcacatgatggaccagcatgaaagaaaccacatcgccggctactggaagcaggtgggccccatcgctgtgggcagcttctgcctcttcatctttgacatgtgtgagcggggcgtgcagctgaccaaccccttctacagcatctggaccacagacattggaacagagctggccatggccttcatcatcgtggccggcatctgcctgtgcctgtacttcctgttcctgtgcttcatggtgttccaggtgttcaggaacatcagcggcaagcagagcagcctgcctgccatgagcaaggtgcggcggctgcactatgagggcctcatcttccgcttcaagttcctgatgctgatcaccctggcctgtgccgccatgaccgtcatcttcttcatcgtgtcccaggtgacagagggccactggaagtggggcggcgtgacagtgcaggtgaacagcgccttcttcaccggcatctacggcatgtggaacctgtatgtgtttgccctgatgttcctgtatgcccccagccacaagaactatggagaggaccagagcaatggagacctgggcgtgcacagcggggaggagctgcagctgaccaccaccatcacccacgtggatggccccacagagatctacaagctgaccaggaaggaggcccaggagtag

SEQ ID NO: 176133 - DNA, 1632 bp, synthetic construct
  misc_feature 1..1632: note = Description of Artificial Sequence: Synthetic coding sequence
  source 1..1632: mol_type = other DNA
atggccggggccatcatcgagaacatgagcaccaagaagctgtgcatcgtgggcggcatcctgctggtgttccagatcatcgccttcctggtgggcggcctgattggccccaccacagctgtgtcctacatgtctgtgaagtgtgtggatgccaggaagaaccaccacaagaccaagtggtttgtgccctggggccccaaccactgtgacaagatccgggacatcgaggaggccatcccccgggagattgaggccaatgacatcgtgttttctgtgcacatccccctgccccacatggagatgagcccctggttccagttcatgctgttcatcctgcagctggacatcgccttcaagctgaacaaccagatccgggagaatgctgaggtgtccatggatgtgtccctggcctacagagatgatgcctttgctgagtggacagagatggcccacgagcgggtgcccaggaagctgaagtgcaccttcaccagccccaagaccccagagcacgagggccgctactatgaatgtgatgtgctgcccttcatggagatcggctctgtggcccacaagttctacctgctgaacatccggctgcctgtgaatgagaagaagaagatcaacgtgggcattggagagatcaaggacatccggctggtgggcatccaccagaatggaggcttcaccaaggtgtggtttgccatgaagaccttcctgacccccagcatcttcatcatcatggtgtggtactggaggcgcatcaccatgatgagccggccccctgtgctgctggagaaggtgatctttgccctgggcatctccatgaccttcatcaacatccctgtggagtggttcagcattggatttgactggacctggatgctgctgtttggagacatccggcagggcatcttctacgccatgctgctgtccttctggatcatcttctgtggggagcacatgatggaccagcatgaaagaaaccacatcgccggctactggaagcaggtgggccccatcgctgtgggcagcttctgcctcttcatctttgacatgtgtgagcggggcgtgcagctgaccaaccccttctacagcatctggaccacagacattggaacagagctggccatggccttcatcatcgtggccggcatctgcctgtgcctgtacttcctgttcctgtgcttcatggtgttccaggtgttcaggaacatcagcggcaagcagagcagcctgcctgccatgagcaaggtgcggcggctgcactatgagggcctcatcttccgcttcaagttcctgatgctgatcaccctggcctgtgccgccatgaccgtcatcttcttcatcgtgtcccaggtgacagagggccactggaagtggggcggcgtgacagtgcaggtgaacagcgccttcttcaccggcatctacggcatgtggaacctgtatgtgtttgccctgatgttcctgtatgcccccagccacaagaactatggagaggaccagagcaatggcatgcagctgccctgcaagagccgggaggactgtgccctgtttgtgtctgagctgtaccaggagctgttcagcgccagcaagtacagcttcatcaatgacaatgctgccagcggcatctag

SEQ ID NO: 176134 - DNA, 1353 bp, synthetic construct
  misc_feature 1..1353: note = Description of Artificial Sequence: Synthetic coding sequence
  source 1..1353: mol_type = other DNA
atggccggggccatcatcgagaacatgagcaccaagaagctgtgcatcgtgggcggcatcctgctggtgttccagatcatcgccttcctggtgggcggcctgattggagaaaatgctgaggtgtccatggatgtgtccctggcctacagagatgatgcctttgctgagtggacagagatggcccacgagcgggtgcccaggaagctgaagtgcaccttcaccagccccaagaccccagagcacgagggccgctactatgaatgtgatgtgctgcccttcatggagatcggctctgtggcccacaagttctacctgctgaacatccggctgcctgtgaatgagaagaagaagatcaacgtgggcatcggggagatcaaggacatccggctggtgggcatccaccagaatggaggcttcaccaaggtgtggtttgccatgaagaccttcctgacccccagcatcttcatcatcatggtgtggtactggaggcgcatcaccatgatgagcaggcctcctgtgctgctggagaaggtgatctttgccctgggcatctccatgaccttcatcaacatccctgtggagtggttcagcatcggctttgactggacctggatgctgctgtttggagacatccggcagggcatcttctacgccatgctgctgtccttctggatcatcttctgtggggagcacatgatggaccagcacgagaggaaccacatcgccggctactggaagcaggtgggccccatcgctgtgggcagcttctgcctcttcatctttgacatgtgtgagcggggcgtgcagctgaccaaccccttctacagcatctggaccacagacatcggcacagagctggccatggccttcatcatcgtggccggcatctgcctgtgcctgtacttcctgttcctgtgcttcatggtgttccaggtgttcaggaacatcagcggcaagcagagcagcctgcctgccatgagcaaggtgcggcggctgcactatgagggcctcatcttccgcttcaagttcctgatgctgatcaccctggcctgtgccgccatgaccgtcatcttcttcatcgtgtcccaggtgacagagggccactggaagtggggcggcgtgacagtgcaggtgaacagcgccttcttcaccggcatctacggcatgtggaacctgtatgtgtttgccctgatgttcctgtatgcccccagccacaagaactacggggaggaccagagcaatggagacctgggcgtgcacagcggggaggagctgcagctgaccaccaccatcacccacgtggatggccccacagagatctacaagctgaccaggaaggaggcccaggagtag

SEQ ID NO: 176135 - DNA, 1638 bp, synthetic construct
  misc_feature 1..1638: note = Description of Artificial Sequence: Synthetic coding sequence
  source 1..1638: mol_type = other DNA
atggccggggccatcatcgagaacatgagcaccaagaagctgtgcatcgtgggcggcatcctgctggtgttccagatcatcgccttcctggtgggcggcctgattgcccctggccccaccacagctgtgtcctacatgtctgtgaagtgtgtggatgccaggaagaaccaccacaagaccaagtggtttgtgccctggggccccaaccactgtgacaagatccgggacatcgaggaggccatcccccgggagattgaggccaatgacatcgtgttttctgtgcacatccccctgccccacatggagatgagcccctggttccagttcatgctgttcatcctgcagctggacatcgccttcaagctgaacaaccagatccgggagaatgctgaggtgtccatggatgtgtccctggcctacagagatgatgcctttgctgagtggacagagatggcccacgagcgggtgcccaggaagctgaagtgcaccttcaccagccccaagaccccagagcacgagggccgctactatgaatgtgatgtgctgcccttcatggagatcggctctgtggcccacaagttctacctgctgaacatccggctgcctgtgaatgagaagaagaagatcaacgtgggcattggagagatcaaggacatccggctggtgggcatccaccagaatggaggcttcaccaaggtgtggtttgccatgaagaccttcctgacccccagcatcttcatcatcatggtgtggtactggaggcgcatcaccatgatgagccggccccctgtgctgctggagaaggtgatctttgccctgggcatctccatgaccttcatcaacatccctgtggagtggttcagcattggatttgactggacctggatgctgctgtttggagacatccggcagggcatcttctacgccatgctgctgtccttctggatcatcttctgtggggagcacatgatggaccagcatgaaagaaaccacatcgccggctactggaagcaggtgggccccatcgctgtgggcagcttctgcctcttcatctttgacatgtgtgagcggggcgtgcagctgaccaaccccttctacagcatctggaccacagacattggaacagagctggccatggccttcatcatcgtggccggcatctgcctgtgcctgtacttcctgttcctgtgcttcatggtgttccaggtgttcaggaacatcagcggcaagcagagcagcctgcctgccatgagcaaggtgcggcggctgcactatgagggcctcatcttccgcttcaagttcctgatgctgatcaccctggcctgtgccgccatgaccgtcatcttcttcatcgtgtcccaggtgacagagggccactggaagtggggcggcgtgacagtgcaggtgaacagcgccttcttcaccggcatctacggcatgtggaacctgtatgtgtttgccctgatgttcctgtatgcccccagccacaagaactatggagaggaccagagcaatggcatgcagctgccctgcaagagccgggaggactgtgccctgtttgtgtctgagctgtaccaggagctgttcagcgccagcaagtacagcttcatcaatgacaatgctgccagcggcatctag

SEQ ID NO: 176136 - DNA, 2142 bp, synthetic construct
  misc_feature 1..2142: note = Description of Artificial Sequence: Synthetic coding sequence
  source 1..2142: mol_type = other DNA
atggccggcagcttctgctggaggatgctgggcctggtgtccaaggtgggcaacagagcccgctgcttcagctccatggccgccagcgaggaggagctgctggacttcagcggcagcgagctgcagttcaacagctgcagcctgcacctgagcctgcaccccttcttcaacttcctgctgggcatccacagctgctttgtgtgcaaggagagcaagacagatgtgaagagatgtgtggtgacccagtgtgggaagttctaccacgaggcctgtgtgaagaagtaccccctgactgtgtttgagagccggggcttccgctgccccctgcacagctgtgtgtcctgccacgccagcaaccccagcaacccccggcccagcaagggcaagatgatgagatgtgtgcgctgccctgtggcctaccacagcggagatgcctgcctggccgccggctgcagcgtcatcgccagcaacagcatcatctgcacagcccacttcaccgccaggaagggcaagaggcaccacgcccacgtgaatgtgtcctggtgctttgtgtgcagcaaaggaggcagcctgctgtgctgtgagagctgcccagctgccttccacccagactgcctgaacatcgagatgccagatggctcctggttctgcaatgactgccgggccggcaagaagctgcacttccaggacatcatctgggtgaagctgggcaactaccgctggtggccagctgaggtgtgccaccccaagaatgtgccccccaacatccagaagatgaagcatgaaattggagagttccctgtgttcttcttcggcagcaaggactactactggacccaccaggcccgggtcttcccctacatggagggggaccggggcagccgctaccagggcgtgcggggcatcggccgggtcttcaagaatgccctgcaggaggccgaggcccgcttccgggagatcaagctgcagcgggaggcccgggagacccaggagagcgagaggaagcccccaccctacaagcacatcaaggtgaacaagccctacggcaaggtgcagatctacacagctgacatcagcgagatccccaagtgcaactgcaagcccacagatgagaacccctgtggctttgacagtgaatgtctgaacaggatgctgatgtttgagtgccacccccaggtgtgcccagctggggagttctgccagaaccagtgcttcaccaagaggcagtacccagagaccaagatcatcaagacagatggcaagggctggggcctggtggccaagagggacatcagaaaaggagaatttgtgaatgaatatgtgggggagctgattgatgaggaggagtgcatggcccgcatcaagcacgcccatgaaaatgacatcacccacttctacatgctgaccatcgacaaggaccgcatcattgatgctggccccaagggcaactacagccgcttcatgaaccacagctgccagcccaactgtgagaccctgaagtggacagtgaatggagacaccagggtgggcctgtttgctgtgtgtgacatcccagctggaacagagctgaccttcaactacaacctggactgcctgggcaatgagaagacagtgtgccgctgtggggccagcaactgcagcggcttcctgggggaccggcccaagaccagcaccaccctgagcagcgaggagaagggcaagaagaccaagaagaagaccaggagaagaagagccaagggggagggcaagaggcagagtgaagatgagtgcttccgctgtggagatggcggccagctggtgctgtgtgacaggaagttctgcaccaaggcctaccacctgagctgcctgggcctgggcaagaggccctttgggaagtgggagtgcccctggcaccactgtgatgtgtgtgggaagcccagcaccagcttctgccacctgtgccccaacagcttctgcaaggagcaccaggatggaacagccttcagctgcaccccagatggccgcagctactgctgtgaacatgacctgggcgccgcctctgtgcgcagcaccaagacagagaagcccccacctgagcccgggaagcccaagggcaagagaagaagaagaagaggctggaggagagtgacagagggcaagtag

SEQ ID NO: 176137 - DNA, 4098 bp, synthetic construct
  misc_feature 1..4098: note = Description of Artificial Sequence: Synthetic coding sequence
  source 1..4098: mol_type = other DNA
atggagttcagcatcaagcagagccccctgtctgtgcagagcgtggtgaagtgcatcaagatgaagcaggcccctgagatcctgggcagcgccaacgggaagacccccagctgtgaggtgaacagagaatgttctgtgttcctgagcaaggcccagctgagcagcagcctgcaggagggcgtgatgcagaagttcaacggccatgatgccctgcccttcatcccagctgacaagctgaaggacctgaccagcagggtcttcaacggggagcccggggcccatgatgccaagctgcgctttgagagccaggagatgaagggcatcggcaccccacccaacaccacccccatcaagaatggcagccctgagatcaagctgaagatcaccaagacctacatgaatggcaagcccctgtttgagagcagcatctgtggggacagcgctgctgatgtgtcccagagcgaggagaatggccagaagccagagaacaaggcccggaggaacaggaagaggagcatcaagtatgacagcctgctggagcagggcctggtggaggccgccctggtgtccaagatcagcagccccagcgacaagaagatcccagccaagaaggagagctgccccaacacaggccgggacaaggaccacctgctgaagtacaacgtgggggacctggtgtggagcaaggtgtctggctacccctggtggccctgcatggtgtctgctgaccccctgctgcacagctacaccaagctgaagggccagaagaagagcgcccggcagtaccacgtgcagttctttggagatgcccctgagcgggcctggatctttgagaagagcctggtggcctttgaaggagagggccagtttgagaagctgtgccaggagagcgccaagcaggcccccaccaaggccgagaagatcaagctgctgaagcccatcagcggcaagctgcgggcccagtgggagatgggcatcgtgcaggccgaggaggccgcctccatgtctgtggaggagaggaaggccaagttcaccttcctgtatgtgggggaccagctgcacctgaacccccaggtggccaaggaggccggcattgctgctgagagcctgggggagatggccgagagcagtggagtgtctgaggaggccgctgagaaccccaagtctgtgcgggaggagtgcatccccatgaagagaagaagaagagccaagctgtgcagcagcgctgagaccctggagagccacccagacatcggcaagagcaccccccagaagacagctgaggccgacccccggcggggcgtgggcagccccccaggcaggaagaagaccaccgtgtccatgcccaggagcaggaaaggagatgctgccagccagttcctggtgttctgccagaagcacagagatgaggtggtggccgagcacccagatgccagcggggaggagattgaggagctgctgcggagccagtggagcctgctgtctgagaagcagagggcccgctacaacaccaagtttgccctggtggcccctgtgcaggccgaggaggacagcggaaatgtgaatggcaagaagaggaaccacaccaagaggatccaggaccccacagaagatgctgaggccgaggacacccccaggaagaggctgaggacagacaagcacagcctgaggaagagggacaccatcacagacaagacagcccggaccagcagctacaaggccatggaggccgccagcagcctgaagagccaggccgccaccaagaacctgagtgatgcctgcaagcccctgaagaagaggaacagagccagcacagctgccagcagcgccctgggcttcagcaagagcagcagccccagcgccagcctgacagaaaatgaggtgtctgacagccctggagatgagcccagcgagagcccctatgaatctgcagatgagacccagacagaggtgtctgtgagcagcaagaagtctgagcggggcgtgacagccaagaaggagtatgtgtgccagctgtgtgagaagccaggcagcctgctgctgtgtgagggcccctgctgcggggccttccacctggcctgcctgggcctgagcagaagacctgagggccgcttcacctgcagtgaatgtgccagcggcatccacagctgctttgtgtgcaaggagagcaagacagatgtgaagagatgtgtggtgacccagtgtgggaagttctaccacgaggcctgtgtgaagaagtaccccctgactgtgtttgagagccggggcttccgctgccccctgcacagctgtgtgtcctgccacgccagcaaccccagcaacccccggcccagcaagggcaagatgatgagatgtgtgcgctgccctgtggcctaccacagcggagatgcctgcctggccgccggctgcagcgtcatcgccagcaacagcatcatctgcacagcccacttcaccgccaggaagggcaagaggcaccacgcccacgtgaatgtgtcctggtgctttgtgtgcagcaaaggaggcagcctgctgtgctgtgagagctgcccagctgccttccacccagactgcctgaacatcgagatgccagatggctcctggttctgcaatgactgccgggccggcaagaagctgcacttccaggacatcatctgggtgaagctgggcaactaccgctggtggccagctgaggtgtgccaccccaagaatgtgccccccaacatccagaagatgaagcatgaaattggagagttccctgtgttcttcttcggcagcaaggactactactggacccaccaggcccgggtcttcccctacatggagggggaccggggcagccgctaccagggcgtgcggggcatcggccgggtcttcaagaatgccctgcaggaggccgaggcccgcttccgggagatcaagctgcagcgggaggcccgggagacccaggagagcgagaggaagcccccaccctacaagcacatcaaggtgaacaagccctacggcaaggtgcagatctacacagctgacatcagcgagatccccaagtgcaactgcaagcccacagatgagaacccctgtggctttgacagtgaatgtctgaacaggatgctgatgtttgagtgccacccccaggtgtgcccagctggggagttctgccagaaccagtgcttcaccaagaggcagtacccagagaccaagatcatcaagacagatggcaagggctggggcctggtggccaagagggacatcagaaaaggagaatttgtgaatgaatatgtgggggagctgattgatgaggaggagtgcatggcccgcatcaagcacgcccatgaaaatgacatcacccacttctacatgctgaccatcgacaaggaccgcatcattgatgctggccccaagggcaactacagccgcttcatgaaccacagctgccagcccaactgtgagaccctgaagtggacagtgaatggagacaccagggtgggcctgtttgctgtgtgtgacatcccagctggaacagagctgaccttcaactacaacctggactgcctgggcaatgagaagacagtgtgccgctgtggggccagcaactgcagcggcttcctgggggaccggcccaagaccagcaccaccctgagcagcgaggagaagggcaagaagaccaagaagaagaccaggagaagaagagccaagggggagggcaagaggcagagtgaagatgagtgcttccgctgtggagatggcggccagctggtgctgtgtgacaggaagttctgcaccaaggcctaccacctgagctgcctgggcctgggcaagaggccctttgggaagtgggagtgcccctggcaccactgtgatgtgtgtgggaagcccagcaccagcttctgccacctgtgccccaacagcttctgcaaggagcaccaggatggaacagccttcagctgcaccccagatggccgcagctactgctgtgaacatgacctgggcgccgcctctgtgcgcagcaccaagacagagaagcccccacctgagcccgggaagcccaagggcaagagaagaagaagaagaggctggaggagagtgacagagggcaagtag

SEQ ID NO: 176138 - DNA, 4098 bp, synthetic construct; identical to SEQ ID NO: 176137
  misc_feature 1..4098: note = Description of Artificial Sequence: Synthetic coding sequence
  source 1..4098: mol_type = other DNA

SEQ ID NO: 176139 - DNA, 4098 bp, synthetic construct; identical to SEQ ID NO: 176137
  misc_feature 1..4098: note = Description of Artificial Sequence: Synthetic coding sequence
  source 1..4098: mol_type = other DNA

SEQ ID NO: 176140 - DNA, 1944 bp, synthetic construct
  misc_feature 1..1944: note = Description of Artificial Sequence: Synthetic coding sequence
  source 1..1944: mol_type = other DNA
atggagttcagcatcaagcagagccccctgtctgtgcagagcgtggtgaagtgcatcaagatgaagcaggcccctgagatcctgggcagcgccaacgggaagacccccagctgtgaggtgaacagagaatgttctgtgttcctgagcaaggcccagctgagcagcagcctgcaggagggcgtgatgcagaagttcaacggccatgatgccctgcccttcatcccagctgacaagctgaaggacctgaccagcagggtcttcaacggggagcccggggcccatgatgccaagctgcgctttgagagccaggagatgaagggcatcggcaccccacccaacaccacccccatcaagaatggcagccctgagatcaagctgaagatcaccaagacctacatgaatggcaagcccctgtttgagagcagcatctgtggggacagcgctgctgatgtgtcccagagcgaggagaatggccagaagccagagaacaaggcccggaggaacaggaagaggagcatcaagtatgacagcctgctggagcagggcctggtggaggccgccctggtgtccaagatcagcagccccagcgacaagaagatcccagccaagaaggagagctgccccaacacaggccgggacaaggaccacctgctgaagtacaacgtgggggacctggtgtggagcaaggtgtctggctacccctggtggccctgcatggtgtctgctgaccccctgctgcacagctacaccaagctgaagggccagaagaagagcgcccggcagtaccacgtgcagttctttggagatgcccctgagcgggcctggatctttgagaagagcctggtggcctttgaaggagagggccagtttgagaagctgtgccaggagagcgccaagcaggcccccaccaaggccgagaagatcaagctgctgaagcccatcagcggcaagctgcgggcccagtgggagatgggcatcgtgcaggccgaggaggccgcctccatgtctgtggaggagaggaaggccaagttcaccttcctgtatgtgggggaccagctgcacctgaacccccaggtggccaaggaggccggcattgctgctgagagcctgggggagatggccgagagcagtggagtgtctgaggaggccgctgagaaccccaagtctgtgcgggaggagtgcatccccatgaagagaagaagaagagccaagctgtgcagcagcgctgagaccctggagagccacccagacatcggcaagagcaccccccagaagacagctgaggccgacccccggcggggcgtgggcagccccccaggcaggaagaagaccaccgtgtccatgcccaggagcaggaaaggagatgctgccagccagttcctggtgttctgccagaagcacagagatgaggtggtggccgagcacccagatgccagcggggaggagattgaggagctgctgcggagccagtggagcctgctgtctgagaagcagagggcccgctacaacaccaagtttgccctggtggcccctgtgcaggccgaggaggacagcggaaatgtgaatggcaagaagaggaaccacaccaagaggatccaggaccccacagaagatgctgaggccgaggacacccccaggaagaggctgaggacagacaagcacagcctgaggaagagggacaccatcacagacaagacagcccggaccagcagctacaaggccatggaggccgccagcagcctgaagagccaggccgccaccaagaacctgagtgatgcctgcaagcccctgaagaagaggaacagagccagcacagctgccagcagcgccctgggcttcagcaagagcagcagccccagcgccagcctgacagaaaatgagctgctgtgggagcccacccctgtgaagctggacctgaacccagctgccctgtactgcacctag

SEQ ID NO: 176141 - DNA, 1890 bp, synthetic construct
  misc_feature 1..1890: note = Description of Artificial Sequence: Synthetic coding sequence
  source 1..1890: mol_type = other DNA
atggagttcagcatcaagcagagccccctgtctgtgcagagcgtggtgaagtgcatcaagatgaagcaggcccctgagatcctgggcagcgccaacgggaagacccccagctgtgaggtgaacagagaatgttctgtgttcctgagcaaggcccagctgagcagcagcctgcaggagggcgtgatgcagaagttcaacggccatgatgccctgcccttcatcccagctgacaagctgaaggacctgaccagcagggtcttcaacggggagcccggggcccatgatgccaagctgcgctttgagagccaggagatgaagggcatcggcaccccacccaacaccacccccatcaagaatggcagccctgagatcaagctgaagatcaccaagacctacatgaatggcaagcccctgtttgagagcagcatctgtggggacagcgctgctgatgtgtcccagagcgaggagaatggccagaagccagagaacaaggcccggaggaacaggaagaggagcatcaagtatgacagcctgctggagcagggcctggtggaggccgccctggtgtccaagatcagcagccccagcgacaagaagatcccagccaagaaggagagctgccccaacacaggccgggacaaggaccacctgctgaagtacaacgtgggggacctggtgtggagcaaggtgtctggctacccctggtggccctgcatggtgtctgctgaccccctgctgcacagctacaccaagctgaagggccagaagaagagcgcccggcagtaccacgtgcagttctttggagatgcccctgagcgggcctggatctttgagaagagcctggtggcctttgaaggagagggccagtttgagaagctgtgccaggagagcgccaagcaggcccccaccaaggccgagaagatcaagctgctgaagcccatcagcggcaagctgcgggcccagtgggagatgggcatcgtgcaggccgaggaggccgcctccatgtctgtggaggagaggaaggccaagttcaccttcctgtatgtgggggaccagctgcacctgaacccccaggtggccaaggaggccggcattgctgctgagagcctgggggagatggccgagagcagtggagtgtctgaggaggccgctgagaaccccaagtctgtgcgggaggagtgcatccccatgaagagaagaagaagagccaagctgtgcagcagcgctgagaccctggagagccacccagacatcggcaagagcaccccccagaagacagctgaggccgacccccggcggggcgtgggcagccccccaggcaggaagaagaccaccgtgtccatgcccaggagcaggaaaggagatgctgccagccagttcctggtgttctgccagaagcacagagatgaggtggtggccgagcacccagatgccagcggggaggagattgaggagctgctgcggagccagtggagcctgctgtctgagaagcagagggcccgctacaacaccaagtttgccctggtggcccctgtgcaggccgaggaggacagcggaaatgtgaatggcaagaagaggaaccacaccaagaggatccaggaccccacagaagatgctgaggccgaggacacccccaggaagaggctgaggacagacaagcacagcctgaggaagagggacaccatcacagacaagacagcccggaccagcagctacaaggccatggaggccgccagcagcctgaagagccaggccgccaccaagaacctgagtgatgcctgcaagcccctgaagaagaggaacagagccagcacagctgccagcagcgccctgggcttcagcaagagcagcagccccagcgccagcctgacagaaaatgaggtgaagtag

SEQ ID NO: 176142 - DNA, 822 bp, synthetic construct
  misc_feature 1..822: note = Description of Artificial Sequence: Synthetic coding sequence
  source 1..822: mol_type = other DNA
atggagttcagcatcaagcagagccccctgtctgtgcagagcgtggtgaagtgcatcaagatgaagcaggcccctgagatcctgggcagcgccaacgggaagacccccagctgtgaggtgaacagagaatgttctgtgttcctgagcaaggcccagctgagcagcagcctgcaggagggcgtgatgcagaagttcaacggccatgatgccctgcccttcatcccagctgacaagctgaaggacctgaccagcagggtcttcaacggggagcccggggcccatgatgccaagctgcgctttgagagccaggagatgaagggcatcggcaccccacccaacaccacccccatcaagaatggcagccctgagatcaagctgaagatcaccaagacctacatgaatggcaagcccctgtttgagagcagcatctgtggggacagcgctgctgatgtgtcccagagcgaggagaatggccagaagccagagaacaaggcccggaggaacaggaagaggagcatcaagtatgacagcctgctggagcagggcctggtggaggccgccctggtgtccaagatcagcagccccagcgacaagaagatcccagccaagaaggagagctgccccaacacaggccgggacaaggaccacctgctgaagtacaacgtgggggacctggtgtggagcaaggtgtctggctacccctggtggccctgcatggtgtctgctgaccccctgctgcacagctacaccaagctgaagggcatcttcaagagcaagaagtttgagcacctgaagaccagccagatcgtgctgaaggactag

SEQ ID NO: 176143 - DNA, 1944 bp, synthetic construct; identical to SEQ ID NO: 176140
  misc_feature 1..1944: note = Description of Artificial Sequence: Synthetic coding sequence
  source 1..1944: mol_type = other DNA

SEQ ID NO: 176144 - DNA, 114 bp, synthetic construct
  misc_feature 1..114: note = Description of Artificial Sequence: Synthetic coding sequence
  source 1..114: mol_type = other DNA
atggagttcagcatcaagcagagccccctgtctgtgcagagcgtggtgaagtgcatcaagatgaagcaggcccctgagatcctgggcagcgccaacgggaagacccccagctag

SEQ ID NO: 176145 - DNA, 4098 bp, synthetic construct; identical to SEQ ID NO: 176137
  misc_feature 1..4098: note = Description of Artificial Sequence: Synthetic coding sequence
  source 1..4098: mol_type = other DNA

SEQ ID NO: 176146 - DNA, 1179 bp, synthetic construct
  misc_feature 1..1179: note = Description of Artificial Sequence: Synthetic coding sequence
  source 1..1179: mol_type = other DNA
atggagttcagcatcaagcagagccccctgtctgtgcagagcgtggtgaagtgcatcaagatgaagcaggcccctgagatcctgggcagcgccaacgggaagacccccagctgtgaggtgaacagagaatgttctgtgttcctgagcaaggcccagctgagcagcagcctgcaggagggcgtgatgcagaagttcaacggccatgatgccctgcccttcatcccagctgacaagctgaaggacctgaccagcagggtcttcaacggggagcccggggcccatgatgccaagctgcgctttgagagccaggagatgaagggcatcggcaccccacccaacaccacccccatcaagaatggcagccctgagatcaagctgaagatcaccaagacctacatgaatggcaagcccctgtttgagagcagcatctgtggggacagcgctgctgatgtgtcccagagcgaggagaatggccagaagccagagaacaaggcccggaggaacaggaagaggagcatcaagtatgacagcctgctggagcagggcctggtggaggccgccctggtgtccaagatcagcagccccagcgacaagaagatcccagccaagaaggagagctgccccaacacaggccgggacaaggaccacctgctgaagtacaacgtgggggacctggtgtggagcaaggtgtctggctacccctggtggccctgcatggtgtctgctgaccccctgctgcacagctacaccaagctgaagggccagaagaagagcgcccggcagtaccacgtgcagttctttggagatgcccctgagcgggcctggatctttgagaagagcctggtggcctttgaaggagagggccagtttgagaagctgtgccaggagagcgccaagcaggcccccaccaaggccgagaagatcaagctgctgaagcccatcagcggcaagctgcgggcccagtgggagatgggcatcgtgcaggccgaggaggccgcctccatgtctgtggaggagaggaaggccaagttcaccttcctgtatgtgggggaccagctgcacctgaacccccaggtggccaaggaggccggcattgctgctgagagcctgggggagatggccgagagcagtggagtgtctgaggaggccgctgagaaccccaagtctgtgcgggagtag

SEQ ID NO: 176147 - DNA, 1890 bp, synthetic construct; identical to SEQ ID NO: 176141
  misc_feature 1..1890: note = Description of Artificial Sequence: Synthetic coding sequence
  source 1..1890: mol_type = other DNA

SEQ ID NO: 176148 - DNA, 600 bp, synthetic construct
  misc_feature 1..600: note = Description of Artificial Sequence: Synthetic coding sequence
  source 1..600: mol_type = other DNA
atggagttcagcatcaagcagagccccctgtctgtgcagagcgtggtgaagtgcatcaagatgaagcaggcccctgagatcctgggcagcgccaacgggaagacccccagctgtgaggtgaacagagaatgttctgtgttcctgagcaaggcccagctgagcagcagcctgcaggagggcgtgatgcagaagttcaacggccatgatgccctgcccttcatcccagctgacaagctgaaggacctgaccagcagggtcttcaacggggagcccggggcccatgatgccaagctgcgctttgagagccaggagatgaagggcatcggcaccccacccaacaccacccccatcaagaatggcagccctgagatcaagctgaagatcaccaagacctacatgaatggcaagcccctgtttgagagcagcatctgtggggacagcgctgctgatgtgtcccagagcgaggagaatggccagaagccagagaacaaggcccggaggaacaggaagaggagcatcaagtatgacagcctgctggagcagggcctggtggaggccgccctggtgtccaagatcagcagccccagcgacaagaagtag

SEQ ID NO: 176149 - DNA, 1938 bp, synthetic construct
  misc_feature 1..1938: note = Description of Artificial Sequence: Synthetic coding sequence
  source 1..1938: mol_type = other DNA
atggacttctccttctccttcatgcagggcatcatgggcaacaccatccagcagcccccccagctgattgattctgccaacatccggcaggaggatgcctttgacaacaacagcgacattgctgaagatggcggccagaccccctatgaggccaccctgcagcagggcttccagtacccagccaccacagaggacctgccccccctgaccaacggctaccccagcagcatctctgtgtatgagacccagaccaagtaccagagctacaaccagtaccccaacggcagcgccaacggctttggagctgtgaggaacttcagccccacagactactaccacagcgagatccccaacacccggccccatgagatcctggagaagcccagccccccccagcccccacctccacccagcgtgccccagaccgtcatccccaagaagacaggcagccctgagatcaagctgaagatcaccaagaccatccagaatggccgggagctgtttgagagcagcctgtgtggggacctgctgaatgaggtgcaggccagcgagcacaccaagagcaagcatgagagcaggaaggagaagaggaagaagagcaacaagcatgacagcagccgctctgaggagaggaagagccacaagatccccaagctggagcctgaggagcagaaccggcccaatgaaagagtggacacagtgtctgagaagccccgggaggagcctgtgctgaaggaggaggcccctgtgcagcccatcctgagctctgtgcccaccacagaggtgtccactggagtgaagttccaggtgggggacctggtgtggagcaaggtgggcacctacccctggtggccctgcatggtgtccagtgacccccagctggaggtgcacaccaagatcaacaccaggggggcccgggagtaccacgtgcagttcttcagcaaccagcctgagcgggcctgggtgcatgagaagagggtgcgggagtacaagggccacaagcagtatgaggagctgctggccgaggccaccaagcaggccagcaaccacagcgagaagcagaagatcaggaagccccggccccagcgggagcgggcccagtgggacatcggcatcgcccatgctgagaaggccctgaagatgacccgggaggagagaattgagcagtacaccttcatctacatcgacaagcagcctgaggaggccctgagccaggccaagaagtctgtggccagcaagacagaggtgaagaagacccggcggcccaggtctgtgctgaacacccagcctgagcagaccaatgctggggaggtggccagcagcctgagcagcacagagatccgccgccacagccagaggaggcacaccagcgctgaggaggaggagcccccacctgtgaagatcgcctggaagacagctgctgccaggaagagcctgcctgccagcatcaccatgcacaagggcagcctggacctgcagaagtgcaacatgagccctgtggtgaagattgagcaggtgtttgccctgcagaatgccactggagatggcaagttcatcgaccagtttgtgtacagcaccaagggcatcggcaacaagacagagatctctgtgcggggccaggacaggctcatcatcagcacccccaaccagagaaatgagaagcccacccagagcgtgagcagccctgaggccaccagcggcagcactggatctgtggagaagaagcagcagaggaggagcatccgcaccaggtctgagagcgagaagagcacagaggtggtgcccaagaagaagatcaagaaggagcaggtggagaccgtgccccaggccaccgtgaagacaggcctgcagaagggcagcgctgaccggggcgtgcagggctctgtgcgcttcagtgacagctctgtgtctgctgccatcgaggagaccgtggactag

SEQ ID NO: 176150 - DNA, 4314 bp, synthetic construct
  misc_feature 1..4314: note = Description of Artificial Sequence: Synthetic coding sequence
  source 1..4314: mol_type = other DNA
atggacttctccttctccttcatgcagggcatcatgggcaacaccatccagcagcccccccagctgattgattctgccaacatccggcaggaggatgcctttgacaacaacagcgacattgctgaagatggcggccagaccccctatgaggccaccctgcagcagggcttccagtacccagccaccacagaggacctgccccccctgaccaacggctaccccagcagcatctctgtgtatgagacccagaccaagtaccagagctacaaccagtaccccaacggcagcgccaacggctttggagctgtgaggaacttcagccccacagactactaccacagcgagatccccaacacccggccccatgagatcctggagaagcccagccccccccagcccccacctccacccagcgtgccccagaccgtcatccccaagaagacaggcagccctgagatcaagctgaagatcaccaagaccatccagaatggccgggagctgtttgagagcagcctgtgtggggacctgctgaatgaggtgcaggccagcgagcacaccaagagcaagcatgagagcaggaaggagaagaggaagaagagcaacaagcatgacagcagccgctctgaggagaggaagagccacaagatccccaagctggagcctgaggagcagaaccggcccaatgaaagagtggacacagtgtctgagaagccccgggaggagcctgtgctgaaggaggaggcccctgtgcagcccatcctgagctctgtgcccaccacagaggtgtccactggagtgaagttccaggtgggggacctggtgtggagcaaggtgggcacctacccctggtggccctgcatggtgtccagtgacccccagctggaggtgcacaccaagatcaacaccaggggggcccgggagtaccacgtgcagttcttcagcaaccagcctgagcgggcctgggtgcatgagaagagggtgcgggagtacaagggccacaagcagtatgaggagctgctggccgaggccaccaagcaggccagcaaccacagcgagaagcagaagatcaggaagccccggccccagcgggagcgggcccagtgggacatcggcatcgcccatgctgagaaggccctgaagatgacccgggaggagagaattgagcagtacaccttcatctacatcgacaagcagcctgaggaggccctgagccaggccaagaagtctgtggccagcaagacagaggtgaagaagacccggcggcccaggtctgtgctgaacacccagcctgagcagaccaatgctggggaggtggccagcagcctgagcagcacagagatccgccgccacagccagaggaggcacaccagcgctgaggaggaggagcccccacctgtgaagatcgcctggaagacagctgctgccaggaagagcctgcctgccagcatcaccatgcacaagggcagcctggacctgcagaagtgcaacatgagccctgtggtgaagattgagcaggtgtttgccctgcagaatgccactggagatggcaagttcatcgaccagtttgtgtacagcaccaagggcatcggcaacaagacagagatctctgtgcggggccaggacaggctcatcatcagcacccccaaccagagaaatgagaagcccacccagagcgtgagcagccctgaggccaccagcggcagcactggatctgtggagaagaagcagcagaggaggagcatccgcaccaggtctgagagcgagaagagcacagaggtggtgcccaagaagaagatcaagaaggagcaggtggagaccgtgccccaggccaccgtgaagacaggcctgcagaagggggccagcgagatcagtgacagctgcaagcccctgaagaagaggagccgggccagcacagatgtggagatgaccagcagcgcctacagagacaccagtgacagcgacagccggggcctgagtgacctgcaggtgggctttgggaagcaggtggacagccccagcgccacagcagatgctgatgtgtctgatgtgcagagcatggacagcagcctgagccggcggggcaccggcatgagcaagaaggacacagtgtgccagatctgtgagagcagcggggacagcctcatcccctgtgagggggagtgctgcaagcacttccacctggagtgcctgggcctggccagcctgcctgacagcaagttcatctgcatggagtgcaagacaggccagcacccctgcttcagctgcaaggtgtctgggaaggatgtgaagcgctgcagcgtgggcgcctgtgggaagttctaccacgaggcctgtgtgaggaagttccccacagccatctttgagagcaagggcttccgctgcccccagcactgctgcagcgcctgcagcatggagaaggacatccacaaggccagcaaaggaaggatgatgcgctgcctgcgctgccctgtggcctaccacagcggagatgcctgcatcgctgctggctccatgctggtgagcagctacatcctgatctgcagcaaccacagcaagaggagcagcaacagcagcgctgtgaatgtgggcttctgctttgtgtgtgcccggggcctgattgtgcaggaccacagcgaccccatgttcagcagctatgcctacaagagccactacctgctgaatgaaagcaacagagctgagctgatgaagctgcccatgatccccagcagcagcgccagcaagaagaagtgtgagaagggcggccgcctgctgtgctgtgagagctgcccagccagcttccaccctgagtgcctgagcattgagatgcctgagggctgctggaactgcaatgactgcaaggccggcaagaagctgcactacaagcagatcgtgtgggtgaagctgggcaactaccgctggtggccagctgagatctgcaaccccaggtctgtgcccctgaacatccagggcctgaagcatgacctgggggacttccctgtgttcttcttcggcagccatgactactactgggtgcaccagggccgggtcttcccctacgtggagggggacaagagctttgctgagggccagaccagcatcaacaagaccttcaagaaggccctggaggaggccgccaagcgcttccaggagctgaaggcccagcgggagagcaaggaggccctggagattgagaagaacagcaggaagcccccaccctacaagcacatcaaggccaacaaggtgattggcaaggtgcagatccaggtggccgacctgtctgagatcccccgctgcaactgcaagccagcagatgagaacccctgtggcctggagagtgaatgtctgaacaggatgctgcagtatgagtgccacccccaggtgtgcccagctggggaccgctgccagaaccagtgcttcaccaagaggctgtacccagatgctgagatcatcaagacagagcggcggggctggggcctgcggaccaagaggagcatcaagaagggggagtttgtgaatgaatatgtgggggagctgattgatgaggaggagtgccgcctgcgcatcaagagggcccatgaaaattctgtgaccaacttctacatgctgactgtgaccaaggaccgcatcattgatgctggccccaagggcaactacagccgcttcatgaaccacagctgcaaccccaactgtgagacccagaagtggacagtgaatggagatgtgcgggtgggcctgtttgccctgtgtgacatcccagctggcatggagctgaccttcaactacaacctggactgcctgggcaatggccgcacagagtgccactgtggggctgacaactgcagcggcttcctgggcgtgcggcccaagagcgcctgtgccagcaccaatgaggagaaggccaagaatgccaagctgaagcagaagaggaggaagatcaagacagagcccaagcagatgcatgaggactactgcttccagtgtggagatggaggagagctggtgatgtgtgacaagaaggactgccccaaggcctaccacctgctgtgcctgaacctgacccagcccccctacggcaagtgggagtgcccctggcaccagtgtgatgaatgtagcagcgctgctgtgtccttctgtgagttctgcccccacagcttctgcaaggaccacgagaagggggccctggtgcccagcgccctggagggccgcctgtgctgcagcgagcatgaccccatggcccctgtgtccccagagtactggagcaagatcaagtgcaagtgggagagccaggaccatggagaggaggtgaaggagtag

SEQ ID NO: 176151 - DNA, 4167 bp, synthetic construct
  misc_feature 1..4167: note = Description of Artificial Sequence: Synthetic coding sequence
  source 1..4167: mol_type = other DNA
atggacttctccttctccttcatgcagggcatcatgggcaacaccatccagcagcccccccagctgattgattctgccaacatccggcaggaggatgcctttgacaacaacagcgacattgctgaagatggcggccagaccccctatgaggccaccctgcagcagggcttccagtacccagccaccacagaggacctgccccccctgaccaacggctaccccagcagcatctctgtgtatgagacccagaccaagtaccagagctacaaccagtaccccaacggcagcgccaacggctttggagctgtgaggaacttcagccccacagactactaccacagcgagatccccaacacccggccccatgagatcctggagaagcccagccccccccagcccccacctccacccagcgtgccccagaccgtcatccccaagaagacaggcagccctgagatcaagctgaagatcaccaagaccatccagaatggccgggagctgtttgagagcagcctgtgtggggacctgctgaatgaggtgcaggccagcgagcacaccaagagcaagcatgagagcaggaaggagaagaggaagaagagcaacaagcatgacagcagccgctctgaggagaggaagagccacaagatccccaagctggagcctgaggagcagaaccggcccaatgaaagagtggacacagtgtctgagaagccccgggaggagcctgtgctgaaggaggaggcccctgtgcagcccatcctgagctctgtgcccaccacagaggtgtccactggagtgaagttccaggtgggggacctggtgtggagcaaggtgggcacctacccctggtggccctgcatggtgtccagtgacccccagctggaggtgcacaccaagatcaacaccaggggggcccgggagtaccacgtgcagttcttcagcaaccagcctgagcgggcctgggtgcatgagaagagggtgcgggagtacaagggccacaagcagtatgaggagctgctggccgaggccaccaagcaggccagcaaccacagcgagaagcagaagatcaggaagccccggccccagcgggagcgggcccagtgggacatcggcatcgcccatgctgagaaggccctgaagatgacccgggaggagagaattgagcagtacaccttcatctacatcgacaagcagcctgaggaggccctgagccaggccaagaagtctgtggccagcaagacagaggtgaagaagacccggcggcccaggtctgtgctgaacacccagcctgagcagaccaatgctggggaggtggccagcagcctgagcagcacagagatccgccgccacagccagaggaggcacaccagcgctgaggaggaggagcccccacctgtgaagatcgcctggaagacagctgctgccaggaagagcctgcctgccagcatcaccatgcacaagggcagcctggacctgcagaagtgcaacatgagccctgtggtgaagattgagcaggtgtttgccctgcagaatgccactggagatggcaagttcatcgaccagtttgtgtacagcaccaagggcatcggcaacaagacagagatctctgtgcggggccaggacaggctcatcatcagcacccccaaccagagaaatgagaagcccacccagagcgtgagcagccctgaggccaccagcggcagcactggatctgtggagaagaagcagcagaggaggagcatccgcaccaggtctgagagcgagaagagcacagaggtggtgcccaagaagaagatcaagaaggagcaggtggagaccgtgccccaggccaccgtgaagacaggcctgcagaagggggccagcgagatcagtgacagctgcaagcccctgaagaagaggagccgggccagcacagatgtggagatgaccagcagcgcctacagagacaccagtgacagcgacagccggggcctgagtgacctgcaggtgggctttgggaagcaggtggacagccccagcgccacagcagatgctgatgtgtctgatgtgcagagcatggacagcagcctgagccggcggggcaccggcatgagcaagaaggacacagtgtgccagatctgtgagagcagcggggacagcctcatcccctgtgagggggagtgctgcaagcacttccacctggagtgcctgggcctggccagcctgcctgacagcaagttcatctgcatggagtgcaagacaggccagcacccctgcttcagctgcaaggtgtctgggaaggatgtgaagcgctgcagcgtgggcgcctgtgggaagttctaccacgaggcctgtgtgaggaagttccccacagccatctttgagagcaagggcttccgctgcccccagcactgctgcagcgcctgcagcatggagaaggacatccacaaggccagcaaaggaaggatgatgcgctgcctgcgctgccctgtggcctaccacagcggagatgcctgcatcgctgctggctccatgctggtgagcagctacatcctgatctgcagcaaccacagcaagaggagcagcaacagcagcgctgtgaatgtgggcttctgctttgtgtgtgcccggggcggccgcctgctgtgctgtgagagctgcccagccagcttccacccagaatgtctgagcattgagatgcctgagggctgctggaactgcaatgactgcaaggccggcaagaagctgcactacaagcagatcgtgtgggtgaagctgggcaactaccgctggtggccagctgagatctgcaaccccaggtctgtgcccctgaacatccagggcctgaagcatgacctgggggacttccctgtgttcttcttcggcagccatgactactactgggtgcaccagggccgggtcttcccctacgtggagggggacaagagctttgctgagggccagaccagcatcaacaagaccttcaagaaggccctggaggaggccgccaagcgcttccaggagctgaaggcccagcgggagagcaaggaggccctggagattgagaagaacagcaggaagcccccaccctacaagcacatcaaggccaacaaggtgattggcaaggtgcagatccaggtggccgacctgtctgagatcccccgctgcaactgcaagccagcagatgagaacccctgtggcctggagagcgagtgcctgaacaggatgctgcagtatgagtgccacccccaggtgtgcccagctggggaccgctgccagaaccagtgcttcaccaagaggctgtacccagatgctgagatcatcaagacagaaagaagaggctggggcctgcggaccaagaggagcatcaagaagggggagtttgtgaatgaatatgtgggggagctgattgatgaggaggagtgccgcctgcgcatcaagagggcccacgagaacagcgtgaccaacttctacatgctgactgtgaccaaggaccgcatcattgatgctggccccaagggcaactacagccgcttcatgaaccacagctgcaaccccaactgtgagacccagaagtggacagtgaatggagatgtgcgggtgggcctgtttgccctgtgtgacatcccagctggcatggagctgaccttcaactacaacctggactgcctgggcaatggaagaacagagtgccactgtggggctgacaactgcagcggcttcctgggcgtgcggcccaagagcgcctgtgccagcaccaatgaggagaaggccaagaatgccaagctgaagcagaagaggaggaagatcaagacagagcccaagcagatgcatgaggactactgcttccagtgtggagatggaggagagctggtgatgtgtgacaagaaggactgccccaaggcctaccacctgctgtgcctgaacctgacccagcccccctacggcaagtgggagtgcccctggcaccagtgtgatgagtgcagcagcgctgctgtgtccttctgtgagttctgcccccacagcttctgcaaggaccacgagaagggggccctggtgcccagcgccctggagggccgcctgtgctgcagcgagcatgaccccatggcccctgtgtccccagagtactggagcaagatcaagtgcaagtgggagagccaggaccacggggaggaggtgaaggagtag

SEQ ID NO: 176152 - DNA, 4125 bp, synthetic construct
  misc_feature 1..4125: note = Description of Artificial Sequence: Synthetic coding sequence
  source 1..4125: mol_type = other DNA
atggacttctccttctccttcatgcagggcatcatgggcaacaccatccagcagcccccccagctgattgattctgccaacatccggcaggaggatgcctttgacaacaacagcgacattgctgaagatggcggccagaccccctatgaggccaccctgcagcagggcttccagtacccagccaccacagaggacctgccccccctgcccccacctcctccttctgtgccccagaccgtcatccccaagaagacaggcagccctgagatcaagctgaagatcaccaagaccatccagaatggccgggagctgtttgagagcagcctgtgtggggacctgctgaatgaggtgcaggccagcgagcacaccaagagcaagcatgagagcaggaaggagaagaggaagaagagcaacaagcatgacagcagccgctctgaggagaggaagagccacaagatccccaagctggagcctgaggagcagaaccggcccaatgaaagagtggacacagtgtctgagaagccccgggaggagcctgtgctgaaggaggaggcccctgtgcagcccatcctgagctctgtgcccaccacagaggtgtccactggagtgaagttccaggtgggggacctggtgtggagcaaggtgggcacctacccctggtggccctgcatggtgtccagtgacccccagctggaggtgcacaccaagatcaacaccaggggggcccgggagtaccacgtgcagttcttcagcaaccagcctgagcgggcctgggtgcatgagaagagggtgcgggagtacaagggccacaagcagtatgaggagctgctggccgaggccaccaagcaggccagcaaccacagcgagaagcagaagatcaggaagccccggccccagcgggagcgggcccagtgggacattggaattgcccacgccgagaaggccctgaagatgacccgggaggagcgcatcgagcagtacaccttcatctacatcgacaagcagcctgaggaggccctgagccaggccaagaagtctgtggccagcaagacagaggtgaagaagacccggcggcccaggtctgtgctgaacacccagcctgagcagaccaatgctggggaggtggccagcagcctgagcagcacagagatcagaagacacagccagaggaggcacaccagcgctgaggaggaggagcccccacctgtgaagatcgcctggaagacagctgctgccaggaagagcctgcctgccagcatcaccatgcacaagggcagcctggacctgcagaagtgcaacatgagccctgtggtgaagattgagcaggtgtttgccctgcagaatgccactggagatggcaagttcatcgaccagtttgtgtacagcaccaagggcatcggcaacaagacagagatctctgtgcggggccaggacaggctcatcatcagcacccccaaccagagaaatgagaagcccacccagagcgtgagcagccctgaggccaccagcggcagcacaggctctgtggagaagaagcagcagaggaggagcatccgcaccaggtctgagagcgagaagagcacagaggtggtgcccaagaagaagatcaagaaggagcaggtggagaccgtgccccaggccaccgtgaagacaggcctgcagaagggggccagcgagatcagtgacagctgcaagcccctgaagaagaggagccgggccagcacagatgtggagatgaccagcagcgcctacagagacaccagtgacagcgacagccggggcctgagtgacctgcaggtgggctttgggaagcaggtggacagccccagcgccacagcagatgctgatgtgtctgatgtgcagagcatggacagcagcctgagcagaagaggcaccggcatgagcaagaaggacacagtgtgccagatctgtgagagcagcggggacagcctcatcccctgtgaaggagagtgctgcaagcacttccacctggagtgcctgggcctggccagcctgcctgacagcaagttcatctgcatggagtgcaagacaggccagcacccctgcttcagctgcaaggtgtctgggaaggatgtgaagcgctgcagcgtgggcgcctgtgggaagttctaccacgaggcctgtgtgaggaagttccccacagccatctttgagagcaagggcttccgctgcccccagcactgctgcagcgcctgcagcatggagaaggacatccacaaggccagcaagggccgcatgatgcgctgcctgcgctgccctgtggcctaccacagcggagatgcctgcatcgccgccggctccatgctggtgtcctcctacatcctgatctgcagcaaccacagcaagaggagcagcaacagcagcgctgtgaatgtgggcttctgctttgtgtgtgcccggggcctcatcgtgcaggaccacagcgaccccatgttcagcagctatgcctacaagagccactacctgctgaatgaaagcaacagagctgagctgatgaagctgcccatgatccccagcagcagcgccagcaagaagaagtgtgagaagggcggccgcctgctgtgctgtgagagctgcccagccagcttccacccagaatgtctgagcattgagatgcctgagggctgctggaactgcaatgactgcaaggccggcaagaagctgcactacaagcagatcgtgtgggtgaagctgggcaactaccgctggtggccagctgagatctgcaaccccaggtctgtgcccctgaacatccagggcctgaagcatgacctgggggacttccctgtgttcttcttcggcagccatgactactactgggtgcaccagggccgggtcttcccctacgtggagggggacaagagctttgctgagggccagaccagcatcaacaagaccttcaagaaggccctggaggaggccgccaagcgcttccaggagctgaaggcccagcgggagagcaaggaggccctggagattgagaagaacagcaggaagcccccaccctacaagcacatcaaggccaacaaggtgattggcaaggtgcagatccaggtggccgacctgtctgagatcccccgctgcaactgcaagccagcagatgagaacccctgtggcctggagagcgagtgcctgaacaggatgctgcagtatgagtgccacccccaggtgtgcccagctggggaccgctgccagaaccagtgcttcaccaagaggctgtacccagatgctgagatcatcaagacagaaagaagaggctggggcctgcggaccaagaggagcatcaagaagggggagtttgtgaatgaatatgtgggggagctgattgatgaggaggagtgccgcctgcgcatcaagagggcccacgagaacagcgtgaccaacttctacatgctgactgtgaccaaggaccgcatcattgatgctggccccaagggcaactacagccgcttcatgaaccacagctgcaaccccaactgtgagacccagaagtggacagtgaatggagatgtgcgggtgggcctgtttgccctgtgtgacatcccagctggcatggagctgaccttcaactacaacctggactgcctgggcaatggaagaacagagtgccactgtggggctgacaactgcagcggcttcctgggcgtgcggcccaagagcgcctgtgccagcaccaatgaggagaaggccaagaatgccaagctgaagcagaagaggaggaagatcaagacagagcccaagcagatgcatgaggactactgcttccagtgtggagatggaggagagctggtgatgtgtgacaagaaggactgccccaaggcctaccacctgctgtgcctgaacctgacccagcccccctacggcaagtgggagtgcccctggcaccagtgtgatgagtgcagcagcgctgctgtgtccttctgtgagttctgcccccacagcttctgcaaggaccacgagaagggggccctggtgcccagcgccctggagggccgcctgtgctgcagcgagcatgaccccatggcccctgtgtccccagagtactggagcaagatcaagtgcaagtgggagagccaggaccacggggaggaggtgaaggagtag

SEQ ID NO: 176153 - DNA, 4281 bp, synthetic construct
  misc_feature 1..4281: note = Description of Artificial Sequence: Synthetic coding sequence
  source 1..4281: mol_type = other DNA
atggacttctccttctccttcatgcagggcatcatgggcaacaccatccagcagcccccccagctgattgattctgccaacatccggcaggaggatgcctttgacaacaacagcgacattgctgaagatggcggccagaccccctatgaggccaccctgcagcagggcttccagtacccagccaccacagaggacctgccccccctgaccaacggctaccccagcagcatctctgtgtatgagacccagaccaagtaccagagctacaaccagtaccccaacggcagcgccaacggctttggagctgtgaggaacttcagccccacagactactaccacagcgagatccccaacacccggccccatgagatcctggagaagcccagccccccccagcccccacctccacccagcgtgccccagaccgtcatccccaagaagacaggcagccctgagatcaagctgaagatcaccaagaccatccagaatggccgggagctgtttgagagcagcctgtgtggggacctgctgaatgaggtgcaggccagcgagcacaccaagagcaagcatgagagcaggaaggagaagaggaagaagagcaacaagcatgacagcagccgctctgaggagaggaagagccacaagatccccaagctggagcctgaggagcagaaccggcccaatgaaagagtggacacagtgtctgagaagccccgggaggagcctgtgctgaaggaggaggcccctgtgcagcccatcctgagctctgtgcccaccacagaggtgtccactggagtgaagttccaggtgggggacctggtgtggagcaaggtgggcacctacccctggtggccctgcatggtgtccagtgacccccagctggaggtgcacaccaagatcaacaccaggggggcccgggagtaccacgtgcagttcttcagcaaccagcctgagcgggcctgggtgcatgagaagagggtgcgggagtacaagggccacaagcagtatgaggagctgctggccgaggccaccaagcaggccagcaaccacagcgagaagcagaagatcaggaagccccggccccagcgggagcgggcccagtgggacatcggcatcgcccatgctgagaaggccctgaagatgacccgggaggagagaattgagcagtacaccttcatctacatcgacaagcagcctgaggaggccctgagccaggccaagaagtctgtggccagcaagacagaggtgaagaagacccggcggcccaggtctgtgctgaacacccagcctgagcagaccaatgctggggaggtggccagcagcctgagcagcacagagatccgccgccacagccagaggaggcacaccagcgctgaggaggaggagcccccacctgtgaagatcgcctggaagacagctgctgccaggaagagcctgcctgccagcatcaccatgcacaagggcagcctggacctgcagaagtgcaacatgagccctgtggtgaagattgagcaggtgtttgccctgcagaatgccactggagatggcaagttcatcgaccagtttgtgtacagcaccaagggcatcggcaacaagacagagatctctgtgcggggccaggacaggctcatcatcagcacccccaaccagagaaatgagaagcccacccagagcgtgagcagccctgaggccaccagcggcagcactggatctgtggagaagaagcagcagaggaggagcatccgcaccaggtctgagagcgagaagagcacagaggtggtgcccaagaagaagatcaagaaggagcaggtggagaccgtgccccaggccaccgtgaagacaggcctgcagaagggggccagcgagatcagtgacagctgcaagcccctgaagaagaggagccgggccagcacagatgtggagatgaccagcagcgcctacagagacaccagtgacagcgacagccggggcctgagtgacctgcaggtgggctttgggaagcaggtggacagccccagcgccacagcagatgctgatgtgtctgatgtgcagagcatggacagcagcctgagccggcggggcaccggcatgagcaagaaggacacagtgtgccagatctgtgagagcagcggggacagcctcatcccctgtgagggggagtgctgcaagcacttccacctggagtgcctgggcctggccagcctgcctgacagcaagttcatctgcatggagtgcaagacaggccagcacccctgcttcagctgcaaggtgtctgggaaggatgtgaagcgctgcagcgtgggcgcctgtgggaagttctaccacgaggcctgtgtgaggaagttccccacagccatctttgagagcaagggcttccgctgcccccagcactgctgcagcgcctgcagcatggagaaggacatccacaaggccagcaaaggaaggatgatgcgctgcctgcgctgccctgtggcctaccacagcggagatgcctgcatcgctgctggctccatgctggtgagcagctacatcctgatctgcagcaaccacagcaagaggagcagcaacagcagcgctgtgaatgtgggcttctgctttgtgtgtgcccggggcctgattgtgcaggaccacagcgaccccatgttcagcagctatgcctacaagagccactacctgctgaatgaaagcaacagagctgagctgatgaagctgcccatgatccccagcagcagcgccagcaagaagaagtgtgagaagggcggccgcctgctgtgctgtgagagctgcccagccagcttccaccctgagtgcctgagcattgagatgcctgagggctgctggaactgcaatgactgcaaggccggcaagaagctgcactacaagcagatcgtgtgggtgaagctgggcaactaccgctggtggccagctgagatctgcaaccccaggtctgtgcccctgaacatccagggcctgaagcatgacctgggggacttccctgtgttcttcttcggcagccatgactactactgggtgcaccagggccgggtcttcccctacgtggagggggacaagagctttgctgagggccagaccagcatcaacaagaccttcaagaaggccctggaggaggccgccaagcgcttccaggagctgaaggcccagcgggagagcaaggaggccctggagattgagaagaacagcaggaagcccccaccctacaagcacatcaaggccaacaaggtgattggcaaggtgcagatccaggtggccgacctgtctgagatcccccgctgcaactgcaagccagcagatgagaacccctgtggcctggagagtgaatgtctgaacaggatgctgcagtatgagtgccacccccaggtgtgcccagctggggaccgctgccagaaccagtgcttcaccaagaggctgtacccagatgctgagatcatcaagacagagcggcggggctggggcctgcggaccaagaggagcatcaagaagggggagtttgtgaatgaatatgtgggggagctgattgatgaggaggagtgccgcctgcgcatcaagagggcccatgaaaattctgaccgcatcattgatgctggccccaagggcaactacagccgcttcatgaaccacagctgcaaccccaactgtgagacccagaagtggacagtgaatggagatgtgcgggtgggcctgtttgccctgtgtgacatcccagctggcatggagctgaccttcaactacaacctggactgcctgggcaatggaagaacagagtgccactgtggggctgacaactgcagcggcttcctgggcgtgcggcccaagagcgcctgtgccagcaccaatgaggagaaggccaagaatgccaagctgaagcagaagaggaggaagatcaagacagagcccaagcagatgcatgaggactactgcttccagtgtggagatggaggagagctggtgatgtgtgacaagaaggactgccccaaggcctaccacctgctgtgcctgaacctgacccagcccccctacggcaagtgggagtgcccctggcaccagtgtgatgagtgcagcagcgctgctgtgtccttctgtgagttctgcccccacagcttctgcaaggaccacgagaagggggccctggtgcccagcgccctggagggccgcctgtgctgcagcgagcatgaccccatggcccctgtgtccccagagtactggagcaagatcaagtgcaagtgggagagccaggaccacggggaggaggtgaaggagtag

SEQ ID NO: 176154 - DNA, 849 bp, synthetic construct
  misc_feature 1..849: note = Description of Artificial Sequence: Synthetic coding sequence
  source 1..849: mol_type = other DNA
atggacttctccttctccttcatgcagggcatcatgggcaacaccatccagcagcccccccagctgattgattctgccaacatccggcaggaggatgcctttgacaacaacagcgacattgctgaagatggcggccagaccccctatgaggccaccctgcagcagggcttccagtacccagccaccacagaggacctgccccccctgaccaacggctaccccagcagcatctctgtgtatgagacccagaccaagtaccagagctacaaccagtaccccaacggcagcgccaacggctttggagctgtgaggaacttcagccccacagactactaccacagcgagatccccaacacccggccccatgagatcctggagaagcccagccccccccagcccccacctccacccagcgtgccccagaccgtcatccccaagaagacaggcagccctgagatcaagctgaagatcaccaagaccatccagaatggccgggagctgtttgagagcagcctgtgtggggacctgctgaatgaggtgcaggccagcgagcacaccaagagcaagcatgagagcaggaaggagaagaggaagaagagcaacaagcatgacagcagccgctctgaggagaggaagagccacaagatccccaagctggagcctgaggagcagaaccggcccaatgaaagagtggacacagtgtctgagaagccccgggaggagcctgtgctgaaggaggaggcccctgtgcagcccatcctgagctctgtgcccaccacagaggtgtccactggagtgaagttccaggtgggggacctggtgtggagcaaggtgggcacctacccctag

SEQ ID NO: 176155 - DNA, 78 bp, synthetic construct
  misc_feature 1..78: note = Description of Artificial Sequence: Synthetic coding sequence
  source 1..78: mol_type = other DNA
atggacttctccttctccttcatgcagggcatcatgggcaacaccatccagcagcccccccagctgattgacagctag

SEQ ID NO: 176156 - DNA, 48 bp, synthetic construct
  misc_feature 1..48: note = Description of Artificial Sequence: Synthetic coding sequence
  source 1..48: mol_type = other DNA
atggacttctccttctccttcatgcagggcatcatgggcaacacctag

SEQ ID NO: 176157 - DNA, 1620 bp, synthetic construct
  misc_feature 1..1620: note = Description of Artificial Sequence: Synthetic coding sequence
  source 1..1620: mol_type = other DNA
atgcctggccagaggcgggccctgagccccaagatggcctccatgagggagagtgacaccggcctgtggctgcacaacaagctgggcgccacagatgagctgtgggcccctccttccatcgccagcctgctgacagctgctgtgattgacaacatccggctgtgcttccacggcctgagcagcgctgtgaagctgaagctgctgctgggcaccctgcacctgcccaggagaacagtggatgagatgaagggggccctgatggagatcatccagctggccagcctggacagcgacccctgggtgctgatggtggccgacatcctgaagagcttcccagacaccggcagcctgaacctggagctggaggagcagaaccccaacgtgcaggacatcctgggggagctgcgggagaaggtgggagaatgtgaggccagcgccatgctgcccctggagtgccagtacctgaacaagaatgccctgaccaccctggccggccccctgaccccacctgtgaagcacttccagctgaagaggaagcccaagagcgccaccctgcgggcagagctgctgcagaagagcacagaaacagcccagcagctgaagaggtctgctggggtgcccttccacgccaagggccggggcctgctgaggaagatggacaccaccacccccctgaagggcatccccaagcaggcccccttccgcagccccacagcccccagcgtcttcagccccaccggcaacagaacacccatcccccccagcaggaccctgctgaggaaggagcggggcgtgaagctgctggacatcagcgagctggacatggtgggcgccggccgggaggccaagagaagaaggaagaccctggatgctgaggtggtggagaagccagccaaggaggagaccgtggtggagaatgccaccccagactatgctgctggcctggtgtccacccagaagctgggcagcctgaacaatgagcccgccctgcccagcaccagctacctgcccagcaccccatctgtggtgcctgccagcagctacatccccagcagcgagaccccaccagcccccagcagccgggaggccagccggcccccagaggagcccagcgcccccagccccaccctgcctgcccagttcaagcagagggcccccatgtacaacagcggcctgagccctgccacccccaccccagctgcccccaccagccccctgacccccaccaccccacctgctgtggcccccaccacccagaccccacctgtggccatggtggccccccagacccaggccccagcccagcagcagcccaagaagaacctgagcctgacccgggagcagatgtttgctgcccaggagatgttcaagacagccaacaaggtgaccaggcctgagaaggccctgatcctgggcttcatggccggcagccgggagaacccctgccaggagcagggagatgtgatccagatcaagctgtctgagcacacagaggacctgcccaaggcagatggccagggcagcaccaccatgctggtggacacagtgtttgagatgaactatgccaccggccagtggacccgcttcaagaagtacaagcccatgaccaacgtgtcctag

SEQ ID NO: 176158 - DNA, 1587 bp, synthetic construct
  misc_feature 1..1587: note = Description of Artificial Sequence: Synthetic coding sequence
  source 1..1587: mol_type = other DNA
atggcctccatgagggagagtgacaccggcctgtggctgcacaacaagctgggcgccacagatgagctgtgggccccacccagcatcgccagcctgctgacagctgctgtgattgacaacatccggctgtgcttccacggcctgagcagcgctgtgaagctgaagctgctgctgggcaccctgcacctgcccaggagaacagtggatgagatgaagggggccctgatggagatcatccagctggccagcctggacagcgacccctgggtgctgatggtggccgacatcctgaagagcttcccagacaccggcagcctgaacctggagctggaggagcagaaccccaacgtgcaggacatcctgggggagctgcgggagaaggtgggggagtgtgaggccagcgccatgctgcccctggagtgccagtacctgaacaagaatgccctgaccaccctggccggccccctgaccccacctgtgaagcacttccagctgaagaggaagcccaagagcgccaccctgcgggcagagctgctgcagaagagcacagaaacagcccagcagctgaagaggtctgctggggtgcccttccacgccaagggccggggcctgctgaggaagatggacaccaccacccccctgaagggcatccccaagcaggcccccttccgcagccccacagcccccagcgtcttcagccccactggaaacagaacacccatcccccccagcaggaccctgctgaggaaggagcggggcgtgaagctgctggacatcagcgagctggacatggtgggcgccggccgggaggccaagagaagaaggaagaccctggatgctgaggtggtggagaagccagccaaggaggagaccgtggtggagaatgccaccccagactatgctgctggcctggtgtccacccagaagctgggcagcctgaacaatgaaccagccctgcccagcaccagctacctgcccagcacccccagcgtggtgcctgccagcagctacatccccagcagcgagaccccaccagcccccagcagccgggaggccagcaggcctcctgaggagcccagcgcccccagccccaccctgcctgcccagttcaagcagagggcccccatgtacaacagcggcctgagccctgccacccccaccccagctgcccccaccagccccctgacccccaccaccccacctgctgtggcccccaccacccagaccccacctgtggccatggtggccccccagacccaggccccagcccagcagcagcccaagaagaacctgagcctgacccgggagcagatgtttgctgcccaggagatgttcaagacagccaacaaggtgaccaggcctgagaaggccctgatcctgggcttcatggccggcagccgggagaacccctgccaggagcagggagatgtgatccagatcaagctgtctgagcacacagaggacctgcccaaggcagatggccagggcagcaccaccatgctggtggacacagtgtttgagatgaactatgccaccggccagtggacccgcttcaagaagtacaagcccatgaccaacgtgtcctag

SEQ ID NO: 176159 - DNA, 1182 bp, synthetic construct
  misc_feature 1..1182: note = Description of Artificial Sequence: Synthetic coding sequence
  source 1..1182: mol_type = other DNA
atgctgcccctggagtgccagtacctgaacaagaatgccctgaccaccctggccggccccctgaccccacctgtgaagcacttccagctgaagaggaagcccaagagcgccaccctgcgggcagagctgctgcagaagagcacagaaacagcccagcagctgaagaggtctgctggggtgcccttccacgccaagggccggggcctgctgaggaagatggacaccaccacccccctgaagggcatccccaagcaggcccccttccgcagccccacagcccccagcgtcttcagccccaccggcaacagaacacccatcccccccagcaggaccctgctgaggaaggagcggggcgtgaagctgctggacatcagcgagctggacatggtgggcgccggccgggaggccaagagaagaaggaagaccctggatgctgaggtggtggagaagccagccaaggaggagaccgtggtggagaatgccaccccagactatgctgctggcctggtgtccacccagaagctgggcagcctgaacaatgagcccgccctgcccagcaccagctacctgcccagcaccccatctgtggtgcctgccagcagctacatccccagcagcgagaccccaccagcccccagcagccgggaggccagccggcccccagaggagcccagcgcccccagccccaccctgcctgcccagttcaagcagagggcccccatgtacaacagcggcctgagccctgccacccccaccccagctgcccccaccagccccctgacccccaccaccccacctgctgtggcccccaccacccagaccccacctgtggccatggtggccccccagacccaggccccagcccagcagcagcccaagaagaacctgagcctgacccgggagcagatgtttgctgcccaggagatgttcaagacagccaacaaggtgaccaggcctgagaaggccctgatcctgggcttcatggccggcagccgggagaacccctgccaggagcagggagatgtgatccagatcaagctgtctgagcacacagaggacctgcccaaggcagatggccagggcagcaccaccatgctggtggacacagtgtttgagatgaactatgccaccggccagtggacccgcttcaagaagtacaagcccatgaccaacgtgtcctag

SEQ ID NO: 176160 - DNA, 462 bp, synthetic construct
  misc_feature 1..462: note = Description of Artificial Sequence: Synthetic coding sequence
  source 1..462: mol_type = other DNA
atgtacaggatgcagctgctgagctgcatcgccctgagcctggccctggtgaccaacagcgcccccaccagcagcagcaccaagaagacccagctgcagctggagcacctgctgctggacctgcagatgatcctgaatggcatcaacaactacaagaaccccaagctgaccaggatgctgaccttcaagttctacatgcccaagaaggccacagagctgaagcacctgcagtgcctggaggaggagctgaagcccctggaggaggtgctgaacctggcccagagcaagaacttccacctgcggccccgggacctgatcagcaacatcaacgtcatcgtgctggagctgaagggcagcgagaccaccttcatgtgtgaatatgcagatgaaacagccaccatcgtggagttcctgaaccgctggatcaccttctgccagagcatcatcagcaccctgacctag

SEQ ID NO: 176161 - DNA, 2673 bp, synthetic construct
  misc_feature 1..2673: note = Description of Artificial Sequence: Synthetic coding sequence
  source 1..2673: mol_type = other DNA
atggacagcaacacagcccccctgggccccagctgcccccagcccccaccagccccccagccccaggcccggagccggctgaatgccacagccagcctggagcaggagaggtctgagcggccccgggcccctggcccccaggccggccctggccctggggtgagagatgctgctgccccagctgagccccaggcccagcacaccaggagccgggagcgggcagatggcaccggccccaccaagggggacatggagatcccctttgaggaggtgctggagcgggccaaggccggggaccccaaggcccagacagaggtgggcaagcactacctgcagctggccggggacacagatgaggagctgaacagctgcacagctgtggactggctggtgctggccgccaagcagggccggcgggaggccgtgaagctgctgcggcgctgcctggccgaccggcggggcatcaccagtgaaaatgaaagagaggtgcggcagctgagcagcgagacagacctggagagagctgtgaggaaggccgccctggtgatgtactggaagctgaaccccaagaagaagaagcaggtggccgtggccgagctgctggagaatgtgggccaggtgaatgaacatgatggaggagcccagcccggccctgtgcccaagagcctgcagaagcagaggaggatgctggagcggctggtgagcagcgagagcaagaactacatcgccctggatgactttgtggagatcaccaagaagtatgccaagggcgtcatccccagcagcctcttcctgcaggatgatgaagatgatgatgagctggccggcaagagccctgaggacctgcccctgcggctgaaggtggtgaagtaccccctgcacgccatcatggagatcaaggagtacctgattgacatggccagccgggccggcatgcactggctgagcaccatcatccccacccaccacatcaatgccctgatcttcttcttcatcgtgagcaacctgaccatcgacttctttgccttcttcatccccctggtgatcttctacctgtccttcatctccatggtgatctgcaccctgaaggtgttccaggacagcaaggcctgggagaacttccgcaccctgacagacctgctgctgcgctttgagcccaacctggatgtggagcaggccgaggtgaactttggctggaaccacctggagccctatgcccacttcctgctgtctgtgttcttcgtcatcttctccttccccatcgccagcaaggactgcatcccctgcagcgagctggccgtcatcaccggcttcttcaccgtgaccagctacctgagcctgagcacccatgctgagccctacacccggcgggccctggccacagaggtgacagctggcctgctgagcctgctgcccagcatgcccctgaactggccctacctgaaggtgctgggccagaccttcatcaccgtgcctgtgggccacctggtggtgctgaatgtgtctgtgccctgcctgctgtatgtgtacctgctgtacctgttcttcaggatggcccagctgaggaacttcaagggcacctactgctacctggtgccctacctggtgtgcttcatgtggtgtgagctgtctgtggtgatcctgctggagagcacaggcctgggcctgctgcgggccagcatcggctacttcctgttcctgtttgccctgcccatcctggtggccggcctggccctggtgggcgtgctgcagtttgcccgctggttcaccagcctggagctgaccaagattgctgtgacagtggccgtgtgcagcgtgcccctgctgctgcgctggtggaccaaggccagcttctctgtggtgggcatggtgaagagcctgaccaggagctccatggtgaagctgatcctggtgtggctgacagccatcgtgctcttctgctggttctacgtgtacagaagtgagggcatgaaggtgtacaacagcaccctgacctggcagcagtatggagccctgtgtggcccccgggcctggaaggagaccaacatggcccggacccagatcctgtgcagccacctggagggccaccgggtgacctggacaggccgcttcaagtatgtgcgggtgacagacatcgacaacagcgctgagagcgccatcaacatgctgcccttcttcatcggggactggatgcgctgcctgtatggagaggcctacccagcctgcagccctggcaacaccagcacagctgaggaggagctgtgccgcctgaagctgctggccaagcacccctgccacatcaagaagtttgaccgctacaagtttgagatcaccgtgggcatgcccttcagcagtggagcagatggcagccgcagccgggaggaggatgatgtgaccaaggacatcgtgctgcgggccagcagcgagttcaagtctgtgctgctgagcctgcggcagggcagcctgattgagttcagcaccatcctggagggccgcctgggcagcaagtggcctgtgtttgagctgaaggccatcagctgcctgaactgcatggcccagctgagccccacccggcggcacgtgaagattgaacatgactggaggagcacagtgcacggggctgtgaagtttgcctttgacttcttcttcttccccttcctgtctgctgcctag

SEQ ID NO: 176162 - DNA, 807 bp, synthetic construct
  misc_feature 1..807: note = Description of Artificial Sequence: Synthetic coding sequence
  source 1..807: mol_type = other DNA
atggtgaagagcctgaccaggagctccatggtgaagctgatcctggtgtggctgacagccatcgtgctcttctgctggttctacgtgtacagaagtgagggcatgaaggtgtacaacagcaccctgacctggcagcagtatggagccctgtgtggcccccgggcctggaaggagaccaacatggcccggacccagatcctgtgcagccacctggagggccaccgggtgacctggacaggccgcttcaagtatgtgcgggtgacagacatcgacaacagcgctgagagcgccatcaacatgctgcccttcttcatcggggactggatgcgctgcctgtatggagaggcctacccagcctgcagccctggcaacaccagcacagctgaggaggagctgtgccgcctgaagctgctggccaagcacccctgccacatcaagaagtttgaccgctacaagtttgagatcaccgtgggcatgcccttcagcagtggagcagatggcagccgcagccgggaggaggatgatgtgaccaaggacatcgtgctgcgggccagcagcgagttcaagtctgtgctgctgagcctgcggcagggcagcctgattgagttcagcaccatcctggagggccgcctgggcagcaagtggcctgtgtttgagctgaaggccatcagctgcctgaactgcatggcccagctgagccccacccggcggcacgtgaagattgaacatgactggaggagcacagtgcacggggctgtgaagtttgcctttgacttcttcttcttccccttcctgtctgctgcctag

SEQ ID NO: 176163 - DNA, 3342 bp, synthetic construct
  misc_feature 1..3342: note = Description of Artificial Sequence: Synthetic coding sequence
  source 1..3342: mol_type = other DNA
atgcccaggcctgagctgcccctgcctgagggctgggaggaggcccgggactttgatggcaaggtgtactacatcgaccacaccaacagaaccacctcctggattgacccccgggaccgctacaccaagcccctgacctttgctgactgcatcagtgatgagctgcccctgggctgggaggaggcctatgacccccaggtgggggactacttcatcgaccacaacaccaagaccacccagatcgaggacccccgggtgcagtggaggcgggagcaggagcacatgctgaaggactacctggtggtggcccaggaggccctgagcgcccagaaggagatctaccaggtgaagcagcagaggctggagctggcccagcaggagtaccagcagctgcatgctgtgtgggagcacaagctgggcagccaggtgtccctggtgtctggcagcagcagcagcagcaaatatgaccctgagatcctgaaggccgagatcgccacagccaagagccgggtgaacaagctgaagcgggagatggtgcacctgcagcacgagctgcagttcaaggagcggggcttccagaccctgaagaagattgacaagaagatgtctgatgcccagggcagctacaagctggatgaggcccaggccgtgctgcgggagaccaaggccatcaagaaggccatcacctgtggggagaaggagaagcaggacctgatcaagagcctggccatgctgaaggatggcttcagaacagaccggggcagccacagcgacctgtggagcagcagcagcagcctggagagcagcagcttccccctgcccaagcagtacctggatgtgagcagccagacagacatcagcggcagctttggcatcaacagcaacaaccagctggccgagaaggtgcggctgcggctgcgctatgaggaggccaagagaagaattgccaacctgaagatccagctggccaagctggacagcgaggcctggccaggagtgctggacagcgagcgggacaggctcatcctgatcaatgagaaggaggagctgctgaaggagatgaggttcatcagccccaggaagtggacccagggcgaggtggagcagctggagatggccaggaagaggctggagaaggacctgcaggccgcccgggacacccagagcaaggccctgacagagcggctgaagctgaacagcaagaggaaccagctggtgcgggagctggaggaggccacccggcaggtggccaccctgcacagccagctgaagagcctgagcagctccatgcagagcctgagcagcggcagcagccctggcagcctgaccagcagccggggcagcctggtggccagcagcctggacagcagcaccagcgccagcttcacagacctgtactatgacccctttgagcagctggacagcgagctgcagagcaaggtggagttcctgctgctggagggcgccaccggcttccggcccagcggctgcatcaccaccatccatgaagatgaggtggccaagacccagaaggccgagggcggcggccgcctgcaggccctgcggagcctgagcggcacccccaagtccatgaccagcctgagccccaggagcagcctgagcagccccagccccccctgcagccccctgatggctgaccccctgctggccggagatgccttcctgaacagcctggagtttgaggaccctgagctgagcgccaccctgtgtgagctgagcctgggcaacagcgcccaggagcgctaccgcctggaggagcccggcacagagggcaagcagctgggccaggccgtgaacacagcccagggctgcggcctgaaggtggcctgtgtgtctgctgctgtgtctgatgagagcgtggccggggacagcggcgtgtatgaggcctctgtgcagaggctgggcgccagcgaggccgccgcctttgacagtgatgagagcgaggccgtgggcgccacccgcatccagatcgccctgaagtatgatgagaagaacaagcagtttgccatcctgatcatccagctgagcaacctgagcgccctgctgcagcagcaggaccagaaggtgaacatccgggtggccgtgctgccctgcagcgagagcaccacctgcctcttccgcacccggcccctggatgccagtgacaccctggtgttcaatgaggtgttctgggtgtccatgagctacccagccctgcaccagaagaccctgcgggtggatgtgtgcaccacagacaggagccacctggaggagtgcctgggcggggcccagatcagcctggccgaggtgtgccgctctggagagaggagcacccgctggtacaacctgctgagctacaagtacctgaagaagcagagccgggagctgaagcctgtgggcgtgatggccccagccagcggccctgccagcacagatgctgtgtctgccctgctggagcagacagctgtggagctggagaagaggcaggagggccgcagcagcacccagaccctggaggacagctggaggtatgaggagaccagtgaaaatgaggccgtggccgaggaggaggaggaggaggtggaggaggaggagggggaggaggatgtgttcacagagaaggccagcccagacatggatggctacccagccctgaaggtggacaaggagaccaacacagagaccccagcccccagccccaccgtggtgcggcccaaggaccggcgggtgggcacccccagccagggccccttcctgcggggcagcaccatcatccgcagcaagaccttcagccctggcccccagagccagtatgtgtgccgcctgaacagaagtgacagcgacagcagcaccctgagcaagaagcccccatttgtgaggaacagcctggagaggagatctgtgaggatgaagaggcccagctctgtgaagagcctgcggtctgagcggctcatccgcaccagcctggacctggagctggacctgcaggccaccaggacctggcacagccagctgacccaggagatctctgtgctgaaggagctgaaggagcagctggagcaggccaagagccatggagagaaggagctgccccagtggctgcgggaggatgagcgcttccggctgctgctgaggatgctggagaagaggcagatggacagagctgagcacaagggggagctgcagacagacaagatgatgagagctgctgccaaggatgtgcaccggctgcggggccagagctgcaaggagcccccagaggtgcagagcttccgggagaagatggccttcttcacccggcccaggatgaacatcccagccctgtctgcagatgatgtgtag

SEQ ID NO: 176164 - DNA, 3360 bp, synthetic construct
  misc_feature 1..3360: note = Description of Artificial Sequence: Synthetic coding sequence
  source 1..3360: mol_type = other DNA
atgcccaggcctgagctgcccctgcctgagggctgggaggaggcccgggactttgatggcaaggtgtactacatcgaccacaccaacagaaccacctcctggattgacccccgggaccgctacaccaagcccctgacctttgctgactgcatcagtgatgagctgcccctgggctgggaggaggcctatgacccccaggtgggggactacttcatcgaccacaacaccaagaccacccagatcgaggacccccgggtgcagtggaggcgggagcaggagcacatgctgaaggactacctggtggtggcccaggaggccctgagcgcccagaaggagatctaccaggtgaagcagcagaggctggagctggcccagcaggagtaccagcagctgcatgctgtgtgggagcacaagctgggcagccaggtgtccctggtgtctggcagcagcagcagcagcaaatatgaccctgagatcctgaaggccgagatcgccacagccaagagccgggtgaacaagctgaagcgggagatggtgcacctgcagcacgagctgcagttcaaggagcggggcttccagaccctgaagaagattgacaagaagatgtctgatgcccagggcagctacaagctggatgaggcccaggccgtgctgcgggagaccaaggccatcaagaaggccatcacctgtggggagaaggagaagcaggacctgatcaagagcctggccatgctgaaggatggcttcagaacagaccggggcagccacagcgacctgtggagcagcagcagcagcctggagagcagcagcttccccctgcccaagcagtacctggatgtgagcagccagacagacatcagcggcagctttggcatcaacagcaacaaccagctggccgagaaggtgcggctgcggctgcgctatgaggaggccaagagaagaattgccaacctgaagatccagctggccaagctggacagcgaggcctggccaggagtgctggacagcgagcgggacaggctcatcctgatcaatgagaaggaggagctgctgaaggagatgaggttcatcagccccaggaagtggacccagggcgaggtggagcagctggagatggccaggaagaggctggagaaggacctgcaggccgcccgggacacccagagcaaggccctgacagagcggctgaagctgaacagcaagaggaaccagctggtgcgggagctggaggaggccacccggcaggtggccaccctgcacagccagctgaagagcctgagcagctccatgcagagcctgagcagcggcagcagccctggcagcctgaccagcagccggggcagcctggtggccagcagcctggacagcagcaccagcgccagcttcacagacctgtactatgacccctttgagcagctggacagcgagctgcagagcaaggtggagttcctgctgctggagggcgccaccggcttccggcccagcggctgcatcaccaccatccatgaagatgaggtggccaagacccagaaggccgagggcggcggccgcctgcaggccctgcggagcctgagcggcacccccaagtccatgaccagcctgagccccaggagcagcctgagcagccccagccccccctgcagccccctgatggctgaccccctgctggccggagatgccttcctgaacagcctggagtttgaggaccctgagctgagcgccaccctgtgtgagctgagcctgggcaacagcgcccaggagcgctaccgcctggaggagcccggcacagagggcaagcagctgggccaggccgtgaacacagcccagggctgcggcctgaaggtggcctgtgtgtctgctgctgtgtctgatgagagcgtggccggggacagcggcgtgtatgaggcctctgtgcagaggctgggcgccagcgaggccgccgcctttgacagtgatgagagcgaggccgtgggcgccacccgcatccagatcgccctgaagtatgatgagaagaacaagcagtttgccatcctgatcatccagctgagcaacctgagcgccctgctgcagcagcaggaccagaaggtgaacatccgggtggccgtgctgccctgcagcgagagcaccacctgcctcttccgcacccggcccctggatgccagtgacaccctggtgttcaatgaggtgttctgggtgtccatgagctacccagccctgcaccagaagaccctgcgggtggatgtgtgcaccacagacaggagccacctggaggagtgcctgggcggggcccagatcagcctggccgaggtgtgccgctctggagagaggagcacccgctggtacaacctgctgagctacaagtacctgaagaagcagagccgggagctgaagcctgtgggcgtgatggccccagccagcggccctgccagcacagatgctgtgtctgccctgctggagcagacagctgtggagctggagaagaggcaggagggccgcagcagcacccagaccctggaggacagctggaggtatgaggagaccagtgaaaatgaggccgtggccgaggaggaggaggaggaggtggaggaggaggagggggaggaggatgtgttcacagagaaggccagcccagacatggatggctacccagccctgaaggtggacaaggagaccaacacagagaccccagcccccagccccaccgtggtgcggcccaaggaccggcgggtgggcacccccagccagggccccttcctgcggggcagcaccatcatccgcagcaagaccttcagccctggcccccagagccagtatgtgtgccgcctgaacagaagtgacagcgacagcagcaccctgagcaagaagcccccatttgtgaggaacagcctggagaggagatctgtgaggatgaagaggcccagccccccaccccagcccagctctgtgaagagcctgcggtctgagcggctcatccgcaccagcctggacctggagctggacctgcaggccaccaggacctggcacagccagctgacccaggagatctctgtgctgaaggagctgaaggagcagctggagcaggccaagagccatggagagaaggagctgccccagtggctgcgggaggatgagcgcttccggctgctgctgaggatgctggagaagaggcagatggacagagctgagcacaagggggagctgcagacagacaagatgatgagagctgctgccaaggatgtgcaccggctgcggggccagagctgcaaggagcccccagaggtgcagagcttccgggagaagatggccttcttcacccggcccaggatgaacatcccagccctgtctgcagatgatgtgtag

SEQ ID NO: 176165 - DNA, 438 bp, synthetic construct; identical to SEQ ID NO: 168282
  misc_feature 1..438: note = Description of Artificial Sequence: Synthetic coding sequence
  source 1..438: mol_type = other DNA

SEQ ID NO: 176166 - DNA, 786 bp, synthetic construct
  misc_feature 1..786: note = Description of Artificial Sequence: Synthetic coding sequence
  source 1..786: mol_type = other DNA
atggccctgaacaagaaccacagcgagggcggcggcgtcatcgtgaacaacacagagagcatcctgatgtcctatgaccacgtggagctgaccttcaatgacatgaagaatgtgcctgaggccttcaagggcaccaagaagggcaccgtgtacctgaccccctacagagtcatcttcctgagcaagggcaaggatgccatgcagagcttcatgatgcccttctacctgatgaaggactgtgagatcaagcagcctgtgtttggagccaactacatcaagggcaccgtgaaggccgaggccggcggcggctgggagggcagcgccagctacaagctgaccttcaccgctgggggcgccatcgagtttggccagaggatgctgcaggtggccagccaggccagcagaggagaggtgcccagcggggcctacggctacagctacatgcccagcggggcctacgtgtacccacctcctgtggccaacggcatgtacccctgccccccaggctacccctacccacctcctcctcctgagttctacccaggcccccccatgatggatggagccatgggctacgtgcagcccccacctccaccctacccaggccccatggagccccctgtgtctggcccagatgtgcccagcaccccagctgctgaggccaaggctgctgaggccgccgccagcgcctactacaaccctggcaacccccacaacgtgtacatgcccaccagccagcccccacctccaccctactacccacctgaggacaagaagacccagtag

SEQ ID NO: 176167 - DNA, 720 bp, synthetic construct
  misc_feature 1..720: note = Description of Artificial Sequence: Synthetic coding sequence
  source 1..720: mol_type = other DNA
atgtcctatgaccacgtggagctgaccttcaatgacatgaagaatgtgcctgaggccttcaagggcaccaagaagggcaccgtgtacctgaccccctacagagtcatcttcctgagcaagggcaaggatgccatgcagagcttcatgatgcccttctacctgatgaaggactgtgagatcaagcagcctgtgtttggagccaactacatcaagggcaccgtgaaggccgaggccggcggcggctgggagggcagcgccagctacaagctgaccttcaccgctgggggcgccatcgagtttggccagaggatgctgcaggtggccagccaggccagcagaggagaggtgcccagcggggcctacggctacagctacatgcccagcggggcctacgtgtacccacctcctgtggccaacggcatgtacccctgccccccaggctacccctacccacctcctcctcctgagttctacccaggcccccccatgatggatggagccatgggctacgtgcagcccccacctccaccctacccaggccccatggagccccctgtgtctggcccagatgtgcccagcaccccagctgctgaggccaaggctgctgaggccgccgccagcgcctactacaaccctggcaacccccacaacgtgtacatgcccaccagccagcccccacctccaccctactacccacctgaggacaagaagacccagtag

SEQ ID NO: 176168 - DNA, 654 bp, synthetic construct
  misc_feature 1..654: note = Description of Artificial Sequence: Synthetic coding sequence
  source 1..654: mol_type = other DNA
atggccctgaacaagaaccacagcgagggcggcggcgtcatcgtgaacaacacagagagcatcctgatgtcctatgaccacgtggagctgaccttcaatgacatgaagaatgtgcctgaggccttcaagggcaccaagaagggcaccgtgtacctgaccccctacagagtcatcttcctgagcaagggcaaggatgccatgcagagcttcatgatgcccttctacctgatgaaggactgtgagatcaagcagcctgtgtttggagccaactacatcaagggcaccgtgaaggccgaggccggggccagcagaggagaggtgcccagcggggcctacggctacagctacatgcccagcggggcctacgtgtacccacctcctgtggccaacggcatgtacccctgccccccaggctacccctacccacctcctcctcctgagttctacccaggcccccccatgatggatggagccatgggctacgtgcagcccccacctccaccctacccaggccccatggagccccctgtgtctggcccagatgtgcccagcaccccagctggggagggcccctgggtgctggccgccctgcgggaccagcccagccccccacgctgcaggacagagagcctgaggatggcccgggactgctag

SEQ ID NO: 176169 - DNA, 630 bp, synthetic construct
  misc_feature 1..630: note = Description of Artificial Sequence: Synthetic coding sequence
  source 1..630: mol_type = other DNA
atggccctgaacaagaaccacagcgagggcggcggcgtcatcgtgaacaacacagagagcatcctgatgtcctatgaccacgtggagctgaccttcaatgacatgaagaatgtgcctgaggccttcaagggcaccaagaagggcaccgtgtacctgaccccctacagagtcatcttcctgagcaagggcaaggatgccatgcagagcttcatgatgcccttctacctgatgaaggactgtgagatcaagcagcctgtgtttggagccaactacatcaagggcaccgtgaaggccgaggccggcggcggctgggagggcagcgccagctacaagctgaccttcaccgcccccatgagcccccccctgctgcagcccaagccccggccccagaagcagcccccagcccccatcaccacccaggccatcgccagcagaagacacctgcccaccacccacaggaagattgaggaccctgtgggccccccagccagcctgccccccaccctcatcagcctgccctaccccagccaccggggctgtgccggggcctggggcggggagggcgccccctgcagccccagcagaagtgaccacaagcagctgcccggcaccagcatcgtgggccactag

SEQ ID NO: 176170 - DNA, 651 bp, synthetic construct
  misc_feature 1..651: note = Description of Artificial Sequence: Synthetic coding sequence
  source 1..651: mol_type = other DNA
atggccctgaacaagaaccacagcgagggcggcggcgtcatcgtgaacaacacagagagcatcctgatgtcctatgaccacgtggagctgaccttcaatgacatgaagaatgtgcctgaggccttcaagggcaccaagaagggcaccgtgtacctgaccccctacagagtcatcttcctgagcaagggcaaggatgccatgcagagcttcatgatgcccttctacctgatgaaggactgtgagatcaagcagcctgtgtttggagccaactacatcaagggcaccgtgaaggccgaggccggcggcggctgggagggcagcgccagctacaagctgaccttcaccgctgggggcgccatcgagtttggccagaggatgctgcaggtggccagccaggagttctacccaggcccccccatgatggatggagccatgggctacgtgcagcccccacctccaccctacccaggccccatggagccccctgtgtctggcccagatgtgcccagcaccccagctgctgaggccaaggctgctgaggccgccgccagcgcctactacaaccctggcaacccccacaacgtgtacatgcccaccagccagcccccacctccaccctactaccccccagaggacaagaagacccagtag

SEQ ID NO: 176171 - DNA, 2769 bp, synthetic construct
  misc_feature 1..2769: note = Description of Artificial Sequence: Synthetic coding sequence
  source 1..2769: mol_type = other DNA
atggccacagccagccccaggagtgacaccagcaacaaccacagcggccgcctgcagctgcaggtgacagtgagcagcgccaagctgaagaggaagaagaactggtttggaacagccatctacacagaggtggtggtggatggagagatcaccaagacagccaagagcagcagcagcagcaaccccaagtgggatgagcagctgactgtgaatgtgaccccccagaccaccctggagttccaggtgtggagccacaggaccctgaaggcagatgccctgctgggcaaggccaccatcgacctgaagcaggccctgctgatccacaacaggaagctggagcgggtgaaggagcagctgaagctgagcctggagaacaagaatggaattgcccagacaggagagctgactgtggtgctggatggcctggtgattgagcaggagaacatcaccaactgcagcagcagccccaccatcgagatccaggagaatggagatgccctgcatgaaaatggagagcccagcgcccggaccacagcccggctggccgtggagggcaccaatggaattgacaaccacgtgcccaccagcaccctggtgcagaacagctgctgcagctatgtggtgaatggagacaacacccccagcagccccagccaggtggccgcccggcccaagaacaccccagcccccaagcccctggccagcgagccagcagatgacacagtgaatggagagagcagcagctttgcccccacagacaatgcctctgtgacaggcacccctgtggtgtctgaggagaatgccctgagccccaactgcaccagcaccaccgtggaggacccccctgtgcaggagatcctgaccagcagtgaaaataatgaatgcatccccagcaccagcgctgagctggagagcgaggcccggagcatcctggagccagacaccagcaacagccgcagcagcagcgcctttgaggccgccaagagccggcagccagatggctgcatggaccctgtgcggcagcagagcggaaatgccaacacagagaccctgcccagcggctgggagcagaggaaggacccccacggccgcacctactacgtggaccacaacaccaggaccaccacctgggagcggccccagcccctgcccccaggctgggagaggagagtggatgacagaagaagagtgtactacgtggaccacaacaccaggaccaccacctggcagaggcccaccatggagagcgtgaggaactttgagcagtggcagagccagaggaaccagctgcagggcgccatgcagcagttcaaccagcgctacctgtacagcgcctccatgctggccgcagaaaatgacccctacggccccctgcccccaggctgggagaagagggtggacagcacagacagagtgtactttgtgaaccacaacaccaagaccacccagtgggaggaccccaggacccagggcctgcagaatgaggagcccctgcctgagggctgggagatccgctacacccgggagggcgtgcgctactttgtggaccacaacaccaggaccaccaccttcaaggaccccagaaatggcaagagctctgtgaccaagggcggcccccagatcgcctatgagcggggcttccgctggaagctggcccacttccgctacctgtgccagagcaatgccctgcccagccacgtgaagatcaacgtgtcccggcagaccctgtttgaggacagcttccagcagatcatggccctgaagccctatgacctgcggcggcggctgtatgtgatcttccggggggaggagggcctggactatggaggcctggcccgggagtggttcttcctgctgagccatgaggtgctgaaccccatgtactgcctgtttgaatatgctgggaagaacaactactgcctgcagatcaacccagccagcaccatcaacccagaccacctgagctacttctgcttcatcggccgcttcatcgccatggccctcttccacggcaagttcatcgacaccggcttcagcctgcccttctacaagaggatgctgagcaagaagctgaccatcaaggacctggagagcattgacacagagttctacaacagcctcatctggatccgggacaacaacattgaagaatgtggcctggagatgtacttctctgtggacatggagatcctgggcaaggtgaccagccatgacctgaagctgggcggcagcaacatcctggtgacagaggagaacaaggatgagtacatcggcctgatgacagagtggaggttcagccggggcgtgcaggagcagaccaaggccttcctggatggcttcaatgaggtggtgcccctgcagtggctgcagtactttgatgagaaggagctggaggtgatgctgtgtggcatgcaggaggtggacctggccgactggcagaggaacacagtgtaccgccactacaccaggaacagcaagcagatcatctggttctggcagtttgtgaaggagacagacaatgaggtgaggatgaggctgctgcagtttgtgacaggcacctgccgcctgcccctgggcggctttgctgagctgatgggcagcaatggcccccagaagttctgcatcgagaaggtgggcaaggacacctggctgcccaggagccacacctgcttcaaccggctggacctgcccccctacaagagctatgagcagctgaaggagaagctgctgtttgccatcgaggagacagagggcttcggccaggagtag

SEQ ID NO: 176172 - DNA, 2379 bp, synthetic construct
  misc_feature 1..2379: note = Description of Artificial Sequence: Synthetic coding sequence
  source 1..2379: mol_type = other DNA
atggccacagccagccccaggagtgacaccagcaacaaccacagcggccgcctgcagctgcaggtgacagtgagcagcgccaagctgaagaggaagaagaactggtttggaacagccatctacacagaggtggtggtggatggagagatcaccaagacagccaagagcagcagcagcagcaaccccaagtgggatgagcagctgactgtgaatgtgaccccccagaccaccctggagttccaggtgtggagccacaggaccctgaaggcagatgccctgctgggcaaggccaccatcgacctgaagcaggccctgctgatccacaacaggaagttcaatggagagagcagcagctttgcccccacagacaatgcctctgtgacaggcacccctgtggtgtctgaggagaatgccctgagccccaactgcaccagcaccaccgtggaggacccccctgtgcaggagatcctgaccagcagtgaaaataatgaatgcatccccagcaccagcgctgagctggagagcgaggcccggagcatcctggagccagacaccagcaacagccgcagcagcagcgcctttgaggccgccaagagccggcagccagatggctgcatggaccctgtgcggcagcagagcggaaatgccaacacagagaccctgcccagcggctgggagcagaggaaggacccccacggccgcacctactacgtggaccacaacaccaggaccaccacctgggagcggccccagcccctgcccccaggctgggagaggagagtggatgacagaagaagagtgtactacgtggaccacaacaccaggaccaccacctggcagaggcccaccatggagagcgtgaggaactttgagcagtggcagagccagaggaaccagctgcagggcgccatgcagcagttcaaccagcgctacctgtacagcgcctccatgctggccgcagaaaatgacccctacggccccctgcccccaggctgggagaagagggtggacagcacagacagagtgtactttgtgaaccacaacaccaagaccacccagtgggaggaccccaggacccagggcctgcagaatgaggagcccctgcctgagggctgggagatccgctacacccgggagggcgtgcgctactttgtggaccacaacaccaggaccaccaccttcaaggaccccagaaatggcaagagctctgtgaccaagggcggcccccagatcgcctatgagcggggcttccgctggaagctggcccacttccgctacctgtgccagagcaatgccctgcccagccacgtgaagatcaacgtgtcccggcagaccctgtttgaggacagcttccagcagatcatggccctgaagccctatgacctgcggcggcggctgtatgtgatcttccggggggaggagggcctggactatggaggcctggcccgggagtggttcttcctgctgagccatgaggtgctgaaccccatgtactgcctgtttgaatatgctgggaagaacaactactgcctgcagatcaacccagccagcaccatcaacccagaccacctgagctacttctgcttcatcggccgcttcatcgccatggccctcttccacggcaagttcatcgacaccggcttcagcctgcccttctacaagaggatgctgagcaagaagctgaccatcaaggacctggagagcattgacacagagttctacaacagcctcatctggatccgggacaacaacattgaagaatgtggcctggagatgtacttctctgtggacatggagatcctgggcaaggtgaccagccatgacctgaagctgggcggcagcaacatcctggtgacagaggagaacaaggatgagtacatcggcctgatgacagagtggaggttcagccggggcgtgcaggagcagaccaaggccttcctggatggcttcaatgaggtggtgcccctgcagtggctgcagtactttgatgagaaggagctggaggtgatgctgtgtggcatgcaggaggtggacctggccgactggcagaggaacacagtgtaccgccactacaccaggaacagcaagcagatcatctggttctggcagtttgtgaaggagacagacaatgaggtgaggatgaggctgctgcagtttgtgacaggcacctgccgcctgcccctgggcggctttgctgagctgatgggcagcaatggcccccagaagttctgcatcgagaaggtgggcaaggacacctggctgcccaggagccacacctgcttcaaccggctggacctgcccccctacaagagctatgagcagctgaaggagaagctgctgtttgccatcgaggagacagagggcttcggccaggagtag

SEQ ID NO: 176173 - DNA, 2115 bp, synthetic construct
  misc_feature 1..2115: note = Description of Artificial Sequence: Synthetic coding sequence
  source 1..2115: mol_type = other DNA
atggccacagccagccccaggagtgacaccagcaacaaccacagcggccgcctgcagctgcaggtgacagtgaatggagagagcagcagctttgcccccacagacaatgcctctgtgacaggcacccctgtggtgtctgaggagaatgccctgagccccaactgcaccagcaccaccgtggaggacccccctgtgcaggagatcctgaccagcagtgaaaataatgaatgcatccccagcaccagcgctgagctggagagcgaggcccggagcatcctggagccagacaccagcaacagccgcagcagcagcgcctttgaggccgccaagagccggcagccagatggctgcatggaccctgtgcggcagcagagcggaaatgccaacacagagaccctgcccagcggctgggagcagaggaaggacccccacggccgcacctactacgtggaccacaacaccaggaccaccacctgggagcggccccagcccctgcccccaggctgggagaggagagtggatgacagaagaagagtgtactacgtggaccacaacaccaggaccaccacctggcagaggcccaccatggagagcgtgaggaactttgagcagtggcagagccagaggaaccagctgcagggcgccatgcagcagttcaaccagcgctacctgtacagcgcctccatgctggccgcagaaaatgacccctacggccccctgcccccaggctgggagaagagggtggacagcacagacagagtgtactttgtgaaccacaacaccaagaccacccagtgggaggaccccaggacccagggcctgcagaatgaggagcccctgcctgagggctgggagatccgctacacccgggagggcgtgcgctactttgtggaccacaacaccaggaccaccaccttcaaggaccccagaaatggcaagagctctgtgaccaagggcggcccccagatcgcctatgagcggggcttccgctggaagctggcccacttccgctacctgtgccagagcaatgccctgcccagccacgtgaagatcaacgtgtcccggcagaccctgtttgaggacagcttccagcagatcatggccctgaagccctatgacctgcggcggcggctgtatgtgatcttccggggggaggagggcctggactatggaggcctggcccgggagtggttcttcctgctgagccatgaggtgctgaaccccatgtactgcctgtttgaatatgctgggaagaacaactactgcctgcagatcaacccagccagcaccatcaacccagaccacctgagctacttctgcttcatcggccgcttcatcgccatggccctcttccacggcaagttcatcgacaccggcttcagcctgcccttctacaagaggatgctgagcaagaagctgaccatcaaggacctggagagcattgacacagagttctacaacagcctcatctggatccgggacaacaacattgaagaatgtggcctggagatgtacttctctgtggacatggagatcctgggcaaggtgaccagccatgacctgaagctgggcggcagcaacatcctggtgacagaggagaacaaggatgagtacatcggcctgatgacagagtggaggttcagccggggcgtgcaggagcagaccaaggccttcctggatggcttcaatgaggtggtgcccctgcagtggctgcagtactttgatgagaaggagctggaggtgatgctgtgtggcatgcaggaggtggacctggccgactggcagaggaacacagtgtaccgccactacaccaggaacagcaagcagatcatctggttctggcagtttgtgaaggagacagacaatgaggtgaggatgaggctgctgcagtttgtgacaggcacctgccgcctgcccctgggcggctttgctgagctgatgggcagcaatggcccccagaagttctgcatcgagaaggtgggcaaggacacctggctgcccaggagccacacctgcttcaaccggctggacctgcccccctacaagagctatgagcagctgaaggagaagctgctgtttgccatcgaggagacagagggcttcggccaggagtag

SEQ ID NO: 176174 - DNA, 336 bp, synthetic construct
  misc_feature 1..336: note = Description of Artificial Sequence: Synthetic coding sequence
  source 1..336: mol_type = other DNA
atggccacagccagccccaggagtgacaccagcaacaaccacagcggccgcctgcagctgcaggtgacagtgagcagcgccaagctgaagaggaagaagaactggtttggaacagccatctacacagaggtggtggtggatggagagatcaccaagacagccaagagcagcagcagcagcaaccccaagtgggatgagcagctgactgtgaatgtgaccccccagaccaccctggagttccaggtgtggagccacaggaccctgaaggcagatgccctgctgggcaaggccaccatcgacctgaagcaggccctgctgatccacaacaggaagtag

SEQ ID NO: 176175 - DNA, 2769 bp, synthetic construct; identical to SEQ ID NO: 176171
  misc_feature 1..2769: note = Description of Artificial Sequence: Synthetic coding sequence
  source 1..2769: mol_type = other DNA

SEQ ID NO: 176176 - DNA, 2613 bp, synthetic construct
  misc_feature 1..2613: note = Description of Artificial Sequence: Synthetic coding sequence
  source 1..2613: mol_type = other DNA
atggccagcgccagcagcagcagagctggggtggccctgccctttgagaagagccagctgaccctgaaggtggtgtctgccaagcccaaggtgcacaaccggcagccccgcatcaacagctatgtggaggtggccgtggatggcctgcccagcgagaccaagaagacaggcaagagaattggcagcagcgagctgctgtggaatgagatcatcatcctgaatgtgacagcccagagccacctggacctgaaggtgtggagctgccacaccctgagaaatgagctgctgggcacagcctctgtgaacctgagcaatgtgctgaagaacaacggcggcaagatggagaacatgcagctgaccctgaacctgcagacagagaacaagggctctgtggtgtctggaggagagctgaccatcttcctggatggccccaccgtggacctgggcaatgtgcccaatggaagtgccctgacagatggcagccagctgcccagccgggacagcagcggcacagctgtggcccctgagaacagacaccagccccccagcaccaactgctttggaggccgcagcaggacccaccgccacagcggggccagcgcccggaccaccccagccactggagagcagagccctggggcccggagccgccaccggcagcctgtgaagaacagcggccacagcggcctggccaacggcaccgtgaatgatgagcccaccacagccacagatcctgaggagcccagcgtggtgggcgtgaccagccccccagctgcccccctgtctgtgacccccaaccccaacaccaccagcctgcctgccccagccaccccagctgagggggaggagcccagcaccagcggcacccagcagctgcctgctgctgcccaggccccagatgccctgcctgctggctgggagcagcgggagctgcccaacggccgggtgtactacgtggaccacaacaccaagaccaccacctgggagcggcccctgcccccaggctgggagaagaggacagacccccggggccgcttctactacgtggaccacaacaccaggaccaccacctggcagaggcccacagcagaatatgtgagaaattatgagcagtggcagagccagaggaaccagctgcagggcgccatgcagcacttcagccagcgcttcctgtaccagagcagcagcgccagcacagaccatgaccccctgggccccctgcccccaggctgggagaagaggcaggacaatggccgggtgtactacgtgaaccacaacaccaggaccacccagtgggaggaccccaggacccagggcatgatccaggagcccgccctgcccccaggctgggagatgaagtacaccagcgagggcgtgcgctactttgtggaccacaacaccaggaccaccaccttcaaggaccccaggcctggctttgaaagtggcaccaagcagggcagccctggggcctatgacaggagcttccgctggaagtaccaccagttccgcttcctgtgccacagcaatgccctgcccagccacgtgaagatctctgtgtcccggcagaccctgtttgaggacagcttccagcagatcatgaacatgaagccctatgacctgcggcggcggctgtacatcatcatgagaggagaggagggcctggactatggaggcatcgcccgggagtggttcttcctgctgagccatgaggtgctgaaccccatgtactgcctgtttgaatatgctgggaagaacaactactgcctgcagatcaacccagccagcagcatcaacccagaccacctgacctacttccgcttcatcggccgcttcatcgccatggccctgtaccacggcaagttcatcgacaccggcttcaccctgcccttctacaagaggatgctgaacaagaggcccaccctgaaggacctggagagcattgatcctgagttctacaacagcatcgtgtggatcaaggagaacaacctggaggagtgtggcctggagctgtacttcatccaggacatggagatcctgggcaaggtgaccacccatgagctgaaggagggcggggagagcatccgggtgacagaggagaacaaggaggagtacatcatgctgctgacagactggaggttcacccggggcgtggaggagcagaccaaggccttcctggatggcttcaatgaggtggcccccctggagtggctgcgctactttgatgagaaggagctggagctgatgctgtgtggcatgcaggagattgacatgtctgactggcagaagagcaccatctaccgccactacaccaagaacagcaagcagatccagtggttctggcaggtggtgaaggagatggacaatgagaagaggatccggctgctgcagtttgtgacaggcacctgccgcctgcctgtgggcggctttgctgagctgattggcagcaatggcccccagaagttctgcatcgacaaggtgggcaaggagacctggctgcccaggagccacacctgcttcaaccggctggacctgcccccctacaagagctatgagcagctgcgggagaagctgctgtatgccatcgaggagacagagggcttcggccaggagtag

SEQ ID NO: 176177 - DNA, 2613 bp, synthetic construct; identical to SEQ ID NO: 176176
  misc_feature 1..2613: note = Description of Artificial Sequence: Synthetic coding sequence
  source 1..2613: mol_type = other DNA

SEQ ID NO: 176178 - DNA, 2613 bp, synthetic construct; identical to SEQ ID NO: 176176
  misc_feature 1..2613: note = Description of Artificial Sequence: Synthetic coding sequence
  source 1..2613: mol_type = other DNA

SEQ ID NO: 176179 - DNA, 2265 bp, synthetic construct
  misc_feature 1..2265: note = Description of Artificial Sequence: Synthetic coding sequence
  source 1..2265: mol_type = other DNA
atgcagctgaccctgaacctgcagacagagaacaagggctctgtggtgtctggaggagagctgaccatcttcctggatggccccaccgtggacctgggcaatgtgcccaatggaagtgccctgacagatggcagccagctgcccagccgggacagcagcggcacagctgtggcccctgagaacagacaccagccccccagcaccaactgctttggaggccgcagcaggacccaccgccacagcggggccagcgcccggaccaccccagccactggagagcagagccctggggcccggagccgccaccggcagcctgtgaagaacagcggccacagcggcctggccaacggcaccgtgaatgatgagcccaccacagccacagatcctgaggagcccagcgtggtgggcgtgaccagccccccagctgcccccctgtctgtgacccccaaccccaacaccaccagcctgcctgccccagccaccccagctgagggggaggagcccagcaccagcggcacccagcagctgcctgctgctgcccaggccccagatgccctgcctgctggctgggagcagcgggagctgcccaacggccgggtgtactacgtggaccacaacaccaagaccaccacctgggagcggcccctgcccccaggctgggagaagaggacagacccccggggccgcttctactacgtggaccacaacaccaggaccaccacctggcagaggcccacagcagaatatgtgagaaattatgagcagtggcagagccagaggaaccagctgcagggcgccatgcagcacttcagccagcgcttcctgtaccagagcagcagcgccagcacagaccatgaccccctgggccccctgcccccaggctgggagaagaggcaggacaatggccgggtgtactacgtgaaccacaacaccaggaccacccagtgggaggaccccaggacccagggcatgatccaggagcccgccctgcccccaggctgggagatgaagtacaccagcgagggcgtgcgctactttgtggaccacaacaccaggaccaccaccttcaaggaccccaggcctggctttgaaagtggcaccaagcagggcagccctggggcctatgacaggagcttccgctggaagtaccaccagttccgcttcctgtgccacagcaatgccctgcccagccacgtgaagatctctgtgtcccggcagaccctgtttgaggacagcttccagcagatcatgaacatgaagccctatgacctgcggcggcggctgtacatcatcatgagaggagaggagggcctggactatggaggcatcgcccgggagtggttcttcctgctgagccatgaggtgctgaaccccatgtactgcctgtttgaatatgctgggaagaacaactactgcctgcagatcaacccagccagcagcatcaacccagaccacctgacctacttccgcttcatcggccgcttcatcgccatggccctgtaccacggcaagttcatcgacaccggcttcaccctgcccttctacaagaggatgctgaacaagaggcccaccctgaaggacctggagagcattgatcctgagttctacaacagcatcgtgtggatcaaggagaacaacctggaggagtgtggcctggagctgtacttcatccaggacatggagatcctgggcaaggtgaccacccatgagctgaaggagggcggggagagcatccgggtgacagaggagaacaaggaggagtacatcatgctgctgacagactggaggttcacccggggcgtggaggagcagaccaaggccttcctggatggcttcaatgaggtggcccccctggagtggctgcgctactttgatgagaaggagctggagctgatgctgtgtggcatgcaggagattgacatgtctgactggcagaagagcaccatctaccgccactacaccaagaacagcaagcagatccagtggttctggcaggtggtgaaggagatggacaatgagaagaggatccggctgctgcagtttgtgacaggcacctgccgcctgcctgtgggcggctttgctgagctgattggcagcaatggcccccagaagttctgcatcgacaaggtgggcaaggagacctggctgcccaggagccacacctgcttcaaccggctggacctgcccccctacaagagctatgagcagctgcgggagaagctgctgtatgccatcgaggagacagagggcttcggccaggagtag

SEQ ID NO: 176180 - DNA, 2274 bp, synthetic construct
  misc_feature 1..2274: note = Description of Artificial Sequence: Synthetic coding sequence
  source 1..2274: mol_type = other DNA
atggagaacatgcagctgaccctgaacctgcagacagaaaataaaggatctgtggtgtctggaggagagctgaccatcttcctggatggccccaccgtggacctgggcaatgtgcccaacggcagcgccctgacagatggcagccagctgcccagccgggacagcagcggcacagctgtggccccagaaaatagacaccagccccccagcaccaactgcttcggcggccgcagcaggacccaccgccacagcggggccagcgcccggaccaccccagccaccggggagcagagccctggggcccggagccgccaccggcagcctgtgaagaacagcggccacagcggcctggccaatggaacagtgaatgatgagcccaccacagccacagatcctgaggagcccagcgtggtgggcgtgaccagccccccagctgcccccctgtctgtgacccccaaccccaacaccaccagcctgcctgccccagccaccccagctgagggggaggagcccagcaccagcggcacccagcagctgcctgctgctgcccaggccccagatgccctgcctgctggctgggagcagcgggagctgcccaacggccgggtgtactacgtggaccacaacaccaagaccaccacctgggagcggcccctgcccccaggctgggagaagaggacagacccccggggccgcttctactacgtggaccacaacaccaggaccaccacctggcagaggcccacagcagaatatgtgaggaactatgagcagtggcagagccagaggaaccagctgcagggcgccatgcagcacttcagccagcgcttcctgtaccagagcagcagcgccagcacagaccatgaccccctgggccccctgcccccaggctgggagaagaggcaggacaatggccgggtgtactacgtgaaccacaacaccaggaccacccagtgggaggaccccaggacccagggcatgatccaggagcccgccctgcccccaggctgggagatgaagtacaccagcgagggcgtgcgctactttgtggaccacaacaccaggaccaccaccttcaaggacccccggcccggctttgagagcggcaccaagcagggcagccctggggcctatgaccgctccttccgctggaagtaccaccagttccgcttcctgtgccacagcaatgccctgcccagccacgtgaagatctctgtgtcccggcagaccctgtttgaagattccttccagcagatcatgaacatgaagccctatgacctgcggcggcggctgtacatcatcatgagaggagaggagggcctggactatggaggcatcgcccgggagtggttcttcctgctgagccatgaggtgctgaaccccatgtactgcctgtttgaatatgccggcaagaacaactactgcctgcagatcaacccagccagcagcatcaacccagaccacctgacctacttccgcttcatcggccgcttcatcgccatggccctgtaccacggcaagttcatcgacaccggcttcaccctgcccttctacaagaggatgctgaacaagaggcccaccctgaaggacctggagagcattgatcctgagttctacaacagcatcgtgtggatcaaggagaacaacctggaggagtgtggcctggagctgtacttcatccaggacatggagatcctgggcaaggtgaccacccatgagctgaaggagggcggggagagcatccgggtgacagaggagaacaaggaggagtacatcatgctgctgacagactggaggttcacccggggcgtggaggagcagaccaaggccttcctggatggcttcaatgaggtggcccccctggagtggctgcgctactttgatgagaaggagctggagctgatgctgtgtggcatgcaggagattgacatgtctgactggcagaagagcaccatctaccgccactacaccaagaacagcaagcagatccagtggttctggcaggtggtgaaggagatggacaatgagaagaggatccggctgctgcagtttgtgacaggcacctgccgcctgcctgtgggcggctttgctgagctgattggcagcaatggcccccagaagttctgcatcgacaaggtgggcaaggagacctggctgcccaggagccacacctgcttcaaccggctggacctgcccccctacaagagctatgagcagctgcgggagaagctgctgtatgccatcgaggagacagagggcttcggccaggagtag

SEQ ID NO: 176181 - DNA, 1029 bp, synthetic construct
  misc_feature 1..1029: note = Description of Artificial Sequence: Synthetic coding sequence
  source 1..1029: mol_type = other DNA
atgatccaggagcccgccctgcccccaggctgggagatgaagtacaccagcgagggcgtgcgctactttgtggaccacaacaccaggaccaccaccttcaaggacccccggcccggctttgagagcggcaccaagcagggcagccctggggcctatgaccgctccttccgctggaagtaccaccagttccgcttcctgtgccacagcaatgccctgcccagccacgtgaagatctctgtgtcccggcagaccctgtttgaagattccttccagcagatcatgaacatgaagccctatgacctgcggcggcggctgtacatcatcatgagaggagaggagggcctggactatggaggcatcgcccgggagtggttcttcctgctgagccatgaggtgctgaaccccatgtactgcctgtttgaatatgccggcaagaacaactactgcctgcagatcaacccagccagcagcatcaacccagaccacctgacctacttccgcttcatcggccgcttcatcgccatggccctgtaccacggcaagttcatcgacaccggcttcaccctgcccttctacaagaggatgctgaacaagaggcccaccctgaaggacctggagagcattgatcctgagttctacaacagcatcgtgtggatcaaggagaacaacctggaggagtgtggcctggagctgtacttcatccaggacatggagatcctgggcaaggtgaccacccatgagctgaaggagggcggggagagcatccgggtgacagaggagaacaaggaggagtacatcatgctgctgacagactggaggttcacccggggcgtggaggagcagaccaaggccttcctggatggcttcaatgaggtggcccccctggagtggctgcgctactttgatgagaaggagctggagctgatgctgtgtggcatgcaggagattgatgccactggaagaagagcccccagcacaggcaccacccccaggacagccagccgcagcagcggcagcggccgctggtag

SEQ ID NO: 176182 - DNA, 1296 bp, synthetic construct
  misc_feature 1..1296: note = Description of Artificial Sequence: Synthetic coding sequence
  source 1..1296: mol_type = other DNA
atgatccaggagcccgccctgcccccaggctgggagatgaagtacaccagcgagggcgtgcgctactttgtggaccacaacaccaggaccaccaccttcaaggacccccggcccggctttgagagcggcaccaagcagggcagccctggggcctatgaccgctccttccgctggaagtaccaccagttccgcttcctgtgccacagcaatgccctgcccagccacgtgaagatctctgtgtcccggcagaccctgtttgaagattccttccagcagatcatgaacatgaagccctatgacctgcggcggcggctgtacatcatcatgagaggagaggagggcctggactatggaggcatcgcccgggagtggttcttcctgctgagccatgaggtgctgaaccccatgtactgcctgtttgaatatgccggcaagaacaactactgcctgcagatcaacccagccagcagcatcaacccagaccacctgacctacttccgcttcatcggccgcttcatcgccatggccctgtaccacggcaagttcatcgacaccggcttcaccctgcccttctacaagaggatgctgaacaagaggcccaccctgaaggacctggagagcattgatcctgagttctacaacagcatcgtgtggatcaaggagaacaacctggaggagtgtggcctggagctgtacttcatccaggacatggagatcctgggcaaggtgaccacccatgagctgaaggagggcggggagagcatccgggtgacagaggagaacaaggaggagtacatcatgctgctgacagactggaggttcacccggggcgtggaggagcagaccaaggccttcctggatggcttcaatgaggtggcccccctggagtggctgcgctactttgatgagaaggagctggagctgatgctgtgtggcatgcaggagattgacatgtctgactggcagaagagcaccatctaccgccactacaccaagaacagcaagcagatccagtggttctggcaggtggtgaaggagatggacaatgagaagaggatccggctgctgcagtttgtgacaggcacctgccgcctgcctgtgggcggctttgctgagctgattggcagcaatggcccccagaagttctgcatcgacaaggtgggcaaggagacctggctgcccaggagccacacctgcttcaaccggctggacctgcccccctacaagagctatgagcagctgcgggagaagctgctgtatgccatcgaggagacagagggcttcggccaggagtag

SEQ ID NO: 176183 - DNA, 1008 bp, synthetic construct
  misc_feature 1..1008: note = Description of Artificial Sequence: Synthetic coding sequence
  source 1..1008: mol_type = other DNA
atggccagcgccagcagcagcagagctggggtggccctgccctttgagaagagccagctgaccctgaaggtggtgtctgccaagcccaaggtgcacaaccggcagccccgcatcaacagctatgtggaggtggccgtggatggcctgcccagcgagaccaagaagacaggcaagagaattggcagcagcgagctgctgtggaatgagatcatcatcctgaatgtgacagcccagagccacctggacctgaaggtgtggagctgccacaccctgagaaatgagctgctgggcacagcctctgtgaacctgagcaatgtgctgaagaacaacggcggcaagatggagaacatgcagctgaccctgaacctgcagacagagaacaagggctctgtggtgtctggaggagagctgaccatcttcctggatggccccaccgtggacctgggcaatgtgcccaatggaagtgccctgacagatggcagccagctgcccagccgggacagcagcggcacagctgtggcccctgagaacagacaccagccccccagcaccaactgctttggaggccgcagcaggacccaccgccacagcggggccagcgcccggaccaccccagccactggagagcagagccctggggcccggagccgccaccggcagcctgtgaagaacagcggccacagcggcctggccaacggcaccgtgaatgatgagcccaccacagccacagatcctgaggagcccagcgtggtgggcgtgaccagccccccagctgcccccctgtctgtgacccccaaccccaacaccaccagcctgcctgccccagccaccccagctgagggggaggagcccagcaccagcggcacccagcagctgcctgctgctgcccaggccccagatgccctgcctgctggctgggagcagcgggagctgcccaacggccgggtgtactacgtggaccacaacaccaagaccaccacctgggagcggcccctgcccccaggatag

SEQ ID NO: 176184 - DNA, 210 bp, synthetic construct
  misc_feature 1..210: note = Description of Artificial Sequence: Synthetic coding sequence
  source 1..210: mol_type = other DNA
atggagagccccaagaagaagaaccagcagctgaaggtgggcatcctgcacctgggcagccggcagaagaagatccgcatccagctgcggagccaggtgctgggccgggagatgagggacatggagggggacctgcaggagctgcaccagagcaacacaggagacaagagcggcttcggcttccggcggcagggcgaggacaacacctag

SEQ ID NO: 176185 - DNA, 246 bp, synthetic construct
  misc_feature 1..246: note = Description of Artificial Sequence: Synthetic coding sequence
  source 1..246: mol_type = other DNA
atggagagccccaagaagaagaaccagcagctgaaggtgggcatcctgcacctgggcagccggcagaagaagatccgcatccagctgcggagccagtgtgccacctggaaggtgatctgcaagagctgcatcagccagaccccaggcatcaacctggacctgggcagcggcgtgaaggtgaagatcatccccaaggaggagcactgcaagatgcctgaggccggggaggagcagccccaggtgtag

SEQ ID NO: 176186 - DNA, 441 bp, synthetic construct
  misc_feature 1..441: note = Description of Artificial Sequence: Synthetic coding sequence
  source 1..441: mol_type = other DNA
atgctgctgtggtgccccccccagtgtgcctgcagcctgggcgtcttccccagcgcccccagccctgtgtggggcaccaggaggagctgtgagcccgccaccagggtgcctgaggtgtggatcctgagccccctgctgcggcacggcggccacacccagacccagaaccacacagccagccccaggagccctgtgatggagagccccaagaagaagaaccagcagctgaaggtgggcatcctgcacctgggcagccggcagaagaagatccgcatccagctgcggagccagtgtgccacctggaaggtgatctgcaagagctgcatcagccagaccccaggcatcaacctggacctgggcagcggcgtgaaggtgaagatcatccccaaggaggagcactgcaagatgcctgaggccggggaggagcagccccaggtgtag

SEQ ID NO: 176187 - DNA, 210 bp, synthetic construct; identical to SEQ ID NO: 176184
  misc_feature 1..210: note = Description of Artificial Sequence: Synthetic coding sequence
  source 1..210: mol_type = other DNA

SEQ ID NO: 176188 - DNA, 210 bp, synthetic construct; identical to SEQ ID NO: 176184
  misc_feature 1..210: note = Description of Artificial Sequence: Synthetic coding sequence
  source 1..210: mol_type = other DNA

SEQ ID NO: 176189 - DNA, 246 bp, synthetic construct; identical to SEQ ID NO: 176185
  misc_feature 1..246: note = Description of Artificial Sequence: Synthetic coding sequence
  source 1..246: mol_type = other DNA

SEQ ID NO: 176190 - DNA, 210 bp, synthetic construct; identical to SEQ ID NO: 176184
  misc_feature 1..210: note = Description of Artificial Sequence: Synthetic coding sequence
  source 1..210: mol_type = other DNA

SEQ ID NO: 176191 - DNA, 441 bp, synthetic construct; identical to SEQ ID NO: 176186
  misc_feature 1..441: note = Description of Artificial Sequence: Synthetic coding sequence
  source 1..441: mol_type = other DNA

SEQ ID NO: 176192 - DNA, 246 bp, synthetic construct; identical to SEQ ID NO: 176185
  misc_feature 1..246: note = Description of Artificial Sequence: Synthetic coding sequence
  source 1..246: mol_type = other DNA

SEQ ID NO: 176193 - DNA, 210 bp, synthetic construct; identical to SEQ ID NO: 176184
  misc_feature 1..210: note = Description of Artificial Sequence: Synthetic coding sequence
  source 1..210: mol_type = other DNA

SEQ ID NO: 176194 - DNA, 246 bp, synthetic construct; identical to SEQ ID NO: 176185
  misc_feature 1..246: note = Description of Artificial Sequence: Synthetic coding sequence
  source 1..246: mol_type = other DNA

SEQ ID NO: 176195 - DNA, 441 bp, synthetic construct; identical to SEQ ID NO: 176186
  misc_feature 1..441: note = Description of Artificial Sequence: Synthetic coding sequence
  source 1..441: mol_type = other DNA

SEQ ID NO: 176196 - DNA, 210 bp, synthetic construct; identical to SEQ ID NO: 176184
  misc_feature 1..210: note = Description of Artificial Sequence: Synthetic coding sequence
  source 1..210: mol_type = other DNA

SEQ ID NO: 176197 - DNA, 210 bp, synthetic construct; identical to SEQ ID NO: 176184
  misc_feature 1..210: note = Description of Artificial Sequence: Synthetic coding sequence
  source 1..210: mol_type = other DNA

SEQ ID NO: 176198 - DNA, 246 bp, synthetic construct; identical to SEQ ID NO: 176185
  misc_feature 1..246: note = Description of Artificial Sequence: Synthetic coding sequence
  source 1..246: mol_type = other DNA

SEQ ID NO: 176199 - DNA, 441 bp, synthetic construct; identical to SEQ ID NO: 176186
  misc_feature 1..441: note = Description of Artificial Sequence: Synthetic coding sequence
  source 1..441: mol_type = other DNA

SEQ ID NO: 176200 - DNA, 336 bp, synthetic construct
  misc_feature 1..336: note = Description of Artificial Sequence: Synthetic coding sequence
  source 1..336: mol_type = other DNA
atgatctggaggggccgcagcacctaccggccccggccccggcgctctgtgcccccacctgagctgattggccccatgctggagcctggagatgaggagccccagcaggaggagcccccaacagagagccgggaccctgcccctggccaggagcgggaggaggaccagggcgctgctgagacccaggtgcctgacctggaggccgacctgcaggagctgagccagagcaagacaggaggagaatgtggaaatggaccagatgaccagggcaagatcctgcccaagtctgagcagttcaagatgcctgagggcggggaccggcagccccaggtgtag

SEQ ID NO: 176201 - DNA, 336 bp, synthetic construct; identical to SEQ ID NO: 176200
  misc_feature 1..336: note = Description of Artificial Sequence: Synthetic coding sequence
  source 1..336: mol_type = other DNA

SEQ ID NO: 176202 - DNA, 4002 bp, synthetic construct
  misc_feature 1..4002: note = Description of Artificial Sequence: Synthetic coding sequence
  source 1..4002: mol_type = other DNA
atgacagctgacaagctggtgttctttgtgaatggaaggaaggtggtggagaagaatgctgaccctgagaccaccctgctggcctacctgcggaggaagctgggcctgagcggcaccaagctgggctgtggggagggcggctgtggggcctgcaccgtgatgctgagcaaatatgaccggctgcagaacaagatcgtgcacttcagcgccaatgcctgcctggcccccatctgcagcctgcaccacgtggccgtgaccaccgtggagggcatcggcagcaccaagacccggctgcaccctgtgcaggagagaattgccaagagccacggcagccagtgtggcttctgcaccccaggcatcgtgatgtccatgtacaccctgctgaggaaccagcctgagcccaccatggaggagattgaaaatgccttccagggcaacctgtgccgctgcaccggctaccggcccatcctgcagggcttccgcacctttgccagagatggcggctgctgcggaggagatggcaacaaccccaactgctgcatgaaccagaagaaggaccacagcgtgtccctgagccccagcctcttcaagccagaggagttcacccccctggaccccacccaggagcccatcttccccccagagctgctgcggctgaaggacacccccaggaagcagctgcgctttgaaggagagcgggtgacctggatccaggccagcaccctgaaggagctgctggacctgaaggcccagcacccagatgccaagctggtggtgggcaacacagagatcggcatcgagatgaagttcaagaacatgctgttccccatgattgtgtgcccagcctggatccctgagctgaacagcgtggagcacggcccagatggcatcagctttggagctgcctgccccctgagcatcgtggagaagaccctggtggatgctgtggccaagctgcctgcccagaagacagaggtgttccggggcgtgctggagcagctgcgctggtttgctgggaagcaggtgaagtctgtggcctctgtgggcggcaacatcatcacagccagccccatcagtgacctgaaccctgtgttcatggccagcggggccaagctgaccctggtgtcccggggcaccaggagaacagtgcagatggaccacaccttcttccctggctacaggaagaccctgctgagccctgaggagatcctgctgagcattgagatcccctacagccgggagggggagtacttcagcgccttcaagcaggccagccggcgggaggatgacatcgccaaggtgaccagcggcatgagggtgctcttcaagccaggcaccacagaggtgcaggagctggccctgtgctacggcggcatggccaacagaaccatcagcgccctgaagaccacccagaggcagctgagcaagctgtggaaggaggagctgctgcaggatgtgtgtgccggcctggccgaggagctgcacctgcccccagatgcccctgggggcatggtggacttccgctgcaccctgaccctgtccttcttcttcaagttctacctgactgtgctgcagaagctgggccaggagaacctggaggacaagtgtgggaagctggaccccacctttgccagcgccaccctgctcttccagaaggaccccccagcagatgtgcagctgttccaggaggtgcccaagggccagagcgaggaggacatggtgggccggcccctgccccacctggccgctgacatgcaggccagcggggaggccgtgtactgtgatgacatccccaggtatgaaaatgagctgagcctgcggctggtgaccagcacccgggcccacgccaagatcaagagcattgacaccagcgaggccaagaaggtgcccggctttgtgtgcttcatctctgcagatgatgtgcccggcagcaacatcaccggcatctgcaatgatgagaccgtgtttgccaaggacaaggtgacctgtgtgggccacatcatcggggctgtggtggccgacaccccagagcacacccagagagctgcccagggcgtgaagatcacctatgaggagctgcctgccatcatcaccattgaagatgccatcaagaacaacagcttctacggccctgagctgaagattgaaaaaggagacctgaagaagggcttcagcgaggccgacaacgtggtgtctggagagatctacatcggcggccaggagcacttctacctggagacccactgcaccatcgctgtgcccaagggggaggccggggagatggagctgtttgtgtccacccagaacaccatgaagacccagagctttgtggccaagatgctgggcgtgcctgccaaccgcatcgtggtgcgggtgaagaggatgggcggcggctttggaggcaaggagaccaggagcacagtggtgtccacagctgtggccctggccgcctacaagacaggccggcctgtgcgctgcatgctggacagagatgaggacatgctgatcactggaggccgccaccccttcctggcccgctacaaggtgggcttcatgaagacaggcaccgtggtggccctggaggtggaccacttcagcaatgtgggcaacacccaggacctgagccagagcatcatggagcgggccctcttccacatggacaactgctacaagatccccaacatccggggcaccggccgcctgtgcaagaccaacctgcccagcaacacagccttccggggctttggaggcccccagggcatgctgattgctgagtgctggatgtctgaggtggccgtgacctgtggcatgcctgctgaggaggtgcggaggaagaacctgtacaaggagggggacctgacccacttcaaccagaagctggagggcttcaccctgccccgctgctgggaggagtgcctggccagcagccagtaccacgccaggaagtctgaggtggacaagttcaacaaggagaactgctggaagaagaggggcctgtgcatcatccccaccaagtttggcatctccttcaccgtgcccttcctgaaccaggccggggccctgctgcacgtgtacacagatggctctgtgctgctgacccacggcggcacagagatgggccagggcctgcacaccaagatggtgcaggtggccagccgggccctgaagatccccaccagcaagatctacatcagcgagaccagcaccaacacagtgcccaacaccagccccacagctgcctctgtgtctgctgacctgaatggccaggccgtgtatgctgcctgccagaccatcctgaagaggctggagccctacaagaagaagaaccccagcggctcctgggaggactgggtgacagctgcctacatggacacagtgtccctgagcgccaccggcttctaccgcacccccaacctgggctacagctttgagaccaacagcggcaaccccttccactacttctcctatggagtggcctgcagcgaggtggagattgactgcctgactggagaccacaagaacctgaggacagacatcgtgatggatgtgggcagcagcctgaacccagccattgatattggccaggtggagggcgcctttgtgcagggcctgggcctcttcaccctggaggagctgcactacagccctgagggcagcctgcacacccggggccccagcacctacaagatcccagccttcggcagcatccccatcgagttccgggtgtccctgctgcgggactgccccaacaagaaggccatctatgccagcaaggctgtgggggagcccccactcttcctggccgccagcatcttctttgccatcaaggatgccatccgggccgcccgggcccagcacactggaaacaacgtgaaggagctgttccggctggacagccctgccaccccagagaagatcagaaatgcctgtgtggacaagttcaccaccctgtgtgtgactggagtgcctgagaactgcaagccctggagcgtgcgggtgtag

SEQ ID NO: 176203 - DNA, 1896 bp, synthetic construct
  misc_feature 1..1896: note = Description of Artificial Sequence: Synthetic coding sequence
  source 1..1896: mol_type = other DNA
atgaagtttgctgagcacctgagcgcccacatcaccccagagtggaggaagcagtacatccagtatgaggccttcaaggacatgctgtacagcgcccaggaccaggcccccagcgtggaggtgacagatgaggacacagtgaagcgctactttgccaagtttgaggagaagttcttccagacctgtgagaaggagctggccaagatcaacaccttctacagcgagaagctggccgaggcccagaggagatttgccaccctgcagaatgagctgcagagcagcctggatgcccagaaggagagcactggagtgaccaccctgcggcagaggaggaagcctgtgttccacctgagccatgaggagcgggtgcagcacaggaacatcaaggacctgaagctggccttcagcgagttctacctgagcctcatcctgctgcagaactaccagaacctgaacttcaccggcttcaggaagatcctgaagaagcatgacaagatcctggagaccagcagaggagctgactggagggtggcccacgtggaggtggcccccttctacacctgcaagaagatcaaccagctgatcagcgagacagaggccgtggtgaccaatgagctggaggatggagaccggcagaaggccatgaagaggctgcgggtgccccccctgggcgccgcccagcctgccccagcctggaccaccttccgggtgggcctcttctgtggcatcttcatcgtgctgaacatcaccctggtgctggccgctgtgttcaagctggagacagacaggagcatctggcccctcatccgcatctaccggggcggcttcctgctgattgagttcctgttcctgctgggcatcaacacctacggctggaggcaggccggcgtgaaccacgtgctgatctttgagctgaaccccaggagcaacctgagccaccagcacctgtttgaaattgctggcttcctgggcatcctgtggtgcctgagcctgctggcctgcttctttgcccccatcagcgtcatccccacctacgtgtaccccctggccctgtatggcttcatggtgttcttcctgatcaaccccaccaagaccttctactacaagagccgcttctggctgctgaagctgctcttccgggtcttcaccgcccccttccacaaggtgggctttgctgacttctggctggccgaccagctgaacagcctgagcgtcatcctgatggacctggagtacatgatctgcttctacagcctggagctgaagtgggatgagagcaagggcctgctgcccaacaacagcgaggagcggggccacagcgacaccatggtgttcttctacctgtggatcgtgttctacatcatcagcagctgctacaccctcatctgggacctgaagatggactggggcctgtttgacaagaatgctggggagaacaccttcctgcgggaggagatcgtgtacccccagaaggcctactactactgtgccatcattgaagatgtgatcctgcgctttgcctggaccatccagatcagcatcaccagcaccaccctgctgccccacagcggggacatcatcgccaccgtgtttgcccccctggaggtgttccgccgctttgtgtggaacttcttccggctggagaatgagcacctgaacaactgtggggagttccgggctgtgcgggacatctctgtggcccccctgaatgctgatgaccagaccctgctggagcagatgatggaccaggatgatggagtgaggaaccggcagaagaacagatcctggaagtacaaccagagcatcagcctgcggcggccccggctggccagccagagcaaggcccgggacaccaaggtgctgattgaggacacagatgatgaggccaacacctag

SEQ ID NO: 176204 - DNA, 2091 bp, synthetic construct
  misc_feature 1..2091: note = Description of Artificial Sequence: Synthetic coding sequence
  source 1..2091: mol_type = other DNA
atgaagtttgctgagcacctgagcgcccacatcaccccagagtggaggaagcagtacatccagtatgaggccttcaaggacatgctgtacagcgcccaggaccaggcccccagcgtggaggtgacagatgaggacacagtgaagcgctactttgccaagtttgaggagaagttcttccagacctgtgagaaggagctggccaagatcaacaccttctacagcgagaagctggccgaggcccagaggagatttgccaccctgcagaatgagctgcagagcagcctggatgcccagaaggagagcactggagtgaccaccctgcggcagaggaggaagcctgtgttccacctgagccatgaggagcgggtgcagcacaggaacatcaaggacctgaagctggccttcagcgagttctacctgagcctcatcctgctgcagaactaccagaacctgaacttcaccggcttcaggaagatcctgaagaagcatgacaagatcctggagaccagcagaggagctgactggagggtggcccacgtggaggtggcccccttctacacctgcaagaagatcaaccagctgatcagcgagacagaggccgtggtgaccaatgagctggaggatggagaccggcagaaggccatgaagaggctgcgggtgccccccctgggcgccgcccagcctgccccagcctggaccaccttccgggtgggcctcttctgtggcatcttcatcgtgctgaacatcaccctggtgctggccgctgtgttcaagctggagacagacaggagcatctggcccctcatccgcatctaccggggcggcttcctgctgattgagttcctgttcctgctgggcatcaacacctacggctggaggcaggccggcgtgaaccacgtgctgatctttgagctgaaccccaggagcaacctgagccaccagcacctgtttgaaattgctggcttcctgggcatcctgtggtgcctgagcctgctggcctgcttctttgcccccatcagcgtcatccccacctacgtgtaccccctggccctgtatggcttcatggtgttcttcctgatcaaccccaccaagaccttctactacaagagccgcttctggctgctgaagctgctcttccgggtcttcaccgcccccttccacaaggtgggctttgctgacttctggctggccgaccagctgaacagcctgagcgtcatcctgatggacctggagtacatgatctgcttctacagcctggagctgaagtgggatgagagcaagggcctgctgcccaacaacagcgaggagagcggcatctgccacaagtacacctatggagtgcgggccatcgtgcagtgcatcccagcctggctgcgcttcatccagtgcctgcggcgctacagagacaccaagagggccttcccccacctggtgaatgctgggaagtacagcaccaccttcttcatggtgacctttgctgccctgtacagcacccacaaggagcggggccacagcgacaccatggtgttcttctacctgtggatcgtgttctacatcatcagcagctgctacaccctcatctgggacctgaagatggactggggcctgtttgacaagaatgctggggagaacaccttcctgcgggaggagatcgtgtacccccagaaggcctactactactgtgccatcattgaagatgtgatcctgcgctttgcctggaccatccagatcagcatcaccagcaccaccctgctgccccacagcggggacatcatcgccaccgtgtttgcccccctggaggtgttcagaagatttgtgtggaacttcttccggctggagaatgagcacctgaacaactgtggggagttccgggctgtgcgggacatctctgtggcccccctgaatgctgatgaccagaccctgctggagcagatgatggaccaggatgatggagtgaggaaccggcagaagaacagatcctggaagtacaaccagagcatcagcctgcggcggccccggctggccagccagagcaaggcccgggacaccaaggtgctgattgaggacacagatgatgaggccaacacctag

SEQ ID NO: 176205 - DNA, 543 bp, synthetic construct
  misc_feature 1..543: note = Description of Artificial Sequence: Synthetic coding sequence
  source 1..543: mol_type = other DNA
atggagagctggtggggcctgccctgcctggccttcctgtgcttcctgatgcacgcccggggccagagggactttgacctggctgatgccctggatgatcctgagcccaccaagaagcccaacagcgacatctaccccaagcccaagccaccctactacccccagccagaaaatccagattctgggggcaacatctacccccggcccaagccccggccccagccccagcccggcaacagcggcaacagcggcggctacttcaatgatgtggacagagatgatggccgctacccaccccggccccggcccaggcctcctgctgggggcggcggcggcggctacagcagctatggcaacagcgacaacacccacggcggggaccaccacagcacctacggcaaccctgagggcaacatggtggccaagatcgtgagccccatcgtgtctgtggtggtggtgaccctgctgggcgctgctgccagctacttcaagctgaacaacagaagaaactgcttccgcacccatgagccagaaaatgtgtag

SEQ ID NO: 176206 - DNA, 588 bp, synthetic construct
  misc_feature 1..588: note = Description of Artificial Sequence: Synthetic coding sequence
  source 1..588: mol_type = other DNA
atggagagctggtggggcctgccctgcctggccttcctgtgcttcctgatgcacgcccggggccagagggactttgacctggctgatgccctggatgatcctgagcccaccaagaagcccaacagcgacatctaccccaagcccaagccaccctactacccccagccagaaaatccagattctgggggcaacatctacccccggcccaagccccggccccagccccagcccggcaacagcggcaacagcggcggctacttcaatgatgtggacagagatgatggccgctacccaccccggccccggcccaggcctcctgctgggggcggcggcggcggctacagcagctatggcaacagcgacaacacccacggccggggcggctaccgcctgaacagccgctatggcaacacctatggaggagaccaccacagcacctacggcaaccctgagggcaacatggtggccaagatcgtgagccccatcgtgtctgtggtggtggtgaccctgctgggcgccgccgccagctacttcaagctgaacaacagaagaaactgcttccgcacccatgagccagaaaatgtgtag

SEQ ID NO: 176207 - DNA, 546 bp, synthetic construct
  misc_feature 1..546: note = Description of Artificial Sequence: Synthetic coding sequence
  source 1..546: mol_type = other DNA
atggagagctggtggggcctgccctgcctggccttcctgtgcttcctgatgcacgcccggggccagagggactttgacctggctgatgccctggatgatcctgagcccaccaagaagcccaacagcgacatctaccccaagcccaagccaccctactacccccagccagaaaatccagattctgggggcaacatctacccccggcccaagccccggccccagccccagcccggcaacagcggcaacagcggcggcagctacttcaatgatgtggacagagatgatggccgctacccaccccggccccggccccggcccccagctgggggcggcggcggcggctacagcagctatggcaacagcgacaacacccatggaggagaccaccacagcacctacggcaaccctgagggcaacatggtggccaagatcgtgagccccatcgtgtctgtggtggtggtgaccctgctgggcgccgccgccagctacttcaagctgaacaacagaagaaactgcttccgcacccatgagccagaaaatgtgtag

SEQ ID NO: 176208 - DNA, 129 bp, synthetic construct
  misc_feature 1..129: note = Description of Artificial Sequence: Synthetic coding sequence
  source 1..129: mol_type = other DNA
atggtggccaagatcgtgagccccatcgtgtctgtggtggtggtgaccctgctgggcgctgctgccagctacttcaagctgaacaacagaagaaactgcttccgcacccatgagccagaaaatgtgtag

SEQ ID NO: 176209 - DNA, 10650 bp, synthetic construct
  misc_feature 1..10650: note = Description of Artificial Sequence: Synthetic coding sequence
  source 1..10650: mol_type = other DNA
atgttccccatgcagaagggcagcctgaacctgctgcggcagaagtgggagagctgtgactaccagaggtctgagtgccacccccgggacagccactgcaccatcttccagccccaggagagcaagctgctggcccctgagggggaggtggtgtctgccccccagagcctggaccccaccagcctgccctacagcactggagaggagatgtggagcagcaagccagaggagaaggacagcgtggacaagagcaacaacacccgggagtatggccggcctgaggtgctgaaggaggacagcctgagcagcagaagaagaattgagcgcttcagcatcgccctggatgagctgcggtctgtgtttgaggcccccaagagcggcaacaagccagcagaatatggaggcaaggaggtggagattgaaagaagcctgtgcagccctgccttcaagagccaccctggcagccagctggaggacagcgtgaaggacagcgacaagaagggcaaggagaccagctttgacaagatgagccctgagagcggccacagccgcatctttgaggccacagctggccccaacaagccagagagcggctttgctgaagattctgctgcccggggggagggcgtgtctgacctgcacgaggtggtgtccctgaaggagaggatggcccgctaccaggccgctgtgtccagaggagactgccgctccttcagcgccaacatgatggaggagagcgagatgtgtgctgtgcctgggggcctggccaaggtgaagaagcagtttgaagatgagatcaccagcagcaggaacacctttgcccagtaccagtaccagcaccagaacagaagtgagcaggaggccatccacagcagccaggtgggcaccagccgcagcagccaggagatggccagaaatgagcaggagggcagcaaggtgcagaagattgatgtgcatggaacagagatggtgagccacctggagaagcacacagaggaggtgaaccaggccagccagttccaccagtatgtgcaggagaccgtgattgacaccccagaagatgaggagatccccaaggtgtccaccaagctgctgaaggagcagtttgagaagagcgcccaggagaagatcctgtacagcgacaaggagatgaccaccccagccaagcagatcaagacagaaagtgaatatgaggagaccttcaagcccagctctgtggtgtccaccagcagcaccagctgtgtgtccaccagccagaggaaggagaccagcaccacccgctacagcgaccacagcgtgaccagcagcaccctggcccagatcaatgccaccagcagcggcatgacagaggagttccccccacctcctccagatgtgctgcagacctctgtggatgtgacagccttcagccagagccctgagctgcccagccccccccggcggctgcctgtgcccaaggatgtgtacagcaagcagaggaacctgtatgagctgaacagactctacaagcacatccaccctgagctgaggaagaacctggagaaggactacatcagcgaggtgtctgagatcgtgagcagccagatgaacagcggcagctctgtgtctgcagatgtgcagcaggcccgctacgtgtttgagaacaccaatgacagcagccagaaggacctgaacagcgagcgggagtacctggagtgggatgagatcctgaagggggaggtgcagagcatccgctggatctttgagaaccagcccctggacagcatcaacaacggcagcccagatgaaggagacatcagccggggcattgctgaccaggagatcatcgctggaggagatgtgaagtacaccacctggatgtttgagacccagcccatcgacaccctgggcgcctacagcagtgacacagtggagaatgctgagaagatccctgagctggcccggggagatgtgtgcacagcccgctggatgtttgagacccggcccctggacagcatgaacaagatgcaccagagccaggaggagagcgctgtgaccatcagcaaggacatcactggaggagatgtgaagacagtgcgctacatgtttgagacccagcacctggaccagctgggccagctgcacagcgtggatgaggtgcacctgctgcagctgcggtctgagctgaaggagatcaagggaaatgtgaagaggagcatcaagtgctttgagacccagcccctgtatgtgatcagagatggcagcggccagatgctggagatcaagacagtgcaccgggaggatgtggagaagggagatgtgaggacagcccgctggatgtttgagacccagcccctggacaccatcaacaaggacatcacagagatcaaggtggtgcggggcatctccatggaggagaatgtgaagggcggcgtgtccaaggccaagtggctgtttgagacccagcccctggagaagatcaaggagagcgaggaggtgatcatcgagaaggagaagatcatcggcacagatgtgtccaggaagtgctggatgtttgagacccagcccctggacatcctgaaggaggtgcctgatgctgacagcctgcagcgggaggagatcattggaggagatgtgcagaccaccaagcacctgtttgagaccctgcccatcgaggccctgaaggacagcccagacatcggcaagctgcagaagatcacagccagcgaggaggagaagggagatgtgcgccaccagaagtggatctttgagacccagcccctggaggacatcaggaaggacaagaaggagtacaccaggacagtgaagctggaggaggtggacagaggagatgtgaagaactacacccacatctttgagagcaacaacctgatcaagtttgatgccagccacaagattgaggtggagggcgtgaccagaggagctgtggagctgaacaagagcctgtttgagaccacccccctgtatgccatccaggaccccctgggcaagtaccaccaggtgaagacagtgcagcaggaggagatcgtgagaggagatgtgcgcagctgccgctggctgtttgagacccggcccatcgaccagtttgatgagagcatccacaagttccagatcatccggggcatcagcgcccaggagatccagacaggaaatgtgaagagcgccaagtggctgtttgagacccagcccctggacagcatcaagtacttcagtgatgtggaggagacagagagcaagacagagcagacccgggacatcgtgaagggagatgtgaagacctgcaagtggctgtttgagacccagcccatggagagcctgtatgagaaggtgtccctgatgaccagcagcgaggagatccacaagggagatgtgaagacctgcacctggctgtttgagacccagcccctggacaccatcaaggatgattctgaaacagctgtgaagctgcagacagtgaagcaggaggagatccagggcggagatgtgaggacagcctgcttcctgtttgaaacagagaacctggacagcatccagggcgaggaggtgaaggagatcaagcctgtggagatggacatccaggccggagatgtgtcctccatgagatacaagtttgagaaccagagcctggacagcatcagcagcagcagcgaggaggtgctgaagaagatcaagaccctgaagacagaggacatccagaagggaaatgtgctgaactgccgctggctgtttgagaaccagcccatcgacaagatcaaggagagccaggagggagatgaatgtgtgaagacagtgacagacatccagggcggagatgtgaggaagggctgcttcatctttgagaccttcagcctggatgagatcaaggaggagagtgactacatcagcaccaagaagaccatcacagaggaggtgatccagggagatgtgaagagctacaggatgctgtttgagacccagcccctgtatgccatccaggaccgggagggcagctaccacgaggtgaccaccgtgaagaaggaggaggtgattcatggagatgtgcggggcacccgctggctgtttgagaccaagcccctggacagcatcaacaagtcagaaacagtgtatgtgatcaagtctgtgacccaggaggacatccagaagggagatgtgtcctctgtgcgctacagatttgagacccagcccctggaccagatcagcgaggagagccacaacatcatgcccagcattgaccacatccagggcggcaatgtgaagaccagccggcagttctttgaaagtgagaactttgacaagaacaactacatcagaacagtgtctgtgaatgagatccagaagggaaatgtgaagaccagcacctggctgtttgagacccacaccatggatgagctgcggggggagggcctggagtatgagaacatcaagacagtgacccaggaggatgtgcagaagggagatgtgaagcaggccgtgtggctgtttgaaaatagaacatttgacagcatcatggaggcccacaagggcatcaccaagatgaccaaggaggagatccccccatctgatgtgaagaccaccacctggctgtttgagaccacccccctgcacgagttcaatgagaccagggtggagaagattgagatcatcggcaagagcatcaaggagaccctggaggacctgtacagccagaaggtgatccaggcccctggcatcatcatcgaggctgatgaaattggagatgtgaggatggccaagtacaagctgatgaaccaggccagccctgagatccagaaggaggagatcatccgggctgacctgaggaacatcatggtgaacctgctgagcaagagggactgcacagagcgggagatcctgatcagcgaggaggagaagggaaatgtgaacctgaccaagacccagctgctgaacagaagcacagagttccacgccgagaaggaggagatcgtgaagggagatgtgcagcaggccatcaagaacctcttcagcgaggagaggtctgtgaagaagggcatcctgatccaggaggatgagaagggggacatcaacatgaccatctactgcctgctgcatgaaaatgatggagacaccatcgagcgggaggaggtgattggaggagatgtgaagaggaccatccacaacctgctgagcagcaccagcaacaacaagatcagcgagcgggccaagattgatgccagcgagagaggaaatgtgcagttcttcaccacctgcatcgaggccggggccctggactacctgaagcagctgcacacagagagcaatgagaccctgacagccaagaagcaggagggggagaaggagatcattggaggagatgtggagggcaccaagctgctgctgaagaagaggcagagcctggtggagaggacagtgtctgaaacagacatcatccctggagatgtgcacaacacagtgaaggtgttcatgacagagccccagagcaccttcggcaagatccccaaggaggagatcatcaagggggacctgaccagcaccctgaacagcctgagccaggccgtgaaccagaagacagtgaccaagacagaggagatcatcaagggcaacatgctggccaccctgaagagcctgaaggagagcagccaccgctggaaggagagcaagcagccagatgccatccctggggacatcgagaaggccatcgagtgcctggagaaggccaccaacaccaagacagagatcctgaagaaggagctgctgaaggatgacctggagaccagcctgcggagcctgaaggaggcccagaggagcttcaaggaggtgcacaaggagggcgtcatcaagaaggatgccaaggctgtgatggccggcagcagtggagagcagaagacagacatccaccaggtggccgtgcagaggaacaagaacagcctgctgcagcccaagccaggcccctttgagcctgctgccaagtggcagggcggcgctgacaccctgagccagaccatgggcaagagctgccacggcaacctggtggaggagaggacagaggtgaacctgcccaaggcccccaagggcaccgtgaagatcgtcatcgaccgggagcagaacaatgatgccctggagaagagcctgcggcggctgagcaacagccaccacaagagcaatgtgctggagagcggggacaagacaggagtgtggacagacaccactggagagcagcacctgagagatgagtacatgagccggcagctgaccagcacagtgtctgtgaagaacaacctgaccaccaaggagagtgacagagctgtgcgggagctgaagaaggatgatgtgttcaacagcatccagagcgctgggaagacagtgggcaagcagcagacctatgagctgagaaatgaccaccagaagatggagggcttccacatcaagagccccaagaagaccaagaacatcaagatcctgacagacacccagagcagcaagcccagccccacccagcaccctgtgtccatgcctgtgggcggcacctatgacctgagcggggacttccagaagcagaccctgctgaagcaggagaccaagtacagcaacaaggacatcaagaagaagaacatcaacctgcagcccatgtggcagctgctgcctgtggagcaggacaccagcaatgtgacagagatgaaggtgtctgagaagagccacaacaccttcaaggccaccaacaagaagcgggagacagatgtgcacctgaagagccaggacttcctgatgaagaccaacaccagcacaggcctgaagatggccatggagaggagcctgaaccccatcaacttcaacccagaaaataatgtgaaggagagcgagtgccccctgcccccacccagccccccacctcctccacccagcaatgccagcagcgagattgagttccccctgcccccacctccacccctgatgatgtttcctgagaagaatggcttcctgcccagcctgagcacagagaagatcaaggccgagtttgagagcttccctggcctgcccctgcccccacctcctgtggatgagaagtctgagcgggagagcagctccatgttcctgcccccacctcctccacccacccccagccagaagccagcccacctgctgagcagcagcgcccctgagaagcacagcggggacttcatgcagcagtacagccagaaggaggccagcaacagccagaacagccaggccaagatcatcaccgggaagacaggagtgctgcccccacccaccctgcccaagcccaagctgcccaagcacatcaaggacaacaagaatgacttcagccccaaggtggagctggccaccagcctgagtgacatggagtgcaagatcaccaccagcaaggaccagaagaaggtgatggtgatgaccagcagcgagcacacagagaccaagcagaatgtcatcagcaagagcctggatgagaggaagcagctgagcattgacagcgccaactgcctgagccacacagtgcccggcaccagcgcccccaggaagaagcagatcgcccccctcatcaagagccacagcttccctgagagcagcggccagcagaaccccaagccctacatgaggaagttcaagacccccctgatgattgctgaggagaagtaccggcagcagaaggaggagattgagaagcagaagcaggagagcagctactacaacatcgtgaagacccagagccagaaccagcacatcacagaggtggagaaggagatgcccctgcagaagaccaatgaggaggtgtccctgtctggaattgattctgagtgcaccgtggtgcagcccagccctggcagccagagcaatgcccgcatcctgggcgtgtgcagcgacaaccagctgagcaccaccagccctgagaccgtggccgccaagaggctgcaccacgtgctggccgccagcgaggacaaggacaagatgaagaaggaggtgctgcagagcagccgggacatcatgcagagcaagagcgcctgtgagatcaagcagagccaccaggagtgcagcacccagcagacccagcagaagaagtacctggagcagctgcacctgccccagagcaagcccatcagccccaacttcaaggtgaagaccatcaagctgcccaccctggaccacaccctgaatgaaacagaccacagctatgagagccacaagcagcagagcgagattgatgtgcagaccttcaccaagaagcagtacctgaagaccaagaagacagaggccagcacagaatgtagccacaagcagagcctggccgagcggcactaccagctgcccaagaaggagaagagggtgacagtgcagctgcccacagagagcatccagaagaaccaggaggacaagctgaagatggtgcccaggaagcagcgggagttcagcggcagtgaccggggcaagctgcccggcagcgaggagaagaaccagggccccagcatgattggaaggaaggaggagcggctcatcacagagaggaagcatgagcacctgaagaacaagagcgcccccaaggtggtgaagcagaaggtgattgatgcccacctggacagccagacccagaacttccagcagacccagatccagacagctgagagcaaggccgagcacaagaagctgccccagccctacaacagcctgcaggaggagaagtgcctggaggtgaagggcatccaggagaagcaggtgttcagcaacaccaaggacagcaagcaggagatcacccagaacaagagcttcttcagctctgtgaaggagagccagagagatgatggaaaaggagccctgaacatcgtggagttcctgaggaagcgggaggagctgcagcagatcctgagccgggtgaagcagtttgaggccgagcccaacaagagcggcctgaagaccttccagaccctgctgaacaccatccctggctggctgatcagcgaggacaagcgggagtatgctgtgcacatcgccatggagaacaacctggagaaggtgaaggaggagatcacccacatcaagacccaggccgaggacatgctggtgtcctatgagaacatcatccagacagccatgatgagcagcaagacaggcaagccaggcaacaagcccaccagcctggatgagaccagcagcaaggtgtccaatgtgcacgtgagcaacaacaagaacagcgagcagaaggagaacaagatcgccaaggagaagacagtgcagcaccaggtggccgcccaccacgaggccaccgtgcgcagccacgtgaagacccaccaggagatcaagctggatgacagcaacatccccccacccagcctgaagacccggccccccagccccaccttcatcaccatcgagagcacagccaggagaacagagaaccccaccaagaatgagctgagccagagccccaagaaggacagctatgtggagcccccaccccggcggcccatgagccagaagtctgagatccaccgggccaacaccagccccagcccccccaggagccgctctgagcagctggtgcggctgaaggacaccacagccaagctgagcaagggggccatcccctgcccagctgccacccctgtgcccatcgtggagaagaggtctgagatcatcatgagccctgccaccctgcggcggcagatcaagattgagacccggggccgggacagcccccccaccatcaccatccctgtgaacatcaaccacgccgccagcggcagcttccgggagagcgtggatgcccaggaggagatcaggaaggtggagaagagggccacctacgtgcacaaggatggcctgaacagcacagaccacatggtgcctgacacagagagctatgatgctgtggagatcatcaggaaggtggccgtgcccccccggctgtctgagcacacccagagatatgaggccgccaacagaacagtgcagatggctgaaaattttgtgaatgaccctgaaaatgagatcaaccgctggttccgggagtttgagcacggccctgtgtctgaggccaagagcaacagaagagtgtatgccaagggggagaccaaccacaacatccagcaggagagcaggaccttctgcaaggaggagtttggcctgaccagcctgggcaacaccagcttcacagacttcagctgcaagcacccccgggagctgcgggagaagatccctgtgaagcagccccgcatctgcagcgagaccaggagcctgtctgagcacttcagcggcatggatgcctttgagagccagatcgtggagagcaagatgaagaccagcagcagccacagcagcgaggccggcaagagcggctgtgacttcaagcacgccccacccacctatgaagatgtgattgctggccacatcctggacatcagtgacagccccaaggaggtgaggaagaacttccagaagacctggcaggagagcggccgggtcttcaagggcctgggctacgccacagcagatgccagcgccacagagatgaggaccaccttccaggaggagagcgccttcatcagcgaggccgccgccccccggcagggcaacatgtacaccctgagcaaggacagcctgagcaatggagtgcccagcggccggcaggccgagttctcctag

SEQ ID NO: 176210 - DNA, 2817 bp, synthetic construct
  misc_feature 1..2817: note = Description of Artificial Sequence: Synthetic coding sequence
  source 1..2817: mol_type = other DNA
atgttccccatgcagaagggcagcctgaacctgctgcggcagaagtgggagagctgtgactaccagaggtctgagtgccacccccgggacagccactgcaccatcttccagccccaggagagcaagctgctggcccctgagggggaggtggtgtctgccccccagagcctggaccccaccagcctgccctacagcactggagaggagatgtggagcagcaagccagaggagaaggacagcgtggacaagagcaacaacacccgggagtatggccggcctgaggtgctgaaggaggacagcctgagcagcagaagaagaattgagcgcttcagcatcgccctggatgagctgcggtctgtgtttgaggcccccaagagcggcaacaagccagcagaatatggaggcaaggaggtggagattgaaagaagcctgtgcagccctgccttcaagagccaccctggcagccagctggaggacagcgtgaaggacagcgacaagaagggcaaggagaccagctttgacaagatgagccctgagagcggccacagccgcatctttgaggccacagctggccccaacaagccagagagcggctttgctgaagattctgctgcccggggggagggcgtgtctgacctgcacgaggtggtgtccctgaaggagaggatggcccgctaccaggccgctgtgtccagaggagactgccgctccttcagcgccaacatgatggaggagagcgagatgtgtgctgtgcctgggggcctggccaaggtgaagaagcagtttgaagatgagatcaccagcagcaggaacacctttgcccagtaccagtaccagcaccagaacagaagtgagcaggaggccatccacagcagccaggtgggcaccagccgcagcagccaggagatggccagaaatgagcaggagggcagcaaggtgcagaagattgatgtgcatggaacagagatggtgagccacctggagaagcacacagaggaggtgaaccaggccagccagttccaccagtatgtgcaggagaccgtgattgacaccccagaagatgaggagatccccaaggtgtccaccaagctgctgaaggagcagtttgagaagagcgcccaggagaagatcctgtacagcgacaaggagatgaccaccccagccaagcagatcaagaagctgctgctgcaggacaaggagatctgcatcctgtgccagaagacagtgtaccccatggagtgcctggtggccgacaagcagaacttccacaagagctgcttccgctgccaccactgcaacagcaagctgagcctgggcaactatgccagcctgcacggccagatctactgcaagccccacttcaagcagctgttcaagagcaaaggaaattatgatgagggcttcggccacaagcagcacaaggaccgctggaactgcaagaaccagagccgctctgtggacttcatccccaatgaggagcccaacatgtgcaagaacattgctgagaacaccctggtgcctggggacagaaatgagcacctggatgctggcaacagcgagggccagagaaatgacctgaggaagctgggggagcggggcaagctgaaggtgatctggccacccagcaaggagatccccaagaagaccctgccctttgaggaggagctgaagatgagcaagcccaagtggcccccagagatgaccaccctgctgagccctgagttcaagtctgagagcctgctggaggatgtgaggaccccagagaacaagggccagaggcaggaccacttccccttcctgcagccctacctgcagagcacccacgtgtgccagaaggaggatgtgattggcatcaaggagatgaagatgcctgagggcaggaaggatgagaagaaggagggcaggaagaatgtgcaggaccggcccagcgaggccgaggacaccaagagcaacaggaagagcgccatggacctgaatgacaacaacaacgtgattgtgcagagcgctgagaaggagaagaatgagaagaccaaccagaccaatggagctgaggtgctgcaggtgaccaacacagatgatgagatgatgcctgagaaccacaaggagaacctgaacaagaacaacaacaacaactacgtggccgtgtcctacctgaacaactgccggcagaagaccagcatcctggagttcctggacctgctgcccctgagcagcgaggccaatgacacagccaatgaatatgaaattgagaagctggagaacaccagccgcatcagcgagctgctgggcatctttgaaagtgagaagacctacagcagaaatgtgctggccatggccctgaagaagcagacagacagagctgctgctggcagccctgtgcagcctgcccccaagcccagcctgagccggggcctgatggtgaagggcggcagcagcatcatcagcccagacaccaacctgctgaacatcaagggcagccacagcaagagcaagaacctgcacttcttcttcagcaacacagtgaagatcacagccttcagcaagaagaatgaaaacatcttcaactgtgacctgattgattctgtggaccagatcaagaacatgccctgcctggacctgcgggagtttgggaaggatgtgaagccctggcacgtggagaccacagaggccgccaggaacaatgaaaatactggatttgatgccctgagccatgaatgtacagccaagcccctcttcccccgggtggaggtgcagagcgagcagctgactgtggaggagcagatcaagaggaaccgctgctacagcgacacagaatag

SEQ ID NO: 176211 - DNA, 10650 bp, synthetic construct; identical to SEQ ID NO: 176209
  misc_feature 1..10650: note = Description of Artificial Sequence: Synthetic coding sequence
  source 1..10650: mol_type = other DNA

SEQ ID NO: 176212 - DNA, 9984 bp, synthetic construct
  misc_feature 1..9984: note = Description of Artificial Sequence: Synthetic coding sequence
  source 1..9984: mol_type = other DNA
atggcccgctaccaggccgctgtgtccagaggagactgccgctccttcagcgccaacatgatggaggagagcgagatgtgtgctgtgcctgggggcctggccaaggtgaagaagcagtttgaagatgagatcaccagcagcaggaacacctttgcccagtaccagtaccagcaccagaacagaagtgagcaggaggccatccacagcagccaggtgggcaccagccgcagcagccaggagatggccagaaatgagcaggagggcagcaaggtgcagaagattgatgtgcatggaacagagatggtgagccacctggagaagcacacagaggaggtgaaccaggccagccagttccaccagtatgtgcaggagaccgtgattgacaccccagaagatgaggagatccccaaggtgtccaccaagctgctgaaggagcagtttgagaagagcgcccaggagaagatcctgtacagcgacaaggagatgaccaccccagccaagcagatcaagacagaaagtgaatatgaggagaccttcaagcccagctctgtggtgtccaccagcagcaccagctgtgtgtccaccagccagaggaaggagaccagcaccacccgctacagcgaccacagcgtgaccagcagcaccctggcccagatcaatgccaccagcagcggcatgacagaggagttccccccacctcctccagatgtgctgcagacctctgtggatgtgacagccttcagccagagccctgagctgcccagccccccccggcggctgcctgtgcccaaggatgtgtacagcaagcagaggaacctgtatgagctgaacagactctacaagcacatccaccctgagctgaggaagaacctggagaaggactacatcagcgaggtgtctgagatcgtgagcagccagatgaacagcggcagctctgtgtctgcagatgtgcagcaggcccgctacgtgtttgagaacaccaatgacagcagccagaaggacctgaacagcgagcgggagtacctggagtgggatgagatcctgaagggggaggtgcagagcatccgctggatctttgagaaccagcccctggacagcatcaacaacggcagcccagatgaaggagacatcagccggggcattgctgaccaggagatcatcgctggaggagatgtgaagtacaccacctggatgtttgagacccagcccatcgacaccctgggcgcctacagcagtgacacagtggagaatgctgagaagatccctgagctggcccggggagatgtgtgcacagcccgctggatgtttgagacccggcccctggacagcatgaacaagatgcaccagagccaggaggagagcgctgtgaccatcagcaaggacatcactggaggagatgtgaagacagtgcgctacatgtttgagacccagcacctggaccagctgggccagctgcacagcgtggatgaggtgcacctgctgcagctgcggtctgagctgaaggagatcaagggaaatgtgaagaggagcatcaagtgctttgagacccagcccctgtatgtgatcagagatggcagcggccagatgctggagatcaagacagtgcaccgggaggatgtggagaagggagatgtgaggacagcccgctggatgtttgagacccagcccctggacaccatcaacaaggacatcacagagatcaaggtggtgcggggcatctccatggaggagaatgtgaagggcggcgtgtccaaggccaagtggctgtttgagacccagcccctggagaagatcaaggagagcgaggaggtgatcatcgagaaggagaagatcatcggcacagatgtgtccaggaagtgctggatgtttgagacccagcccctggacatcctgaaggaggtgcctgatgctgacagcctgcagcgggaggagatcattggaggagatgtgcagaccaccaagcacctgtttgagaccctgcccatcgaggccctgaaggacagcccagacatcggcaagctgcagaagatcacagccagcgaggaggagaagggagatgtgcgccaccagaagtggatctttgagacccagcccctggaggacatcaggaaggacaagaaggagtacaccaggacagtgaagctggaggaggtggacagaggagatgtgaagaactacacccacatctttgagagcaacaacctgatcaagtttgatgccagccacaagattgaggtggagggcgtgaccagaggagctgtggagctgaacaagagcctgtttgagaccacccccctgtatgccatccaggaccccctgggcaagtaccaccaggtgaagacagtgcagcaggaggagatcgtgagaggagatgtgcgcagctgccgctggctgtttgagacccggcccatcgaccagtttgatgagagcatccacaagttccagatcatccggggcatcagcgcccaggagatccagacaggaaatgtgaagagcgccaagtggctgtttgagacccagcccctggacagcatcaagtacttcagtgatgtggaggagacagagagcaagacagagcagacccgggacatcgtgaagggagatgtgaagacctgcaagtggctgtttgagacccagcccatggagagcctgtatgagaaggtgtccctgatgaccagcagcgaggagatccacaagggagatgtgaagacctgcacctggctgtttgagacccagcccctggacaccatcaaggatgattctgaaacagctgtgaagctgcagacagtgaagcaggaggagatccagggcggagatgtgaggacagcctgcttcctgtttgaaacagagaacctggacagcatccagggcgaggaggtgaaggagatcaagcctgtggagatggacatccaggccggagatgtgtcctccatgagatacaagtttgagaaccagagcctggacagcatcagcagcagcagcgaggaggtgctgaagaagatcaagaccctgaagacagaggacatccagaagggaaatgtgctgaactgccgctggctgtttgagaaccagcccatcgacaagatcaaggagagccaggagggagatgaatgtgtgaagacagtgacagacatccagggcggagatgtgaggaagggctgcttcatctttgagaccttcagcctggatgagatcaaggaggagagtgactacatcagcaccaagaagaccatcacagaggaggtgatccagggagatgtgaagagctacaggatgctgtttgagacccagcccctgtatgccatccaggaccgggagggcagctaccacgaggtgaccaccgtgaagaaggaggaggtgattcatggagatgtgcggggcacccgctggctgtttgagaccaagcccctggacagcatcaacaagtcagaaacagtgtatgtgatcaagtctgtgacccaggaggacatccagaagggagatgtgtcctctgtgcgctacagatttgagacccagcccctggaccagatcagcgaggagagccacaacatcatgcccagcattgaccacatccagggcggcaatgtgaagaccagccggcagttctttgaaagtgagaactttgacaagaacaactacatcagaacagtgtctgtgaatgagatccagaagggaaatgtgaagaccagcacctggctgtttgagacccacaccatggatgagctgcggggggagggcctggagtatgagaacatcaagacagtgacccaggaggatgtgcagaagggagatgtgaagcaggccgtgtggctgtttgaaaatagaacatttgacagcatcatggaggcccacaagggcatcaccaagatgaccaaggaggagatccccccatctgatgtgaagaccaccacctggctgtttgagaccacccccctgcacgagttcaatgagaccagggtggagaagattgagatcatcggcaagagcatcaaggagaccctggaggacctgtacagccagaaggtgatccaggcccctggcatcatcatcgaggctgatgaaattggagatgtgaggatggccaagtacaagctgatgaaccaggccagccctgagatccagaaggaggagatcatccgggctgacctgaggaacatcatggtgaacctgctgagcaagagggactgcacagagcgggagatcctgatcagcgaggaggagaagggaaatgtgaacctgaccaagacccagctgctgaacagaagcacagagttccacgccgagaaggaggagatcgtgaagggagatgtgcagcaggccatcaagaacctcttcagcgaggagaggtctgtgaagaagggcatcctgatccaggaggatgagaagggggacatcaacatgaccatctactgcctgctgcatgaaaatgatggagacaccatcgagcgggaggaggtgattggaggagatgtgaagaggaccatccacaacctgctgagcagcaccagcaacaacaagatcagcgagcgggccaagattgatgccagcgagagaggaaatgtgcagttcttcaccacctgcatcgaggccggggccctggactacctgaagcagctgcacacagagagcaatgagaccctgacagccaagaagcaggagggggagaaggagatcattggaggagatgtggagggcaccaagctgctgctgaagaagaggcagagcctggtggagaggacagtgtctgaaacagacatcatccctggagatgtgcacaacacagtgaaggtgttcatgacagagccccagagcaccttcggcaagatccccaaggaggagatcatcaagggggacctgaccagcaccctgaacagcctgagccaggccgtgaaccagaagacagtgaccaagacagaggagatcatcaagggcaacatgctggccaccctgaagagcctgaaggagagcagccaccgctggaaggagagcaagcagccagatgccatccctggggacatcgagaaggccatcgagtgcctggagaaggccaccaacaccaagacagagatcctgaagaaggagctgctgaaggatgacctggagaccagcctgcggagcctgaaggaggcccagaggagcttcaaggaggtgcacaaggagggcgtcatcaagaaggatgccaaggctgtgatggccggcagcagtggagagcagaagacagacatccaccaggtggccgtgcagaggaacaagaacagcctgctgcagcccaagccaggcccctttgagcctgctgccaagtggcagggcggcgctgacaccctgagccagaccatgggcaagagctgccacggcaacctggtggaggagaggacagaggtgaacctgcccaaggcccccaagggcaccgtgaagatcgtcatcgaccgggagcagaacaatgatgccctggagaagagcctgcggcggctgagcaacagccaccacaagagcaatgtgctggagagcggggacaagacaggagtgtggacagacaccactggagagcagcacctgagagatgagtacatgagccggcagctgaccagcacagtgtctgtgaagaacaacctgaccaccaaggagagtgacagagctgtgcgggagctgaagaaggatgatgtgttcaacagcatccagagcgctgggaagacagtgggcaagcagcagacctatgagctgagaaatgaccaccagaagatggagggcttccacatcaagagccccaagaagaccaagaacatcaagatcctgacagacacccagagcagcaagcccagccccacccagcaccctgtgtccatgcctgtgggcggcacctatgacctgagcggggacttccagaagcagaccctgctgaagcaggagaccaagtacagcaacaaggacatcaagaagaagaacatcaacctgcagcccatgtggcagctgctgcctgtggagcaggacaccagcaatgtgacagagatgaaggtgtctgagaagagccacaacaccttcaaggccaccaacaagaagcgggagacagatgtgcacctgaagagccaggacttcctgatgaagaccaacaccagcacaggcctgaagatggccatggagaggagcctgaaccccatcaacttcaacccagaaaataatgtgaaggagagcgagtgccccctgcccccacccagccccccacctcctccacccagcaatgccagcagcgagattgagttccccctgcccccacctccacccctgatgatgtttcctgagaagaatggcttcctgcccagcctgagcacagagaagatcaaggccgagtttgagagcttccctggcctgcccctgcccccacctcctgtggatgagaagtctgagcgggagagcagctccatgttcctgcccccacctcctccacccacccccagccagaagccagcccacctgctgagcagcagcgcccctgagaagcacagcggggacttcatgcagcagtacagccagaaggaggccagcaacagccagaacagccaggccaagatcatcaccgggaagacaggagtgctgcccccacccaccctgcccaagcccaagctgcccaagcacatcaaggacaacaagaatgacttcagccccaaggtggagctggccaccagcctgagtgacatggagtgcaagatcaccaccagcaaggaccagaagaaggtgatggtgatgaccagcagcgagcacacagagaccaagcagaatgtcatcagcaagagcctggatgagaggaagcagctgagcattgacagcgccaactgcctgagccacacagtgcccggcaccagcgcccccaggaagaagcagatcgcccccctcatcaagagccacagcttccctgagagcagcggccagcagaaccccaagccctacatgaggaagttcaagacccccctgatgattgctgaggagaagtaccggcagcagaaggaggagattgagaagcagaagcaggagagcagctactacaacatcgtgaagacccagagccagaaccagcacatcacagaggtggagaaggagatgcccctgcagaagaccaatgaggaggtgtccctgtctggaattgattctgagtgcaccgtggtgcagcccagccctggcagccagagcaatgcccgcatcctgggcgtgtgcagcgacaaccagctgagcaccaccagccctgagaccgtggccgccaagaggctgcaccacgtgctggccgccagcgaggacaaggacaagatgaagaaggaggtgctgcagagcagccgggacatcatgcagagcaagagcgcctgtgagatcaagcagagccaccaggagtgcagcacccagcagacccagcagaagaagtacctggagcagctgcacctgccccagagcaagcccatcagccccaacttcaaggtgaagaccatcaagctgcccaccctggaccacaccctgaatgaaacagaccacagctatgagagccacaagcagcagagcgagattgatgtgcagaccttcaccaagaagcagtacctgaagaccaagaagacagaggccagcacagaatgtagccacaagcagagcctggccgagcggcactaccagctgcccaagaaggagaagagggtgacagtgcagctgcccacagagagcatccagaagaaccaggaggacaagctgaagatggtgcccaggaagcagcgggagttcagcggcagtgaccggggcaagctgcccggcagcgaggagaagaaccagggccccagcatgattggaaggaaggaggagcggctcatcacagagaggaagcatgagcacctgaagaacaagagcgcccccaaggtggtgaagcagaaggtgattgatgcccacctggacagccagacccagaacttccagcagacccagatccagacagctgagagcaaggccgagcacaagaagctgccccagccctacaacagcctgcaggaggagaagtgcctggaggtgaagggcatccaggagaagcaggtgttcagcaacaccaaggacagcaagcaggagatcacccagaacaagagcttcttcagctctgtgaaggagagccagagagatgatggaaaaggagccctgaacatcgtggagttcctgaggaagcgggaggagctgcagcagatcctgagccgggtgaagcagtttgaggccgagcccaacaagagcggcctgaagaccttccagaccctgctgaacaccatccctggctggctgatcagcgaggacaagcgggagtatgctgtgcacatcgccatggagaacaacctggagaaggtgaaggaggagatcacccacatcaagacccaggccgaggacatgctggtgtcctatgagaacatcatccagacagccatgatgagcagcaagacaggcaagccaggcaacaagcccaccagcctggatgagaccagcagcaaggtgtccaatgtgcacgtgagcaacaacaagaacagcgagcagaaggagaacaagatcgccaaggagaagacagtgcagcaccaggtggccgcccaccacgaggccaccgtgcgcagccacgtgaagacccaccaggagatcaagctggatgacagcaacatccccccacccagcctgaagacccggccccccagccccaccttcatcaccatcgagagcacagccaggagaacagagaaccccaccaagaatgagctgagccagagccccaagaaggacagctatgtggagcccccaccccggcggcccatgagccagaagtctgagatccaccgggccaacaccagccccagcccccccaggagccgctctgagcagctggtgcggctgaaggacaccacagccaagctgagcaagggggccatcccctgcccagctgccacccctgtgcccatcgtggagaagaggtctgagatcatcatgagccctgccaccctgcggcggcagatcaagattgagacccggggccgggacagcccccccaccatcaccatccctgtgaacatcaaccacgccgccagcggcagcttccgggagagcgtggatgcccaggaggagatcaggaaggtggagaagagggccacctacgtgcacaaggatggcctgaacagcacagaccacatggtgcctgacacagagagctatgatgctgtggagatcatcaggaaggtggccgtgcccccccggctgtctgagcacacccagagatatgaggccgccaacagaacagtgcagatggctgaaaattttgtgaatgaccctgaaaatgagatcaaccgctggttccgggagtttgagcacggccctgtgtctgaggccaagagcaacagaagagtgtatgccaagggggagaccaaccacaacatccagcaggagagcaggaccttctgcaaggaggagtttggcctgaccagcctgggcaacaccagcttcacagacttcagctgcaagcacccccgggagctgcgggagaagatccctgtgaagcagccccgcatctgcagcgagaccaggagcctgtctgagcacttcagcggcatggatgcctttgagagccagatcgtggagagcaagatgaagaccagcagcagccacagcagcgaggccggcaagagcggctgtgacttcaagcacgccccacccacctatgaagatgtgattgctggccacatcctggacatcagtgacagccccaaggaggtgaggaagaacttccagaagacctggcaggagagcggccgggtcttcaagggcctgggctacgccacagcagatgccagcgccacagagatgaggaccaccttccaggaggagagcgccttcatcagcgaggccgccgccccccggcagggcaacatgtacaccctgagcaaggacagcctgagcaatggagtgcccagcggccggcaggccgagttctcctag

SEQ ID NO: 176213 - DNA, 2151 bp, synthetic construct
  misc_feature 1..2151: note = Description of Artificial Sequence: Synthetic coding sequence
  source 1..2151: mol_type = other DNA
atggcccgctaccaggccgctgtgtccagaggagactgccgctccttcagcgccaacatgatggaggagagcgagatgtgtgctgtgcctgggggcctggccaaggtgaagaagcagtttgaagatgagatcaccagcagcaggaacacctttgcccagtaccagtaccagcaccagaacagaagtgagcaggaggccatccacagcagccaggtgggcaccagccgcagcagccaggagatggccagaaatgagcaggagggcagcaaggtgcagaagattgatgtgcatggaacagagatggtgagccacctggagaagcacacagaggaggtgaaccaggccagccagttccaccagtatgtgcaggagaccgtgattgacaccccagaagatgaggagatccccaaggtgtccaccaagctgctgaaggagcagtttgagaagagcgcccaggagaagatcctgtacagcgacaaggagatgaccaccccagccaagcagatcaagaagctgctgctgcaggacaaggagatctgcatcctgtgccagaagacagtgtaccccatggagtgcctggtggccgacaagcagaacttccacaagagctgcttccgctgccaccactgcaacagcaagctgagcctgggcaactatgccagcctgcacggccagatctactgcaagccccacttcaagcagctgttcaagagcaaaggaaattatgatgagggcttcggccacaagcagcacaaggaccgctggaactgcaagaaccagagccgctctgtggacttcatccccaatgaggagcccaacatgtgcaagaacattgctgagaacaccctggtgcctggggacagaaatgagcacctggatgctggcaacagcgagggccagagaaatgacctgaggaagctgggggagcggggcaagctgaaggtgatctggccacccagcaaggagatccccaagaagaccctgccctttgaggaggagctgaagatgagcaagcccaagtggcccccagagatgaccaccctgctgagccctgagttcaagtctgagagcctgctggaggatgtgaggaccccagagaacaagggccagaggcaggaccacttccccttcctgcagccctacctgcagagcacccacgtgtgccagaaggaggatgtgattggcatcaaggagatgaagatgcctgagggcaggaaggatgagaagaaggagggcaggaagaatgtgcaggaccggcccagcgaggccgaggacaccaagagcaacaggaagagcgccatggacctgaatgacaacaacaacgtgattgtgcagagcgctgagaaggagaagaatgagaagaccaaccagaccaatggagctgaggtgctgcaggtgaccaacacagatgatgagatgatgcctgagaaccacaaggagaacctgaacaagaacaacaacaacaactacgtggccgtgtcctacctgaacaactgccggcagaagaccagcatcctggagttcctggacctgctgcccctgagcagcgaggccaatgacacagccaatgaatatgaaattgagaagctggagaacaccagccgcatcagcgagctgctgggcatctttgaaagtgagaagacctacagcagaaatgtgctggccatggccctgaagaagcagacagacagagctgctgctggcagccctgtgcagcctgcccccaagcccagcctgagccggggcctgatggtgaagggcggcagcagcatcatcagcccagacaccaacctgctgaacatcaagggcagccacagcaagagcaagaacctgcacttcttcttcagcaacacagtgaagatcacagccttcagcaagaagaatgaaaacatcttcaactgtgacctgattgattctgtggaccagatcaagaacatgccctgcctggacctgcgggagtttgggaaggatgtgaagccctggcacgtggagaccacagaggccgccaggaacaatgaaaatactggatttgatgccctgagccatgaatgtacagccaagcccctcttcccccgggtggaggtgcagagcgagcagctgactgtggaggagcagatcaagaggaaccgctgctacagcgacacagaatag

SEQ ID NO: 176214 - DNA, 2817 bp, synthetic construct; identical to SEQ ID NO: 176210
  misc_feature 1..2817: note = Description of Artificial Sequence: Synthetic coding sequence
  source 1..2817: mol_type = other DNA

SEQ ID NO: 176215 - DNA, 2892 bp, synthetic construct
  misc_feature 1..2892: note = Description of Artificial Sequence: Synthetic coding sequence
  source 1..2892: mol_type = other DNA
atgcccctgcagaagaccaatgaggaggtgtccctgtctggaattgattctgagtgcaccgtggtgcagcccagccctggcagccagagcaatgcccgcatcctgggcgtgtgcagcgacaaccagctgagcaccaccagccctgagaccgtggccgccaagaggctgcaccacgtgctggccgccagcgaggacaaggacaagatgaagaaggaggtgctgcagagcagccgggacatcatgcagagcaagagcgcctgtgagatcaagcagagccaccaggagtgcagcacccagcagacccagcagaagaagtacctggagcagctgcacctgccccagagcaagcccatcagccccaacttcaaggtgaagaccatcaagctgcccaccctggaccacaccctgaatgaaacagaccacagctatgagagccacaagcagcagagcgagattgatgtgcagaccttcaccaagaagcagtacctgaagaccaagaagacagaggccagcacagaatgtagccacaagcagagcctggccgagcggcactaccagctgcccaagaaggagaagagggtgacagtgcagctgcccacagagagcatccagaagaaccaggaggacaagctgaagatggtgcccaggaagcagcgggagttcagcggcagtgaccggggcaagctgcccggcagcgaggagaagaaccagggccccagcatgattggaaggaaggaggagcggctcatcacagagaggaagcatgagcacctgaagaacaagagcgcccccaaggtggtgaagcagaaggtgattgatgcccacctggacagccagacccagaacttccagcagacccagatccagacagctgagagcaaggccgagcacaagaagctgccccagccctacaacagcctgcaggaggagaagtgcctggaggtgaagggcatccaggagaagcaggtgttcagcaacaccaaggacagcaagcaggagatcacccagaacaagagcttcttcagctctgtgaaggagagccagagagatgatggaaaaggagccctgaacatcgtggagttcctgaggaagcgggaggagctgcagcagatcctgagccgggtgaagcagtttgaggccgagcccaacaagagcggcctgaagaccttccagaccctgctgaacaccatccctggctggctgatcagcgaggacaagcgggagtatgctgtgcacatcgccatggagaacaacctggagaaggtgaaggaggagatcacccacatcaagacccaggccgaggacatgctggtgtcctatgagaacatcatccagacagccatgatgagcagcaagacaggcaagccaggcaacaagcccaccagcctggatgagaccagcagcaaggtgtccaatgtgcacgtgagcaacaacaagaacagcgagcagaaggagaacaagatcgccaaggagaagacagtgcagcaccaggtggccgcccaccacgaggccaccgtgcgcagccacgtgaagacccaccaggagatcaagctggatgacagcaacatccccccacccagcctgaagacccggccccccagccccaccttcatcaccatcgagagcacagccaggagaacagagaaccccaccaagaatgagctgagccagagccccaagaaggacagctatgtggagcccccaccccggcggcccatgagccagaagtctgagatccaccgggccaacaccagccccagcccccccaggagccgctctgagcagctggtgcggctgaaggacaccacagccaagctgagcaagggggccatcccctgcccagctgccacccctgtgcccatcgtggagaagaggtctgagatcatcatgagccctgccaccctgcggcggcagatcaagattgagacccggggccgggacagcccccccaccatcaccatccctgtgaacatcaaccacgccgccagcggcagcttccgggagagcgtggatgcccaggaggagatcaggaaggtggagaagagggccacctacgtgcacaaggatggcctgaacagcacagaccacatggtgcctgacacagagagctatgatgctgtggagatcatcaggaaggtggccgtgcccccccggctgtctgagcacacccagagatatgaggccgccaacagaacagtgcagatggctgaaaattttgtgaatgaccctgaaaatgagatcaaccgctggttccgggagtttgagcacggccctgtgtctgaggccaagagcaacagaagagtgtatgccaagggggagaccaaccacaacatccagcaggagagcaggaccttctgcaaggaggagtttggcctgaccagcctgggcaacaccagcttcacagacttcagctgcaagcacccccgggagctgcgggagaagatccctgtgaagcagccccgcatctgcagcgagaccaggagcctgtctgagcacttcagcggcatggatgcctttgagagccagatcgtggagagcaagatgaagaccagcagcagccacagcagcgaggccggcaagagcggctgtgacttcaagcacgccccacccacctatgaagatgtgattgctggccacatcctggacatcagtgacagccccaaggaggtgaggaagaacttccagaagacctggcaggagagcggccgggtcttcaagggcctgggctacgccacagcagatgccagcgccacagagatgaggaccaccttccaggaggagagcgccttcatcagcgaggccgccgccccccggcagggcaacatgtacaccctgagcaaggacagcctgagcaatggagtgcccagcggccggcaggccgagttctcctag

SEQ ID NO: 176216 - DNA, 2916 bp, synthetic construct
  misc_feature 1..2916: note = Description of Artificial Sequence: Synthetic coding sequence
  source 1..2916: mol_type = other DNA
atgttccccatgcagaagggcagcctgaacctgctgcggcagaagtgggagagctgtgactaccagaggtctgagtgccacccccgggacagccactgcaccatcttccagccccaggagagcaagctgctggcccctgagggggaggtggtgtctgccccccagagcctggaccccaccagcctgccctacagcactggagaggagatgtggagcagcaagccagaggagaaggacagcgtggacaagagcaacaacacccgggagtatggccggcctgaggtgctgaaggaggacagcctgagcagcagaagaagaattgagcgcttcagcatcgccctggatgagctgcggtctgtgtttgaggcccccaagagcggcaacaagccagcagaatatggaggcaaggaggtggagattgaaagaagcctgtgcagccctgccttcaagagccaccctggcagccagctggaggacagcgtgaaggacagcgacaagaagggcaaggagaccagctttgacaagatgagccctgagagcggccacagccgcatctttgaggccgtgttcagcacagaccaggcccagatcctgcggctgcacctgcaccccaagctgaccaagacccccaagaacagcctgaagagcagcacctacatcagcacagctggccccaacaagccagagagcggctttgctgaggacagcgctgcccggggggagggcgtgtctgacctgcacgaggtggtgtccctgaaggagaggatggcccgctaccaggccgctgtgtccagaggagactgccgctccttcagcgccaacatgatggaggagagcgagatgtgtgctgtgcctgggggcctggccaaggtgaagaagcagtttgaagatgagatcaccagcagcaggaacacctttgcccagtaccagtaccagcaccagaacagaagtgagcaggaggccatccacagcagccaggtgggcaccagccgcagcagccaggagatggccagaaatgagcaggagggcagcaaggtgcagaagattgatgtgcacggcacagagatggtgagccacctggagaagcacacagaggaggtgaaccaggccagccagttccaccagtatgtgcaggagaccgtcatcgacaccccagaagatgaggagatccccaaggtgtccaccaagctgctgaaggagcagtttgagaagagcgcccaggagaagatcctgtacagcgacaaggagatgaccaccccagccaagcagatcaagaagctgctgctgcaggacaaggagatctgcatcctgtgccagaagacagtgtaccccatggagtgcctggtggccgacaagcagaacttccacaagagctgcttccgctgccaccactgcaacagcaagctgagcctgggcaactatgccagcctgcacggccagatctactgcaagccccacttcaagcagctgttcaagagcaagggcaactatgatgagggcttcggccacaagcagcacaaggaccgctggaactgcaagaaccagagccgctctgtggacttcatccccaatgaggagcccaacatgtgcaagaacattgctgagaacaccctggtgcctggggacagaaatgagcacctggatgctggcaacagcgagggccagagaaatgacctgaggaagctgggggagcggggcaagctgaaggtgatctggccacccagcaaggagatccccaagaagaccctgccctttgaggaggagctgaagatgagcaagcccaagtggcccccagagatgaccaccctgctgagccctgagttcaagtctgagagcctgctggaggatgtgaggaccccagaaaataaaggccagaggcaggaccacttccccttcctgcagccctacctgcagagcacccacgtgtgccagaaggaggatgtgattggcatcaaggagatgaagatgcctgagggcaggaaggatgagaagaaggagggcaggaagaatgtgcaggaccggcccagcgaggccgaggacaccaagagcaacaggaagagcgccatggacctgaatgacaacaacaacgtcatcgtgcagagcgctgagaaggagaagaatgagaagaccaaccagaccaacggggctgaggtgctgcaggtgaccaacacagatgatgagatgatgcctgagaaccacaaggagaacctgaacaagaacaacaacaacaactacgtggccgtgtcctacctgaacaactgccggcagaagaccagcatcctggagttcctggacctgctgcccctgagcagcgaggccaatgacacagccaatgaatatgaaattgagaagctggagaacaccagccgcatcagcgagctgctgggcatctttgagagcgagaagacctacagcagaaatgtgctggccatggccctgaagaagcagacagacagagctgctgctggcagccctgtgcagcctgcccccaagcccagcctgagccggggcctgatggtgaagggcggcagcagcatcatcagcccagacaccaacctgctgaacatcaagggcagccacagcaagagcaagaacctgcacttcttcttcagcaacacagtgaagatcacagccttcagcaagaagaatgaaaacatcttcaactgtgacctgattgacagcgtggaccagatcaagaacatgccctgcctggacctgcgggagtttgggaaggatgtgaagccctggcacgtggagaccacagaagctgccagaaataatgaaaatacaggctttgatgccctgagccatgagtgcacagccaagcccctcttcccccgggtggaggtgcagagcgagcagctgactgtggaggagcagatcaagaggaaccgctgctacagcgacacagaatag

SEQ ID NO: 176217 - DNA, 2916 bp, synthetic construct; identical to SEQ ID NO: 176216
  misc_feature 1..2916: note = Description of Artificial Sequence: Synthetic coding sequence
  source 1..2916: mol_type = other DNA

SEQ ID NO: 176218 - DNA, 1380 bp, synthetic construct
  misc_feature 1..1380: note = Description of Artificial Sequence: Synthetic coding sequence
  source 1..1380: mol_type = other DNA
atggagaccgtgtttgaggagatggatgaggagagcactggaggagtgagcagcagcaaggaggagatcgtgctgggccagaggctgcacctgtccttccccttcagcatcatcttcagcacagtgctgtactgtggggaggtggccttcggcctgtacatgtttgagatctacaggaaggccaatgacaccttctggatgtccttcaccatctccttcatcatcgtgggcgccatcctggaccagatcatcctgatgttcttcaacaaggacctgcggaggaacaaggccgccctgctcttctggcacatcctgctgctgggccccatcgtgcgctgcctgcacaccatccggaactaccacaagtggctgaagaacctgaagcaggagaaggaggagacccaggtgtccatcaccaagaggaacaccatgctggagcgggagatcgccttcagcatccgggacaacttcatgcagcagaaggccttcaagtacatgtctgtcatccaggccttcctgggctctgtgccccagctgatcctgcagatgtacatcagcctgaccatccgggagtggcccctgaacagagccctgctgatgaccttcagcctgctgtctgtgacctatggagccatccgctgcaacatcctggccatccagatcagcaatgatgacaccaccatcaagctgccccccatcgagttcttctgtgtggtgatgtggaggttcctggaggtgatcagccgggtggtgaccctggccttcttcatcgccagcctgaagctgaagagcctgcctgtgctgctgatcatctactttgtgtccctgctggccccctggctggagttctggaagagcggggcccacctgcccggcaacaaggagaacaacagcaacatggtgggcaccgtgctgatgctgttcctgatcaccctgctgtatgctgccatcaacttcagctgctggagcgctgtgaagctgcagctgagtgatgacaagatcattgatggccggcagcgctggggccaccgcatcctgcactacagcttccagttcctggagaatgtcatcatgatcctggtgttccgcttctttggaggcaagaccctgctgaactgctgtgacagcctgattgctgtgcagctgatcatctcctacctgctggccaccggcttcatgctgctcttctaccagtacctgtacccctggcagagcggcaaggtgctgcccggccgcacagagaaccagcctgaggccccctactactacgtgaacatcgagaagacagagaagaacaagaacaagcagctgaggaactactgccacagctgcaacagagtgggctacttcagcatcaggaagtccatgacctgcagctag

SEQ ID NO: 176219 - DNA, 1389 bp, synthetic construct
  misc_feature 1..1389: note = Description of Artificial Sequence: Synthetic coding sequence
  source 1..1389: mol_type = other DNA
atgaacacccggccccagcacagcgagaggaccagcaccatggacagagtgtatgagatccctgaggagcccaacgtggaccctgtgagcagcctggaggaggatgtgatccggggggccaacccccgcttcaccttccccttcagcatcctcttcagcaccttcctgtactgtggggaggccgccagcgccctgtacatggtgcgcatctacaggaagaacagcgagacctactggatgacctacaccttctccttcttcatgttcagcagcatcatggtgcagctgaccctcatctttgtgcaccgggacctggccaaggacaagcccctgagcctcttcatgcacctgatcctgctgggccctgtgatccgctgcctggaggccatgatcaagtacctgaccctgtggaagaaggaggagcaggaggagccctacgtgtccctgaccaggaagaagatgctgattgatggagaggaggtgctgattgagtgggaggtgggccacagcatccgcaccctggccatgcacagaaatgcctacaagaggatgagccagatccaggccttcctgggctctgtgccccagctgacctaccagctgtatgtgtccctcatctctgctgaggtgcccctgggccgggtggtgctgatggtgttcagcctggtgtctgtgacctatggagccaccctgtgcaacatgctggccatccagatcaagtatgatgactacaagatccggctgggccccctggaggtgctgtgcatcaccatctggaggaccctggagatcaccagccggctgctgatcctggtgctcttcagcgccaccctgaagctgaaggctgtgcccttcctggtgctgaacttcctgatcatcctgtttgagccctggatcaagttctggaggtctggggcccagatgcccaacaacatcgagaagaacttcagccgggtgggcaccctggtggtgctgatctctgtgaccatcctgtatgccggcatcaacttcagctgctggagcgccctgcagctgcggctggccgaccgggacctggtggacaagggccagaactggggccacatgggcctgcactacagcgtgcggctggtggagaatgtcatcatggtgctggtgttcaagttctttggagtgaaggtgctgctgaactactgccacagcctcatcgccctgcagctgatcatcgcctacctgatcagcatcggcttcatgctgctcttcttccagtacctgcaccccctgcggagcctcttcacccacaacgtggtggactacctgcactgtgtgtgctgccaccagcaccccaggaccagggtggagaacagcgagcccccatttgaaacagaggcccggcagagcgtggtgtag

SEQ ID NO: 176220 - DNA, 1350 bp, synthetic construct
  misc_feature 1..1350: note = Description of Artificial Sequence: Synthetic coding sequence
  source 1..1350: mol_type = other DNA
atggacagagtgtatgagatccctgaggagcccaacgtggaccctgtgagcagcctggaggaggatgtgatccggggggccaacccccgcttcaccttccccttcagcatcctcttcagcaccttcctgtactgtggggaggccgccagcgccctgtacatggtgcgcatctacaggaagaacagcgagacctactggatgacctacaccttctccttcttcatgttcagcagcatcatggtgcagctgaccctcatctttgtgcaccgggacctggccaaggacaagcccctgagcctcttcatgcacctgatcctgctgggccctgtgatccgctgcctggaggccatgatcaagtacctgaccctgtggaagaaggaggagcaggaggagccctacgtgtccctgaccaggaagaagatgctgattgatggagaggaggtgctgattgagtgggaggtgggccacagcatccgcaccctggccatgcacagaaatgcctacaagaggatgagccagatccaggccttcctgggctctgtgccccagctgacctaccagctgtatgtgtccctcatctctgctgaggtgcccctgggccgggtggtgctgatggtgttcagcctggtgtctgtgacctacggggccaccctgtgcaacatgctggccatccagatcaagtatgatgactacaagatccggctgggccccctggaggtgctgtgcatcaccatctggaggaccctggagatcaccagccggctgctgatcctggtgctcttcagcgccaccctgaagctgaaggctgtgcccttcctggtgctgaacttcctgatcatcctgtttgagccctggatcaagttctggaggtctggggcccagatgcccaacaacatcgagaagaacttcagccgggtgggcaccctggtggtgctgatctctgtgaccatcctgtatgccggcatcaacttcagctgctggagcgccctgcagctgcggctggccgaccgggacctggtggacaagggccagaactggggccacatgggcctgcactacagcgtgcggctggtggagaatgtcatcatggtgctggtgttcaagttcttcggcgtgaaggtgctgctgaactactgccacagcctgattgccctgcagctgatcatcgcctacctgatcagcatcggcttcatgctgctcttcttccagtacctgcaccccctgcggagcctcttcacccacaacgtggtggactacctgcactgtgtgtgctgccaccagcaccccaggaccagggtggagaacagcgagcccccatttgaaacagaggcccggcagagcgtggtgtag

SEQ ID NO: 176221 - DNA, 1335 bp, synthetic construct
  misc_feature 1..1335: note = Description of Artificial Sequence: Synthetic coding sequence
  source 1..1335: mol_type = other DNA
atgaagtttcctgcctctgtgctggccagcgtcttcctgtttgtggccgagaccacagctgccctgagcctgagcagcacctaccgcagcggcggggacaggatgtggcaggccctgaccctgctcttcagcctgctgccctgtgccctggtgcagctgaccctgctgtttgtgcaccgggacctgagccgggaccggcccctggtgctgctgctgcacctgctgcagctgggccccctcttccgctgctttgaggtgttctgcatctacttccagagcggcaacaatgaggagccctacgtgtccatcaccaagaagaggcagatgcccaagaatggcctgtctgaggagattgagaaggaggtgggccaggccgagggcaagctgatcacccacaggtctgccttcagccgggccagcgtcatccaggccttcctgggcagcgccccccagctgaccctgcagctgtacatctctgtgatgcagcaggatgtgacagtgggccgcagcctgctgatgaccatcagcctgctgagcatcgtgtatggagccctgcgctgcaacatcctggccatcaagatcaagtatgatgaatatgaggtgaaggtgaagcccctggcctacgtgtgcatcttcctgtggaggagctttgaaattgccaccagggtggtggtgctggtgctcttcacctctgtgctgaagacctgggtggtggtgatcatcctgatcaacttcttctccttcttcctgtacccctggatcctcttctggtgcagcggcagccccttcccagaaaatattgagaaggccctgagccgggtgggcaccaccatcgtgctgtgcttcctgaccctgctgtacacaggcatcaacatgttctgctggagcgctgtgcagctgaagattgacagcccagacctgatcagcaagagccacaactggtaccagctgctggtgtactacatgatccgcttcattgaaaatgccatcctgctgctgctgtggtacctgttcaagacagacatctacatgtatgtgtgtgcccccctgctggtgctgcagctgctgattggctactgcacagccatcctcttcatgctggtgttctaccagttcttccacccctgcaagaagctgttcagcagctctgtgtctgagggcttccagcgctggctgcgctgcttctgctgggcctgccggcagcagaagccctgtgagcccatcggcaaggaggacctgcagagcagccgggacagagatgagacccccagcagcagcaagaccagccctgagcccggccagttcctgaatgctgaggacctgtgcagcgcctag

SEQ ID NO: 176222 - DNA, 1929 bp, synthetic construct
  misc_feature 1..1929: note = Description of Artificial Sequence: Synthetic coding sequence
  source 1..1929: mol_type = other DNA
atggccgccagcaggaagccaccccgggtgcgggtgaaccaccaggacttccagctgaggaacctgcgcatcatcgagcccaatgaggtgacccacagcggggacaccggggtggagacagatggccgcatgccacccaaggtgaccagcgagctgctgcggcagctgcggcaggccatgagaaattctgaatatgtgacagagcccatccaggcctacatcatccccagcggagatgcccaccagagcgagtacatcgccccctgtgactgccggcgggcctttgtgtctggctttgatggcagcgctggaacagccatcatcacagaggagcacgccgccatgtggacagatggccgctacttcctgcaggccgccaagcagatggacagcaactggaccctgatgaagatgggcctgaaggacacccccacccaggaggactggctggtgtctgtgctgcctgagggcagccgggtgggcgtggaccccctcatcatccccacagactactggaagaagatggccaaggtgctgcggtctgctggccaccacctgatccctgtgaaggagaacctggtggacaagatctggacagacaggcctgagcggccctgcaagcccctgctgaccctgggcctggactacacaggcatctcctggaaggacaaggtggccgacctgcggctgaagatggccgagagaaatgtgatgtggtttgtggtgacagccctggatgagatcgcctggctgttcaacctgcggggcagtgatgtggagcacaaccctgtgttcttctcctatgccatcatcggcctggagaccatcatgctgttcattgatggagacagaattgatgcccccagcgtgaaggagcacctgctgctggacctgggcctggaggccgagtaccgcatccaggtgcacccctacaagagcatcctgtctgagctgaaggccctgtgtgccgacctgagcccccgggagaaggtgtgggtgtctgacaaggccagctatgctgtgtctgagaccatccccaaggaccaccgctgctgcatgccctacacccccatctgcatcgccaaggctgtgaagaacagcgctgagagcgagggcatgaggcgggcccacatcaaggatgctgtggccctgtgtgagctgttcaactggctggagaaggaggtgcccaagggcggcgtgacagagatctctgctgctgacaaggccgaggagttccggcggcagcaggccgactttgtggacctgtccttccccaccatcagcagcacaggccccaatggagccatcatccactatgcagatggcaccacagatgtgaccaggaccatgcacttcggcacccccacagcctatgagaaggagtgcttcacctacgtgctgaagggccacatcgctgtgtctgctgctgtgttccccaccggcaccaagggccacctgctggacagctttgcccggagcgccctgtgggacagcggcctggactacctgcacggcaccggccacggcgtgggcagcttcctgaatgtgcatgagggcccctgtggcatctcctacaagaccttcagtgatgagcccctggaggccggcatgattgtgacagatgagcccggctactatgaagatggagccttcggcatcagaattgaaaatgtggtgctggtggtgcctgtgaagaccaagtacaacttcaacaacagaggcagcctgacctttgagcccctgaccctggtgcccatccagaccaagatgattgatgtggacagcctgacagacaaggaatgtgactggctgaacaactaccacctgacctgcagagatgtgattggcaaggagctgcagaagcagggccggcaggaggccctggagtggctgatccgggagacccagcccatcagcaagcagcactag

SEQ ID NO: 176223 - DNA, 1872 bp, synthetic construct
  misc_feature 1..1872: note = Description of Artificial Sequence: Synthetic coding sequence
  source 1..1872: mol_type = other DNA
atgccacccaaggtgaccagcgagctgctgcggcagctgcggcaggccatgaggaacagtgaatatgtgacagagcccatccaggcctacatcatccccagcggagatgcccaccagagcgagtacatcgccccctgtgactgcagaagagcctttgtgtctggctttgatggcagcgctggaacagccatcatcacagaggagcacgccgccatgtggacagatggccgctacttcctgcaggccgccaagcagatggacagcaactggaccctgatgaagatgggcctgaaggacacccccacccaggaggactggctggtgtctgtgctgcctgagggcagccgggtgggcgtggaccccctcatcatccccacagactactggaagaagatggccaaggtgctgcggtctgctggccaccacctgatccctgtgaaggagaacctggtggacaagatctggacagacaggcctgagcggccctgcaagcccctgctgaccctgggcctggactacacaggcatctcctggaaggacaaggtggccgacctgcggctgaagatggccgagagaaatgtgatgtggtttgtggtgacagccctggatgaaattgcctggctgttcaacctgcggggcagtgatgtggagcacaaccctgtgttcttctcctatgccatcatcggcctggagaccatcatgctgttcattgatggagacagaattgatgcccccagcgtgaaggagcacctgctgctggacctgggcctggaggccgagtaccgcatccaggtgcacccctacaagagcatcctgtctgagctgaaggccctgtgtgccgacctgagcccccgggagaaggtgtgggtgtctgacaaggccagctatgctgtgtctgagaccatccccaaggaccaccgctgctgcatgccctacacccccatctgcatcgccaaggctgtgaagaacagcgctgagagcgagggcatgagaagagcccacatcaaggatgctgtggccctgtgtgagctgttcaactggctggagaaggaggtgcccaagggcggcgtgacagagatctctgctgctgacaaggccgaggagttccggcggcagcaggccgactttgtggacctgtccttccccaccatcagcagcacaggccccaacggggccatcatccactacgcccctgtgcctgagaccaacagaaccctgagcctggatgaggtgtacctgattgacagcggggcccagtacaaggatggcaccacagatgtgaccaggaccatgcacttcggcacccccacagcctatgagaaggagtgcttcacctacgtgctgaagggccacatcgctgtgtctgctgctgtgttccccaccggcaccaagggccacctgctggacagctttgcccggagcgccctgtgggacagcggcctggactacctgcatggaactggacatggagtgggcagcttcctgaatgtgcatgagggcccctgtggcatctcctacaagaccttcagtgatgagcccctggaggccggcatgattgtgacagatgagcccggctactatgaagatggagccttcggcatcagaattgaaaatgtggtgctggtggtgcctgtgaagaccaagtacaacttcaacaacagaggcagcctgacctttgagcccctgaccctggtgcccatccagaccaagatgattgatgtggacagcctgacagacaaggaatgtgactggctgaacaactaccacctgacctgcagagatgtgattggcaaggagctgcagaagcagggccggcaggaggccctggagtggctgatccgggagacccagcccatcagcaagcagcactag

SEQ ID NO: 176224 - DNA, 1659 bp, synthetic construct
  misc_feature 1..1659: note = Description of Artificial Sequence: Synthetic coding sequence
  source 1..1659: mol_type = other DNA
atgtggacagatggccgctacttcctgcaggccgccaagcagatggacagcaactggaccctgatgaagatgggcctgaaggacacccccacccaggaggactggctggtgtctgtgctgcctgagggcagccgggtgggcgtggaccccctcatcatccccacagactactggaagaagatggccaaggtgctgcggtctgctggccaccacctgatccctgtgaaggagaacctggtggacaagatctggacagacaggcctgagcggccctgcaagcccctgctgaccctgggcctggactacacaggcatctcctggaaggacaaggtggccgacctgcggctgaagatggccgagagaaatgtgatgtggtttgtggtgacagccctggatgagatcgcctggctgttcaacctgcggggcagtgatgtggagcacaaccctgtgttcttctcctatgccatcatcggcctggagaccatcatgctgttcattgatggagacagaattgatgcccccagcgtgaaggagcacctgctgctggacctgggcctggaggccgagtaccgcatccaggtgcacccctacaagagcatcctgtctgagctgaaggccctgtgtgccgacctgagcccccgggagaaggtgtgggtgtctgacaaggccagctatgctgtgtctgagaccatccccaaggaccaccgctgctgcatgccctacacccccatctgcatcgccaaggctgtgaagaacagcgctgagagcgagggcatgaggcgggcccacatcaaggatgctgtggccctgtgtgagctgttcaactggctggagaaggaggtgcccaagggcggcgtgacagagatctctgctgctgacaaggccgaggagttccggcggcagcaggccgactttgtggacctgtccttccccaccatcagcagcacaggccccaatggagccatcatccactacgcccctgtgcctgagaccaacagaaccctgagcctggatgaggtgtacctgattgattctggggcccagtacaaggatggcaccacagatgtgaccaggaccatgcacttcggcacccccacagcctatgagaaggagtgcttcacctacgtgctgaagggccacatcgctgtgtctgctgctgtgttccccaccggcaccaagggccacctgctggacagctttgcccggagcgccctgtgggacagcggcctggactacctgcacggcaccggccacggcgtgggcagcttcctgaatgtgcatgagggcccctgtggcatctcctacaagaccttcagtgatgagcccctggaggccggcatgattgtgacagatgagcccggctactatgaagatggagccttcggcatcagaattgaaaatgtggtgctggtggtgcctgtgaagaccaagtacaacttcaacaacagaggcagcctgacctttgagcccctgaccctggtgcccatccagaccaagatgattgatgtggacagcctgacagacaaggaatgtgactggctgaacaactaccacctgacctgcagagatgtgattggcaaggagctgcagaagcagggccggcaggaggccctggagtggctgatccgggagacccagcccatcagcaagcagcactag

SEQ ID NO: 176225 - DNA, 912 bp, synthetic construct
  misc_feature 1..912: note = Description of Artificial Sequence: Synthetic coding sequence
  source 1..912: mol_type = other DNA
atgccacccaaggtgaccagcgagctgctgcggcagctgcggcaggccatgaggaacagtgaatatgtgacagagcccatccaggcctacatcatccccagcggagatgcccaccagagcgagtacatcgccccctgtgactgcagaagagcctttgtgtctggctttgatggcagcgctggaacagccatcatcacagaggagcacgccgccatgtggacagatggccgctacttcctgcaggccgccaagcagatggacagcaactggaccctgatgaagatgggcctgaaggacacccccacccaggaggactggctggtgtctgtgctgcctgagggcagccgggtgggcgtggaccccctcatcatccccacagactactggaagaagatggccaaggtgctgcggtctgctggccaccacctgatccctgtgaaggagaacctggtggacaagatctggacagacaggcctgagcggccctgcaagcccctgctgaccctgggcctggactacacaggcatctcctggaaggacaaggtggccgacctgcggctgaagatggccgagagaaatgtgatgtggtttgtggtgacagccctggatgaaattgcctggctgttcaacctgcggggcagtgatgtggagcacaaccctgtgttcttctcctatgccatcatcggcctggagaccatcatgctgttcattgatggagacagaattgatgcccccagcgtgaaggagcacctgctgctggacctgggcctggaggccgagtaccgcatccaggtgcacccctacaagagcatcctgtctgagctgaaggccctgtgtgccgacctgagcccccgggagaaggtgtgggtgtctgacaaggccagctatgctgtgtctgagaccatcccctag

SEQ ID NO: 176226 - DNA, 2001 bp, synthetic construct
  misc_feature 1..2001: note = Description of Artificial Sequence: Synthetic coding sequence
  source 1..2001: mol_type = other DNA
atggccgccagcaggaagccaccccgggtgcgggtgaaccaccaggacttccagctgaggaacctgcgcatcatcgagcccaatgaggtgacccacagcggggacaccggggtggagacagatggccgcatgccacccaaggtgaccagcgagctgctgcggcagctgcggcaggccatgagaaattctgaatatgtgacagagcccatccaggcctacatcatccccagcggagatgcccaccagagcgagtacatcgccccctgtgactgccggcgggcctttgtgtctggctttgatggcagcgctggaacagccatcatcacagaggagcacgccgccatgtggacagatggccgctacttcctgcaggccgccaagcagatggacagcaactggaccctgatgaagatgggcctgaaggacacccccacccaggaggactggctggtgtctgtgctgcctgagggcagccgggtgggcgtggaccccctcatcatccccacagactactggaagaagatggccaaggtgctgcggtctgctggccaccacctgatccctgtgaaggagaacctggtggacaagatctggacagacaggcctgagcggccctgcaagcccctgctgaccctgggcctggactacacaggcatctcctggaaggacaaggtggccgacctgcggctgaagatggccgagagaaatgtgatgtggtttgtggtgacagccctggatgagatcgcctggctgttcaacctgcggggcagtgatgtggagcacaaccctgtgttcttctcctatgccatcatcggcctggagaccatcatgctgttcattgatggagacagaattgatgcccccagcgtgaaggagcacctgctgctggacctgggcctggaggccgagtaccgcatccaggtgcacccctacaagagcatcctgtctgagctgaaggccctgtgtgccgacctgagcccccgggagaaggtgtgggtgtctgacaaggccagctatgctgtgtctgagaccatccccaaggaccaccgctgctgcatgccctacacccccatctgcatcgccaaggctgtgaagaacagcgctgagagcgagggcatgaggcgggcccacatcaaggatgctgtggccctgtgtgagctgttcaactggctggagaaggaggtgcccaagggcggcgtgacagagatctctgctgctgacaaggccgaggagttccggcggcagcaggccgactttgtggacctgtccttccccaccatcagcagcacaggccccaatggagccatcatccactacgcccctgtgcctgagaccaacagaaccctgagcctggatgaggtgtacctgattgattctggggcccagtacaaggatggcaccacagatgtgaccaggaccatgcacttcggcacccccacagcctatgagaaggagtgcttcacctacgtgctgaagggccacatcgctgtgtctgctgctgtgttccccaccggcaccaagggccacctgctggacagctttgcccggagcgccctgtgggacagcggcctggactacctgcacggcaccggccacggcgtgggcagcttcctgaatgtgcatgagggcccctgtggcatctcctacaagaccttcagtgatgagcccctggaggccggcatgattgtgacagatgagcccggctactatgaagatggagccttcggcatcagaattgaaaatgtggtgctggtggtgcctgtgaagaccaagtacaacttcaacaacagaggcagcctgacctttgagcccctgaccctggtgcccatccagaccaagatgattgatgtggacagcctgacagacaaggaatgtgactggctgaacaactaccacctgacctgcagagatgtgattggcaaggagctgcagaagcagggccggcaggaggccctggagtggctgatccgggagacccagcccatcagcaagcagcactag

SEQ ID NO: 176227 - DNA, 552 bp, synthetic construct
  misc_feature 1..552: note = Description of Artificial Sequence: Synthetic coding sequence
  source 1..552: mol_type = other DNA
atggcccgggcccactggggctgctgcccctggctggtgctgctgtgtgcctgtgcctggggccacaccaagcctgtggacctgggcggccaggatgtgaggaactgcagcaccaaccccccctacctgcctgtgacagtggtgaacaccaccatgagcctgacagccctgcggcagcagatgcagacccagaacctgagcgcctacatcatccctggaacagatgcccacatgaatgagtacatcggccagcatgatgagcggcgggcctggatcaccggcttcaccggcagcgctggaacagctgtggtgaccatgaagaaggctgctgtgtggacagacagccgctactggacccaggccgagcggcagatggactgcaactgggagctgcacaaggaggtgggcaccacccccatcgtgacctggctgctgacagagatcccagctgggggccgggtgggctttgaccccttcctgctgagcatcggcatgctgttcctgcagagcctgaacctgtccatgctgaccagggtgacccagctgccctag

SEQ ID NO: 176228 - DNA, 2025 bp, synthetic construct
  misc_feature 1..2025: note = Description of Artificial Sequence: Synthetic coding sequence
  source 1..2025: mol_type = other DNA
atggcccgggcccactggggctgctgcccctggctggtgctgctgtgtgcctgtgcctggggccacaccaagcctgtggacctgggcggccaggatgtgaggaactgcagcaccaaccccccctacctgcctgtgacagtggtgaacaccaccatgagcctgacagccctgcggcagcagatgcagacccagaacctgagcgcctacatcatccctggaacagatgcccacatgaatgagtacatcggccagcatgatgagcggcgggcctggatcaccggcttcaccggcagcgctggaacagctgtggtgaccatgaagaaggctgctgtgtggacagacagccgctactggacccaggccgagcggcagatggactgcaactgggagctgcacaaggaggtgggcaccacccccatcgtgacctggctgctgacagagatcccagctgggggccgggtgggctttgaccccttcctgctgagcattgacacctgggagagctatgacctggccctgcagggcagcaaccggcagctggtgtccatcaccaccaacctggtggacctggtgtggggcagcgagaggcctcctgtgcccaaccagcccatctatgccctgcaggaggccttcaccggcagcacctggcaggagaaggtgtctggagtgcgcagccagatgcagaagcaccagaaggtgcccacagctgtgctgctgagcgccctggaggagacagcctggctgttcaacctgcgggccagtgacatcccctacaaccccttcttctacagctacaccctgctgacagacagcagcatccggctgtttgccaacaagagccgcttcagcagcgagaccctgagctacctgaacagcagctgcaccggccccatgtgtgtgcagatcgaggactacagccaggtgcgggacagcatccaggcctacagcctgggagatgtgcgcatctggattggcaccagctacaccatgtatggcatctatgagatgatccccaaggagaagctggtgacagacacctacagccctgtgatgatgaccaaggctgtgaagaacagcaaggagcaggccctgctgaaggccagccacgtgagagatgctgtggccgtcatccgctacctggtgtggctggagaagaatgtgcccaagggcaccgtggatgagttcagcggggctgagatcgtggacaagttccggggggaggagcagttcagcagcggccccagctttgagaccatcagcgccagcggcctgaatgctgccctggcccactacagccccaccaaggagctgaacaggaagctgagcagtgatgagatgtacctgctggacagcggcggccagtactgggatggcaccacagacatcaccaggacagtgcactggggcacccccagcgccttccagaaggaggcctacaccagggtgctgattggcaacatcgacctgagccgcctcatcttccctgctgccaccagcggccgcatggtggaggcctttgcccggcgggccctgtgggatgctggcctgaactacggccacggcaccggccacggcatcggcaacttcctgtgtgtgcatgagtggcctgtgggcttccagagcaacaacatcgccatggccaagggcatgttcaccagcattgagcccggctactacaaggatggagaatttggcatccggctggaggatgtggccctggtggtggaggccaagaccaagtacccaggcagctacctgacctttgaggtggtgtcctttgtgccctatgacaggaacctgattgatgtgtccctgctgagccctgagcacctgcagtacctgaaccgctactaccagaccatccgggagaaggtgggccctgagctgcagaggcggcagctgctggaggagtttgagtggctgcagcagcacacagagcccctggccgcccgggccccagacacagcctcctgggcctctgtgctggtggtgtccaccctggccatcctgggctggagcgtgtag

SEQ ID NO: 176229 - DNA, 1524 bp, synthetic construct
  misc_feature 1..1524: note = Description of Artificial Sequence: Synthetic coding sequence
  source 1..1524: mol_type = other DNA
atgccctggctgctgagcgcccccaagctggtgcctgctgtggccaacgtgcggggcctgagcggctgcatgctgtgcagccagaggcgctacagcctgcagcctgtgcctgagcggcgcatccccaaccgctacctgggccagcccagccccttcacccacccccacctgctgcggcctggagaggtgaccccaggcctgagccaggtggagtatgccctgcggcggcacaagctgatgagcctcatccagaaggaggcccagggccagagcggcacagaccagacagtggtggtgctgagcaaccccacctactacatgagcaatgacatcccctacaccttccaccaggacaacaacttcctgtacctgtgtggcttccaggagccagacagcatcctggtgctgcagagcctgcccgggaagcagctgcccagccacaaggccatcctgtttgtgccccggcgggaccccagccgggagctgtgggatggccccaggagcggcacagatggagccatcgccctgactggagtggatgaggcctacaccctggaggagttccagcacctgctgcccaagatgaaggccgagaccaacatggtgtggtatgactggatgaggcccagccacgcccagctgcacagcgactacatgcagcccctgacagaggccaaggccaagagcaagaacaaggtgcggggcgtgcagcagctgatccagaggctgcggctcatcaagagccctgctgagattgaaagaatgcagattgctgggaagctgaccagccaggccttcatcgagaccatgttcaccagcaaggcccctgtggaggaggccttcctgtatgccaagtttgaatttgaatgtcgggcccggggagctgacatcctggcctacccacctgtggtggccggcggcaacagaagcaacaccctgcactacgtgaagaacaaccagctgatcaaggatggagagatggtgctgctggatggcggctgtgagagcagctgctacgtgtctgacatcaccaggacctggcctgtgaatggccgcttcaccgccccccaggccgagctgtatgaagctgtgctggagatccagagggactgcctggccctgtgcttccctggcaccagcctggagaacatctacagcatgatgctgaccctcatcggccagaagctgaaggacctgggcatcatgaagaacatcaaggaaaataatgccttcaaggccgccaggaagtactgcccccaccacgtgggccactacctgggcatggatgtgcatgacaccccagacatgcccaggagcctgcccctgcagcccggcatggtgatcaccatcgagcccggcatctacatcccagaagatgacaaggatgcccctgagaagttccggggcctgggcgtgagaattgaagatgatgtggtggtgacccaggacagccccctcatcctgtctgctgactgccccaaggagatgaatgacatcgagcagatctgcagccaggccagctag

SEQ ID NO: 176230 - DNA, 837 bp, synthetic construct
  misc_feature 1..837: note = Description of Artificial Sequence: Synthetic coding sequence
  source 1..837: mol_type = other DNA
atgccctggctgctgagcgcccccaagctggtgcctgctgtggccaacgtgcggggcctgagcggctgcatgctgtgcagccagaggcgctacagcctgcagcctgtgcctgagcggcgcatccccaaccgctacctgggccagcccagccccttcacccacccccacctgctgcggcctggagaggtgaccccaggcctgagccaggtggagtatgccctgcggcggcacaagctgatgagcctcatccagaaggaggcccagggccagagcggcacagaccagacagtggtggtgctgagcaaccccacctactacatgagcaatgacatcccctacaccttccaccaggacaacaacttcctgtacctgtgtggcttccaggagccagacagcatcctggtgctgcagagcctgcccgggaagcagctgcccagccacaaggccatcctgtttgtgccccggcgggaccccagccgggagctgtgggatggccccaggagcggcacagatggagccatcgccctgactggagtggatgaggcctacaccctggaggagttccagcacctgctgcccaagatgaaggccgagaccaacatggtgtggtatgactggatgaggcccagccacgcccagctgcacagcgactacatgcagcccctgacagaggccaaggccaagagcaagaacaaggtgcggggcgtgcagcagctgatccagaggctgcggctcatcaagagccctgctgagattgaaagaatgcagattgctgggaagctgaccagccagaggcagggcttctctgtgctgagccggctggtgagcaacagctag

SEQ ID NO: 176231 - DNA, 867 bp, synthetic construct
  misc_feature 1..867: note = Description of Artificial Sequence: Synthetic coding sequence
  source 1..867: mol_type = other DNA
atgccctggctgctgagcgcccccaagctggtgcctgctgtggccaacgtgcggggcctgagcggctgcatgctgtgcagccagaggcgctacagcctgcagcctgtgcctgagcggcgcatccccaaccgctacctgggccagcccagccccttcacccacccccacctgctgcggcctggagaggtgaccccaggcctgagccaggtggagtatgccctgcggcggcacaagctgatgagcctcatccagaaggaggcccagggccagagcggcacagaccagacagtggtggtgctgagcaaccccacctactacatgagcaatgacatcccctacaccttccaccaggacaacaacttcctgtacctgtgtggcttccaggagccagacagcatcctggtgctgcagagcctgcccgggaagcagctgcccagccacaaggccatcctgtttgtgccccggcgggaccccagccgggagctgtgggatggccccaggagcggcacagatggagccatcgccctgactggagtggatgaggcctacaccctggaggagttccagcacctgctgcccaagatgaaggccgagaccaacatggtgtggtatgactggatgaggcccagccacgcccagctgcacagcgactacatgcagcccctgacagaggccaaggccaagagcaagaacaaggtgcggggcgtgcagcagctgatccagaggctgcggctcatcaagagccctgctgagattgaaagaatgcagattgctgggaagctgaccagccagaagtctgtgctgctggcccggcacggcggcagccggctgtacagccaccacttcggccggccccggctgtcctag

SEQ ID NO: 176232 - DNA, 1455 bp, synthetic construct
  misc_feature 1..1455: note = Description of Artificial Sequence: Synthetic coding sequence
  source 1..1455: mol_type = other DNA
atgctgtgcagccagaggcgctacagcctgcagcctgtgcctgagcggcgcatccccaaccgctacctgggccagcccagccccttcacccacccccacctgctgcggcctggagaggtgaccccaggcctgagccaggtggagtatgccctgcggcggcacaagctgatgagcctcatccagaaggaggcccagggccagagcggcacagaccagacagtggtggtgctgagcaaccccacctactacatgagcaatgacatcccctacaccttccaccaggacaacaacttcctgtacctgtgtggcttccaggagccagacagcatcctggtgctgcagagcctgcccgggaagcagctgcccagccacaaggccatcctgtttgtgccccggcgggaccccagccgggagctgtgggatggccccaggtctggaacagatggagccatcgccctgactggagtggatgaggcctacaccctggaggagttccagcacctgctgcccaagatgaaggccgagaccaacatggtgtggtatgactggatgaggcccagccacgcccagctgcacagcgactacatgcagcccctgacagaggccaaggccaagagcaagaacaaggtgcggggcgtgcagcagctgatccagaggctgcggctcatcaagagccctgctgagattgaaagaatgcagattgctgggaagctgaccagccaggccttcatcgagaccatgttcaccagcaaggcccctgtggaggaggccttcctgtatgccaagtttgaatttgagtgccgggcccggggagctgacatcctggcctacccacctgtggtggccggcggcaacagaagcaacaccctgcactacgtgaagaacaaccagctgatcaaggatggagagatggtgctgctggatggcggctgtgagagcagctgctacgtgtctgacatcaccaggacctggcctgtgaatggccgcttcaccgccccccaggccgagctgtatgaggccgtgctggagatccagagggactgcctggccctgtgcttccctggcaccagcctggagaacatctacagcatgatgctgaccctgattggccagaagctgaaggacctgggcatcatgaagaacatcaaggagaacaatgccttcaaggccgccaggaagtactgcccccaccacgtgggccactacctgggcatggatgtgcatgacaccccagacatgcccaggagcctgcccctgcagcccggcatggtgatcaccatcgagcccggcatctacatcccagaagatgacaaggatgcccctgagaagttccggggcctgggcgtgagaattgaagatgatgtggtggtgacccaggacagccccctcatcctgtctgctgactgccccaaggagatgaatgacatcgagcagatctgcagccaggccagctag

SEQ ID NO: 176233 - DNA, 2379 bp, synthetic construct
  misc_feature 1..2379: note = Description of Artificial Sequence: Synthetic coding sequence
  source 1..2379: mol_type = other DNA
atggccttcagcggcatctacaagctggatgatggcaagccctacctgaacaactgcttccctgccaggaacctgctgcgggtgcctgaggagggccagggccactggctggtggtgcagaagggcaacctgaagaagaagcccaagggcctggtgggcgcccaggccgagcggcgggagagcctgaaggccaccagctttgagttcaagggcaagaaggagagccggcgggagaaccaggtggacctgcccggccacatcctggaccaggccttcctgctgaagcaccactgtgtgaggaagcccagcgacctgtgcaccatcaatgccaaggaaaatgacttcaagcacttccacagcgtcatctacatcaatgccagcgagaacctgctgcccctggaggccttccacaccttccctgccctgaaggagctggacctggccttcaacggcatcaagaccatctacgtgaagtatggagacttcaagctgctggagttcctggacctgtccttcaacagcctgactgtggaggccatctgtgacctgggcatcctgccccacctgcgggtgctgctgctgactggaaatggcctgaccagcctgccccccaacctggccgtggccgagcaggaggcctctgtgaccagcctgaccagcaagcgctacatcctgcgcttccctgccctggagaccctgatgctggatgacaaccggctgagcaaccccagctgctttgccagcctggccggcctgcggcggctgaagaagctgagcctggatgagaaccgcatcatccgcatcccctacctgcagcaggtgcagctgtatgatgagagcgtggactggaatggaggccggggcagcccccacaaggagccccagttcatgctgcagagcaagcccaggatgctggaggacagtgatgagcagctggactacacagtgctgcccatgaagaaggatgtggacagaacagaggtggtgttcagcagctacccaggcttcagcaccagcgagaccaccaagatctgcagcctgccccccatctttgagatcctgcctgtgaagagcctgaaggccaggaaccagaccctggccccacccttccctgagctgcgctacctgagcctggcctacaacaagatcgccaaggaggatgctgtgctgcctgtggccctcttccccagcctgtgtgaatttgtgttccacaacaaccccctggtggcccacacccggggcgtgccccccctgctgaagagcttcctgcaggagcggctgggcatccacctgatccggaggaagatcgtgaagcccaagcaccacgtgctgatgagcaggaaggagagctggaaggtgaagtctgagatccccaaggtgcccaagcagcccctggtgctgcaccaccccaggatgaccaccaccaagagccccagcaaggacatgctggagcctgaggccgagctggccgaggacctgcccaccaccaagagcacctctgtggagagcgagatgcccacagagaacctggagggccacagccccagctgcaggacctttgtgcccctgccccccatctgcagcaacagcacagtgcacagcgaggagaccctgagccacctgagtgacaccaccgtgcggctgagccctgagcggcccagtgatgaggacagcaagagcacagagagcatcttcctgacccaggtgtctgagctgcccagcagcgtcatccacaaggatgacctggagctgaaggagaaggaccagaagaagccacccacagccccccgggaggtgaagggcaccaggaggaagctgcccacagccttcctgcccagcaagtaccacggctatgaggagctgctgacagccaagccagaccctgccttcatcgagcccaagggcatccagaagaatgcccaggccctgcagcagatgctgaagcaccccctgctgtgccacagcagcaagcccaagctggacaccctgcagaagccctacgtgcacaaggagaagagggcccagaggatccccatccccccacccaagaagacccgggcccagctgctggatgacatcttcatccggctgcgggaccccaggaacatcacagaggcccccctgggcgctgtgctgcaccagtggacagagcggcggctggtgaaccacaagcagtacctggaggccaagaggctgctgaaggagttccaggcccgctaccggcagctggtgtctggcagcctgaggacagtgtttggcaccacccccctgcccatggcctgcccagccctgtctgagagccagcccaagtttggccacttcctggagttcatggatgagttctgccaggagcccacagccagtgacagccagggctag

SEQ ID NO: 176234 - DNA, 2337 bp, synthetic construct
  misc_feature 1..2337: note = Description of Artificial Sequence: Synthetic coding sequence
  source 1..2337: mol_type = other DNA
atggccttcagcggcatctacaagctggatgatggcaagccctacctgaacaactgcttccctgccaggaacctgctgcgggtgcctgaggagggccagggccactggctggtggtgcagaagggcaacctgaagaagaagcccaagggcctggtgggcgcccaggccgagcggcgggagagcctgaaggccaccagctttgagttcaagggcaagaaggagagccggcgggagaaccaggtggacctgcccggccacatcctggaccaggccttcctgctgaagcaccactgtgtgaggaagcccagcgacctgtgcaccatcaatgccaaggaaaatgacttcaagcacttccacagcgtcatctacatcaatgccagcgagaacctgctgcccctggaggccttccacaccttccctgccctgaaggagctggacctggccttcaacggcatcaagaccatctacgtgaagtatggagacttcaagctgctggagttcctggacctgtccttcaacagcctgactgtggaggccatctgtgacctgggcatcctgccccacctgcgggtgctgctgctgactggaaatggcctgaccagcctgccccccaacctggccgtggccgagcaggaggcctctgtgaccagcctgaccagcaagcgctacatcctgcgcttccctgccctggagaccctgatgctggatgacaaccggctgagcaaccccagctgctttgccagcctggccggcctgcggcggctgaagaagctgagcctggatgagaaccgcatcatccgcatcccctacctgcagcaggtgcagctgtatgatgagagcgtggactggaatggaggccggggcagcccccacaaggagccccagttcatgctgcagagcaagcccaggatgctggaggacagtgatgagcagctggactacacagtgctgcccatgaagaaggatgtggacaggaccaccaccaagatctgcagcctgccccccatctttgagatcctgcctgtgaagagcctgaaggccaggaaccagaccctggccccacccttccctgagctgcgctacctgagcctggcctacaacaagatcgccaaggaggatgctgtgctgcctgtggccctcttccccagcctgtgtgaatttgtgttccacaacaaccccctggtggcccacacccggggcgtgccccccctgctgaagagcttcctgcaggagcggctgggcatccacctgatccggaggaagatcgtgaagcccaagcaccacgtgctgatgagcaggaaggagagctggaaggtgaagtctgagatccccaaggtgcccaagcagcccctggtgctgcaccaccccaggatgaccaccaccaagagccccagcaaggacatgctggagcctgaggccgagctggccgaggacctgcccaccaccaagagcacctctgtggagagcgagatgcccacagagaacctggagggccacagccccagctgcaggacctttgtgcccctgccccccatctgcagcaacagcacagtgcacagcgaggagaccctgagccacctgagtgacaccaccgtgcggctgagccctgagcggcccagtgatgaggacagcaagagcacagagagcatcttcctgacccaggtgtctgagctgcccagcagcgtcatccacaaggatgacctggagctgaaggagaaggaccagaagaagccacccacagccccccgggaggtgaagggcaccaggaggaagctgcccacagccttcctgcccagcaagtaccacggctatgaggagctgctgacagccaagccagaccctgccttcatcgagcccaagggcatccagaagaatgcccaggccctgcagcagatgctgaagcaccccctgctgtgccacagcagcaagcccaagctggacaccctgcagaagccctacgtgcacaaggagaagagggcccagaggatccccatccccccacccaagaagacccgggcccagctgctggatgacatcttcatccggctgcgggaccccaggaacatcacagaggcccccctgggcgctgtgctgcaccagtggacagagcggcggctggtgaaccacaagcagtacctggaggccaagaggctgctgaaggagttccaggcccgctaccggcagctggtgtctggcagcctgaggacagtgtttggcaccacccccctgcccatggcctgcccagccctgtctgagagccagcccaagtttggccacttcctggagttcatggatgagttctgccaggagcccacagccagtgacagccagggctag

SEQ ID NO: 176235 - DNA, 2211 bp, synthetic construct
  misc_feature 1..2211: note = Description of Artificial Sequence: Synthetic coding sequence
  source 1..2211: mol_type = other DNA
atggccttcagcggcatctacaagctggatgatggcaagccctacctgaacaactgcttccctgccaggaacctgctgcgggtgcctgaggagggccagggccactggctggtggtgcagaagggcaacctgaagaagaagcccaagggcctggtgggcgcccaggccgagcggcgggagagcctgaaggccaccagctttgagttcaagggcaagaaggagagccggcgggagaaccaggtggacctgcccggccacatcctggaccaggccttcctgctgaagcaccactgtgtgaggaagcccagcgacctgtgcaccatcaatgccaaggaaaatgacttcaagcacttccacagcgtcatctacatcaatgccagcgagaacctgctgcccctggaggccttccacaccttccctgccctgaaggagctggacctggccttcaacggcatcaagaccatctacgtgaagtatggagacttcaagctgctggagttcctggacctgtccttcaacagcctgactgtggaggccatctgtgacctgggcatcctgccccacctgcgggtgctgctgctgactggaaatggcctgaccagcctgccccccaacctggccgtggccgagcaggaggcctctgtgaccagcctgaccagcaagcgctacatcctgcgcttccctgccctggagaccctgatgctggatgacaaccggctgagcaaccccagctgctttgccagcctggccggcctgcggcggctgaagaagctgagcctggatgagaaccgcatcatccgcatcccctacctgcagcaggtgcagctgtatgatgagagcgtggactggaatggaggccggggcagcccccacaaggagccccagttcatgctgcagagcaagcccaggatgctggaggacagtgatgagcagctggactacacagtgctgcccatgaagaaggatgtggacaggaccatcgccaaggaggatgctgtgctgcctgtggccctcttccccagcctgtgtgaatttgtgttccacaacaaccccctggtggcccacacccggggcgtgccccccctgctgaagagcttcctgcaggagcggctgggcatccacctgatccggaggaagatcgtgaagcccaagcaccacgtgctgatgagcaggaaggagagctggaaggtgaagtctgagatccccaaggtgcccaagcagcccctggtgctgcaccaccccaggatgaccaccaccaagagccccagcaaggacatgctggagcctgaggccgagctggccgaggacctgcccaccaccaagagcacctctgtggagagcgagatgcccacagagaacctggagggccacagccccagctgcaggacctttgtgcccctgccccccatctgcagcaacagcacagtgcacagcgaggagaccctgagccacctgagtgacaccaccgtgcggctgagccctgagcggcccagtgatgaggacagcaagagcacagagagcatcttcctgacccaggtgtctgagctgcccagcagcgtcatccacaaggatgacctggagctgaaggagaaggaccagaagaagccacccacagccccccgggaggtgaagggcaccaggaggaagctgcccacagccttcctgcccagcaagtaccacggctatgaggagctgctgacagccaagccagaccctgccttcatcgagcccaagggcatccagaagaatgcccaggccctgcagcagatgctgaagcaccccctgctgtgccacagcagcaagcccaagctggacaccctgcagaagccctacgtgcacaaggagaagagggcccagaggatccccatccccccacccaagaagacccgggcccagctgctggatgacatcttcatccggctgcgggaccccaggaacatcacagaggcccccctgggcgctgtgctgcaccagtggacagagcggcggctggtgaaccacaagcagtacctggaggccaagaggctgctgaaggagttccaggcccgctaccggcagctggtgtctggcagcctgaggacagtgtttggcaccacccccctgcccatggcctgcccagccctgtctgagagccagcccaagtttggccacttcctggagttcatggatgagttctgccaggagcccacagccagtgacagccagggctag

SEQ ID NO: 176236 - DNA, 891 bp, synthetic construct
  misc_feature 1..891: note = Description of Artificial Sequence: Synthetic coding sequence
  source 1..891: mol_type = other DNA
atggccttcagcggcatctacaagctggatgatggcaagccctacctgaacaactgcttccctgccaggaacctgctgcgggtgcctgaggagggccagggccactggctggtggtgcagaagggcaacctgaagaagaagcccaagggcctggtgggcgcccaggccgagcggcgggagagcctgaaggccaccagctttgagttcaagggcaagaaggagagccggcgggagaaccaggtggacctgcccggccacatcctggaccaggccttcctgctgaagcaccactgtgtgaggaagcccagcgacctgtgcaccatcaacgtgtctggcctgaagttcagcaaggccaaggaaaatgacttcaagcacttccacagcgtcatctacatcaatgccagcgagaacctgctgcccctggaggccttccacaccttccctgccctgaaggagctggacctggccttcaacggcatcaagaccatctacgtgaagtatggagacttcaagctgctggagttcctggacctgtccttcaacagcctgactgtggaggccatctgtgacctgggcatcctgccccacctgcgggtgctgctgctgactggaaatggcctgaccagcctgccccccaacctggccgtggccgagcaggaggcctctgtgaccagcctgaccagcaagcgctacatcctgcgcttccctgccctggagaccctgatgctggatgacaaccggctgagcaaccccagctgctttgccagcctggccggcctgcggcggctgaagaagctgagcctggatgagaaccgcatcatccgcatcccctacctgcagcaggtgcagctgtatgatgagagcgtggactggaatggaggccggggctag

SEQ ID NO: 176237 - DNA, 1797 bp, synthetic construct
  misc_feature 1..1797: note = Description of Artificial Sequence: Synthetic coding sequence
  source 1..1797: mol_type = other DNA
atggccttcagcggcatctacaagctggatgatggcaagccctacctgaacaactgcttccctgccaggaacctgctgcgggtgcctgaggagggccagggccactggctggtggtgcagaagggcaacctgaagaagaagcccaagggcctggtgggcgcccaggccgagcggcgggagagcctgaaggccaccagctttgagttcaagggcaagaaggagagccggcgggagaaccaggtggacctgcccggccacatcctggaccaggccttcctgctgaagcaccactgtgtgaggaagcccagcgacctgtgcaccatcaatgccaaggaaaatgacttcaagcacttccacagcgtcatctacatcaatgccagcgagaacctgctgcccctggaggccttccacaccttccctgccctgaaggagctggacctggccttcaacggcatcaagaccatctacgtgaagtatggagacttcaagctgctggagttcctggacctgtccttcaacagcctgactgtggaggccatctgtgacctgggcatcctgccccacctgcgggtgctgctgctgactggaaatggcctgaccagcctgccccccaacctggccgtggccgagcaggaggcctctgtgaccagcctgaccagcaagcgctacatcctgcgcttccctgccctggagaccctgatgctggatgacaaccggctgagcaaccccagctgctttgccagcctggccggcctgcggcggctgaagaagctgagcctggatgagaaccgcatcatccgcatcccctacctgcagcaggtgcagctgtatgatgagagcgtggactggaatggaggccggggcagcccccacaaggagccccagttcatgctgcagagcaagcccaggatgctggaggacagtgatgagcagctggactacacagtgctgcccatgaagaaggatgtggacagaactggagtgccccccctgctgaagagcttcctgcaggagcggctgggcatccacctgatccggaggaagatcgtgaagcccaagcaccacgtgctgatgagcaggaaggagagctggaaggtgaagtctgagatccccaaggtgcccaagcagcccctggtgctgcaccaccccaggatgaccaccaccaagagccccagcaaggacatgctggagcctgaggccgagctggccgaggacctgcccaccaccaagagcacctctgtggagagcgagatgcccacagagaacctggagggccacagccccagctgcaggacctttgtgcccctgccccccatctgcagcaacagcacagtgcacagcgaggagaccctgagccacctgagtgacaccaccgtgcggctgagccctgagcggcccagtgatgaggacagcaagagcacagagagcatcttcctgacccaggtgtctgagctgcccagcagcgtcatccacaaggatgacctggagctgaaggagaaggaccagaagaagcccccaacagccccccgggaggtgaagggcaccaggaggaagctgcccacagccttcctgcccagcaagtaccacggctatgaggagctgctgacagccaagccagaccctgccttcatcgagcccaagggcatccagaagaatgcccaggccctgcagcagatgctgaagcaccccctgctgtgccacagcagcaagcccaagctggacaccctgcagaagccctacgtgcacaaggagaagagggtgctgagctgcaccagcggccagaatggaggctggtag

SEQ ID NO: 176238 - DNA, 1554 bp, synthetic construct
  misc_feature 1..1554: note = Description of Artificial Sequence: Synthetic coding sequence
  source 1..1554: mol_type = other DNA
atgctggatgacaaccggctgagcaaccccagctgctttgccagcctggccggcctgcggcggctgaagaagctgagcctggatgaaaatcgcatcatccgcatcccctacctgcagcaggtgcagctgtatgatgaatctgtggactggaatggaggccggggcagcccccacaaggagccccagttcatgctgcagagcaagcccaggatgctggaggacagtgatgagcagctggactacacagtgctgcccatgaagaaggatgtggacagaacagaggtggtgttcagcagctacccaggcttcagcaccagcgagatcgccaaggaggatgctgtgctgcctgtggccctcttccccagcctgtgtgaatttgtgttccacaacaaccccctggtggcccacacccggggcgtgccccccctgctgaagagcttcctgcaggagcggctgggcatccacctgatccggaggaagatcgtgaagcccaagcaccacgtgctgatgagcaggaaggagagctggaaggtgaagtctgagatccccaaggtgcccaagcagcccctggtgctgcaccaccccaggatgaccaccaccaagagccccagcaaggacatgctggagcctgaggccgagctggccgaggacctgcccaccaccaagagcacctctgtggagagcgagatgcccacagagaacctggagggccacagccccagctgcaggacctttgtgcccctgccccccatctgcagcaacagcacagtgcacagcgaggagaccctgagccacctgagtgacaccaccgtgcggctgagccctgagcggcccagtgatgaggacagcaagagcacagagagcatcttcctgacccaggtgtctgagctgcccagcagcgtcatccacaaggatgacctggagctgaaggagaaggaccagaagaagcccccaacagccccccgggaggtgaagggcaccaggaggaagctgcccacagccttcctgcccagcaagtaccacggctatgaggagctgctgacagccaagccagaccctgccttcatcgagcccaagggcatccagaagaatgcccaggccctgcagcagatgctgaagcaccccctgctgtgccacagcagcaagcccaagctggacaccctgcagaagccctacgtgcacaaggagaagagggcccagaggatccccatccccccacccaagaagacccgggcccagctgctggatgacatcttcatccggctgcgggaccccaggaacatcacagaggcccccctgggcgctgtgctgcaccagtggacagaaagaaggctggtgaaccacaagcagtacctggaggccaagaggctgctgaaggagttccaggcccgctaccggcagctggtgtctggcagcctgaggacagtgtttggcaccacccccctgcccatggcctgcccagccctgtctgagagccagcccaagtttggccacttcctggagttcatggatgagttctgccaggagcccacagccagtgacagccagggctag

SEQ ID NO: 176239 - DNA, 984 bp, synthetic construct
  misc_feature 1..984: note = Description of Artificial Sequence: Synthetic coding sequence
  source 1..984: mol_type = other DNA
atgttccccagcaggaggaaggccgcccagctgccctgggaggatggccgcagcggcctgctgagcggcggcctgcccaggaagtgcagcgtcttccacctgtttgtggcctgcctgagcctgggcttcttcagcctgctgtggctgcagctgagctgcagcggagatgtggcccgggctgtgcggggccagggccaggagaccagcggccccccccgggcctgccccccagagcccccacctgagcactgggaggaggatgcctcctggggcccccaccggctggccgtgctggtgcccttccgggagagatttgaggagctgctggtgtttgtgccccacatgaggcgcttcctgagcaggaagaagatccgccaccacatctacgtgctgaaccaggtggaccacttccgcttcaacagagctgccctgatcaacgtgggcttcctggagagcagcaacagcacagactacatcgccatgcatgatgtggacctgctgcccctgaatgaggagctggactatggcttccctgaggccggccccttccacgtggccagccctgagctgcaccccctgtaccactacaagacctacgtgggcggcatcctgctgctgagcaagcagcactaccgcctgtgcaatggcatgagcaaccgcttctggggctggggcagagaagatgatgagttctaccgccgcatcaagggggccggcctgcagctgttccggcccagcggcatcaccaccggctacaagaccttccgccacctgcatgaccctgcctggaggaagagggaccagaagagaattgctgcccagaagcaggagcagttcaaggtggaccgggagggcggcctgaacacagtgaagtaccacgtggccagcaggacagccctgtctgtgggcggggccccctgcaccgtgctgaacatcatgctggactgtgacaagacagccaccccctggtgcaccttctcctag

SEQ ID NO: 176240 - DNA, 642 bp, synthetic construct
  misc_feature 1..642: note = Description of Artificial Sequence: Synthetic coding sequence
  source 1..642: mol_type = other DNA
atgaggcgcttcctgagcaggaagaagatccgccaccacatctacgtgctgaaccaggtggaccacttccgcttcaacagagctgccctgatcaacgtgggcttcctggagagcagcaacagcacagactacatcgccatgcatgatgtggacctgctgcccctgaatgaggagctggactatggcttccctgaggccggccccttccacgtggccagccctgagctgcaccccctgtaccactacaagacctacgtgggcggcatcctgctgctgagcaagcagcactaccgcctgtgcaatggcatgagcaaccgcttctggggctggggcagagaagatgatgagttctaccgccgcatcaagggggccggcctgcagctgttccggcccagcggcatcaccaccggctacaagaccttccgccacctgcatgaccctgcctggaggaagagggaccagaagagaattgctgcccagaagcaggagcagttcaaggtggaccgggagggcggcctgaacacagtgaagtaccacgtggccagcaggacagccctgtctgtgggcggggccccctgcaccgtgctgaacatcatgctggactgtgacaagacagccaccccctggtgcaccttctcctag

SEQ ID NO: 176241 - DNA, 2880 bp, synthetic construct
  misc_feature 1..2880: note = Description of Artificial Sequence: Synthetic coding sequence
  source 1..2880: mol_type = other DNA
atggtggccgccccctgtgcccggcggctggcccggcgcagccacagcgccctgctggccgccctgactgtgctgctgctgcagaccctggtggtgtggaacttcagcagcctggacagcggggccggggagaggagaggaggagctgctgtgggcggcggggagcagcccccaccagccccagccccccggcgggagcggcgggacctgcctgctgagcctgctgctgcccggggcggcggcggcggcggcggcggcggcggcggcggccggggcccccaggcccgggcccggggcggcggccctggagagccccggggccagcagcctgccagcagaggagccctgcctgcccgggccctggacccccaccccagccccctcatcaccctggagacccaggacggctacttcagccaccggcccaaggagaaggtgaggacagacagcaacaatgaaaattctgtgcccaaggactttgaaaatgtggacaacagcaactttgcccccaggacccagaagcagaagcaccagcctgagctggccaagaagccacccagccggcagaaggagctgctgaagaggaagctggagcagcaggagaagggcaagggccacaccttccctggaaaaggacctggagaggtgctgcccccaggggacagagctgctgccaacagcagccacggcaaggatgtgtcccggcccccccacgccaggaagacaggaggcagcagccctgagaccaagtatgaccagccccccaagtgtgacatcagcggcaaggaggccatcagcgccctgagccgggccaagagcaagcactgccggcaggagatcggggagacctactgccgccacaagctgggcctgctgatgcctgagaaggtgacccgcttctgccccctggagggcaaggccaacaagaatgtgcagtgggatgaagattctgtggagtacatgcctgccaaccctgtgcgcatcgcctttgtgctggtggtgcacggccgggccagccggcagctgcagaggatgttcaaggccatctaccacaaggaccacttctactacatccacgtggacaagaggagcaactacctgcaccggcaggtgctgcaggtgtcccggcagtacagcaatgtgcgggtgaccccctggaggatggccaccatctggggcggggccagcctgctgagcacctacctgcagagcatgagggacctgctggagatgacagactggccctgggacttcttcatcaacctgtctgctgctgactaccccatccgcaccaatgaccagctggtggccttcctgagccgctacagagacatgaacttcctgaagagccacggccgggacaatgcccgcttcatcaggaagcagggcctggacaggctcttcctggagtgtgatgcccacatgtggaggctgggggaccggcgcatccctgagggcattgctgtggatggcggcagtgactggttcctgctgaacagaagatttgtggagtatgtgaccttcagcacagatgacctggtgaccaagatgaagcagttctacagctacaccctgctgcctgctgagagcttcttccacacagtgctggagaacagcccccactgtgacaccatggtggacaacaacctgcgcatcaccaactggaacaggaagctgggctgcaagtgccagtacaagcacatcgtggactggtgtggctgcagccccaatgacttcaagccccaggacttccaccgcttccagcagacagcccggcccaccttctttgccaggaagtttgaggccgtggtgaaccaggagatcatcggccagctggactactacctgtatggcaactacccagctggcaccccaggcctgcggagctactgggagaatgtgtatgatgagccagatggcatccacagcctgagtgatgtgaccctgaccctgtaccacagctttgcccggctgggcctgcggcgggcagagaccagcctgcacacagatggagagaacagctgccgctactaccccatgggccacccagcctctgtgcacctgtacttcctggccgaccgcttccagggcttcctgatcaagcaccacgccaccaacctggccgtgtccaagctggagaccctggagacctgggtgatgcccaagaaggtgttcaagatcgccagcccccccagcgactttggccgcctgcagttcagcgaggtgggcacagactgggatgccaaggagcggctcttcaggaactttggaggcctgctgggccccatggatgagcctgtgggcatgcagaagtggggcaagggccccaacgtgacagtgaccgtcatctgggtggaccctgtgaatgtgattgctgccacctatgacatcctgattgagagcacagctgagttcacccactacaagccacccctgaacctgcccctgcggcctggggtgtggacagtgaagatcctgcaccactgggtgcctgtggccgagaccaagttcctggtggcccccctgaccttcagcaaccggcagcccatcaagccagaggaggccctgaagctgcacaacggccccctgagaaatgcctacatggagcagagcttccagagcctgaaccctgtgctgagcctgcccatcaacccagcccaggtggagcaggccaggagaaatgctgccagcactggaacagccctggagggctggctggacagcctggtgggcggcatgtggacagccatggacatctgtgccaccggccccacagcctgccctgtgatgcagacctgcagccagacagcctggagcagcttctccccagaccccaagtctgagctgggcgctgtgaagccagatggccgcctgaggtag

SEQ ID NO: 176242 - DNA, 2598 bp, synthetic construct
  misc_feature 1..2598: note = Description of Artificial Sequence: Synthetic coding sequence
  source 1..2598: mol_type = other DNA
atggtggccagcgcccgggtgcagaagctggtgcggcgctacaagctggccatcgccacagccctggccatcctgctgctgcagggcctggtggtgtggagcttcagcggcctggaggaggatgaagctggggagaagggccggcagaggaagccccggcccctggaccctggagagggcagcaaggacacagacagcagcgctggccggcggggcagcacaggccgccgccacggccgctggaggggccgggcagagagccctggggtgcctgtggccaaggtggtgcgggctgtgaccagccggcagagggccagcagaagagtgcccccagcccctcctcctgaggcccctggccggcagaacctgagcggggctgctgctggggaggccctggtgggcgccgccggcttcccccctcatggagacaccggctctgtggagggcgccccccagcccacagacaatggcttcacccccaagtgtgagatcgtgggcaaggatgccctgagcgccctggcccgggccagcaccaagcagtgccagcaggagatcgccaacgtggtgtgcctgcaccaggccggcagcctgatgcccaaggctgtgcccaggcactgccagctgaccgggaagatgagccctggcatccagtgggatgagagccaggcccagcagcccatggatggcccccctgtgcgcatcgcctacatgctggtggtgcacggccgggccatccggcagctgaagaggctgctgaaggctgtgtaccacgagcagcacttcttctacatccacgtggacaagagaagtgactacctgcaccgggaggtggtggagctggcccagggctatgacaacgtgcgggtgaccccctggaggatggtgaccatctggggcggggccagcctgctgaggatgtacctgcgctccatgagggacctgctggaggtgcccggctgggcctgggacttcttcatcaacctgagcgccacagactaccccaccaggaccaatgaggagctggtggccttcctgagcaagaacagagacaagaacttcctgaagagccacggccgggacaacagccgcttcatcaagaagcagggcctggacaggctcttccatgaatgtgacagccacatgtggaggctgggggagcggcagatcccagctggcatcgtggtggatggcggcagtgactggtttgtgctgaccaggagctttgtggagtatgtggtgtacacagatgaccccctggtggcccagctgcggcagttctacacctacaccctgctgcctgctgagagcttcttccacacagtgctggagaacagcctggcctgtgagaccctggtggacaacaacctgcgggtgaccaactggaacaggaagctgggctgcaagtgccagtacaagcacatcgtggactggtgtggctgcagccccaatgacttcaagccccaggacttcctgcggctgcagcaggtgtcccggcccaccttctttgccaggaagtttgagagcacagtgaaccaggaggtgctggagatcctggacttccacctgtatggcagctacccacctggcaccccagccctgaaggcctactgggagaacacctatgatgctgctgatggccccagcggcctgagtgatgtgatgctgacagcctacacagcctttgcccggctgagcctgcaccacgccgccacagctgccccacccatgggcacccccctgtgccgctttgagccccggggcctgcccagctctgtgcacctgtacttctatgatgaccacttccagggctacctggtgacccaggccgtgcagcccagcgcccagggccctgctgagaccctggagatgtggctgatgccccagggcagcctgaagctgctgggccgcagtgaccaggccagccggctgcagagcctggaggtgggcacagactgggaccccaaggagcggctcttcaggaactttggaggcctgctgggccccctggatgagcctgtggccgtgcagcgctgggcccggggccccaacctgacagccaccgtggtgtggattgaccccacctacgtggtggccaccagctatgacatcaccgtggacacagaaacagaggtgacccagtacaagccacccctgagccggcccctgcggcccggcccctggacagtgcggctgctgcagttctgggagcccctgggggagacccgcttcctggtgctgcccctgaccttcaacaggaagctgcccctgaggaaggatgatgcctcctggctgcacgccggccccccccacaatgagtacatggagcagagcttccagggcctgagcagcatcctgaacctgccccagcctgagctggccgaggaggccgcccagaggcacacccagctgaccggccctgccctggaggcctggacagaccgggagctgagcagcttctggagcgtggccggcctgtgtgccatcggccccagcccctgccccagcctggagccctgccgcctgacctcctggagcagcctgagcccagaccccaagtctgagctgggccctgtgaaggcagatggccgcctgaggtag

SEQ ID NO: 176243 - DNA, 2031 bp, synthetic construct
  misc_feature 1..2031: note = Description of Artificial Sequence: Synthetic coding sequence
  source 1..2031: mol_type = other DNA
atggtggccagcgcccgggtgcagaagctggtgcggcgctacaagctggccatcgccacagccctggccatcctgctgctgcagggcctggtggtgtggagcttcagcggcctggaggaggatgaagctggggagaagggccggcagaggaagccccggcccctggaccctggagagggcagcaaggacacagacagcagcgctggccggcggggcagcacaggccgccgccacggccgctggaggggccgggcagagagccctggggtgcctgtggccaaggtggtgcgggctgtgaccagccggcagagggccagcagaagagtgcccccagcccctcctcctgaggcccctggccggcagaacctgagcggggctgctgctggggaggccctggtgggcgccgccggcttcccccctcatggagacaccggctctgtggagggcgccccccagcccacagacaatggcttcacccccaagtgtgagatcgtgggcaaggatgccctgagcgccctggcccgggccagcaccaagcagtgccagcaggagatcgccaacgtggtgtgcctgcaccaggccggcagcctgatgcccaaggctgtgcccaggcactgccagctgaccgggaagatgagccctggcatccagtgggatgagagccaggcccagcagcccatggatggcccccctgtgcgcatcgcctacatgctggtggtgcacggccgggccatccggcagctgaagaggctgctgaaggctgtgtaccacgagcagcacttcttctacatccacgtggacaagagaagtgactacctgcaccgggaggtggtggagctggcccagggctatgacaacgtgcgggtgaccccctggaggatggtgaccatctggggcggggccagcctgctgaggatgtacctgcgctccatgagggacctgctggaggtgcccggctgggcctgggacttcttcatcaacctgagcgccacagactaccccaccaggaccaatgaggagctggtggccttcctgagcaagaacagagacaagaacttcctgaagagccacggccgggacaacagccgcttcatcaagaagcagggcctggacaggctcttccatgaatgtgacagccacatgtggaggctgggggagcggcagatcccagctggcatcgtggtggatggcggcagtgactggtttgtgctgaccaggagctttgtggagtatgtggtgtacacagatgaccccctggtggcccagctgcggcagttctacacctacaccctgctgcctgctgagagcttcttccacacagtgctggagaacagcctggcctgtgagaccctggtggacaacaacctgcgggtgaccaactggaacaggaagctgggctgcaagtgccagtacaagcacatcgtggactggtgtggctgcagccccaatgacttcaagccccaggacttcctgcggctgcagcaggtgtcccggcccaccttctttgccaggaagtttgagagcacagtgaaccaggaggtgctggagatcctggacttccacctgtatggcagctacccacctggcaccccagccctgaaggcctactgggagaacacctatgatgctgctgatggccccagcggcctgagtgatgtgatgctgacagcctacacagcctttgcccggctgagcctgcaccacgccgccacagctgccccacccatgggcacccccctgtgccgctttgagccccggggcctgcccagctctgtgcacctgtacttctatgatgaccacttccagggctacctggtgacccaggccgtgcagcccagcgcccagggccctgctgagaccctggagatgtggctgatgccccagggcagcctgaagctgctgggccgcagtgaccaggccagccggctgcagagcctggagaacagaggcctgtccatgctgccccggctggtgagcaacagctggccccaggccgtgctgcccctgcagccccccaaggccctgggctag

SEQ ID NO: 176244 - DNA, 1503 bp, synthetic construct
  misc_feature 1..1503: note = Description of Artificial Sequence: Synthetic coding sequence
  source 1..1503: mol_type = other DNA
atgatcatcagccacttccccaagtgtgtggccgtgtttgccctgctggccctgtctgtgggcgccctggacaccttcatcgctgctgtgtatgaacatgctgtgatcctgcccaacagaacagagacccctgtgtccaaggaggaggccctgctgctgatgaacaagaacattgatgtgctggagaaggctgtgaagctggccgccaagcagggcgcccacatcatcgtgaccccagaagatggcatctacggctggatcttcacccgggagagcatctacccctacctggaggacatcccagaccccggggtgaactggatcccctgccgggacccctggaggtttggaaacacccctgtgcagcagaggctgagctgcctggccaaggacaacagcatctacgtggtggccaacatcggggacaagaagccctgcaatgccagtgacagccagtgccccccagatggccgctaccagtacaacacagatgtggtgtttgacagccagggcaagctgctggcccgctaccacaagtacaacctgtttgcccctgagatccagtttgacttccccaaggacagcgagctggtgacctttgacaccccatttgggaagtttggcatcttcacctgctttgacatcttcagccatgaccctgctgtggtggtggtggatgagagcattgacagcatcctgtaccccacagcctggtacaacaccctgcccctgctgtctgctgtgcccttccacagcgcctgggccaaggccatgggcgtgaacctgctggccgccaacacccacaacacctccatgcacatgactggaagtggcatctatgcccctgaggccgtgaaggtgtaccactatgacatggagacagagagcggccagctgctgctgtctgagctgaagagccggccccggcgggagcccacctacccagctgctgtggactggcacgcctatgccagctctgtgaagcccttcagcagcgagcagagcgacttcctgggcatgatctactttgatgagttcaccttcaccaagctgaagagaaatactggaaactacacagcctgccagaaggacctgtgctgccacctgacctacaagatgtctgagaagaggacagatgagatctatgccctgggcgcctttgatggcctgcacacagtggagggccagtactacctgcagatctgtgccctgctgaagtgccagaccacagacctggagacctgtggggagcctgtgggcagcgccttcaccaagtttgaggacttcagcctgagcggcaccttcggcaccaggtatgtgttcccccagatcatcctgagcggcagccagctggcccctgagcggcactatgagatcagcagagatggccgcctgcggagccgcagcggggcccccctgcctgtgctggtgatggccctgtatggccgggtgtttgagaaggaccccccccggctgggccagggcagcggcaagttccagtag

SEQ ID NO: 176245 - DNA, 1200 bp, synthetic construct
  misc_feature 1..1200: note = Description of Artificial Sequence: Synthetic coding sequence
  source 1..1200: mol_type = other DNA
atggacagcagcaccacagcccagtgccggcagctggaggccgctgtgggcggggcccaggccctgagctgcctgaccggcagccgggcctatgagcgcttcaccggcaaccagatcgccaagatctaccagcagaaccctgaggcctacagccacacagagcgcatcagcctggtgtcctcctttgctgccagcctcttcctgggcagctacagccccatcgactacagtgatggcagcggcatgaacctgctgcagatccaggacaaggtgtggagccaggcctgcctgggcgcctgtgccccccacctggaggagaagctgagcccccctgtgcccagctgcagcgtggtgggcgccatcagcagctactacgtgcagagatatggcttccccccaggctgcaaggtggtggccttcaccggggacaacccagccagcctggccggcatgaggctggaggagggggacattgctgtgtccctgggcaccagtgacaccctcttcctgtggctgcaggagcccatgcctgccctggagggccacatcttctgcaaccctgtggacagccagcactacatggccctgctgtgcttcaagaatggcagcctgatgagggagaagatcagaaatgaatctgtgagccgctcctggagcgacttcagcaaggccctgcagagcacagagatgggaaatggaggcaacctgggcttctactttgatgtgatggagatcaccccagagatcatcggccgccaccgcttcaacacagagaaccacaaggtggccgccttccctggagatgtggaggtgcgggccctgattgagggccagttcatggccaagagaattcatgctgagggcctgggctacagagtgatgagcaagaccaagatcctggccaccggcggggccagccacaaccgggagatcctgcaggtgctggctgatgtgtttgatgcccctgtgtatgtgattgacacagccaacagcgcctgtgtgggcagcgcctaccgggccttccacggcctggccggcggcacagatgtgcccttcagcgaggtggtgaagctggcccccaacccccggctggccgccacccccagccctggggccagccaggtgtatgaggccctgctgccccagtatgccaagctggagcagaggatcctgagccagacccggggccccccagagtag

SEQ ID NO: 176246 - DNA, 4269 bp, synthetic construct
  misc_feature 1..4269: note = Description of Artificial Sequence: Synthetic coding sequence
  source 1..4269: mol_type = other DNA
atgagcggcatcaagaggaccatcaaggagacagatcctgactatgaagatgtgtctgtggccctgcccaacaagaggcacaaggccattgaaaattctgccagagatgctgctgtgcagaagattgagaccatcatcaaggagcagtttgccctggagatgaagaacaaggagcatgaaattgaagtcatcgaccagaggctgattgaggcccggaggatgatggacaagctgcgggcctgcatcgtggccaactactatgccagcgctggcctgctgaaggtgtctgagggcagcaagacctgtgacaccatggtgttcaaccacccagccatcaagaagttcctggagagccccagccgcagcagcagccctgccaaccagagagctgagacccccagcgccaaccacagcgagagtgacagcctgagccagcacaatgacttcctgagtgacaaggacaacaacagcaacatggacatcgaggagcggctgagcaacaacatggagcagaggcccagcaggaacacaggccgggacaccagccgcatcaccggcagccacaagacagagcagagaaatgctgacctgacagatgagaccagccggctgtttgtgaagaagaccatcgtggtgggcaatgtgtccaagtacatccccccagacaagcgggaggagaatgaccagagcacccacaagtggatggtgtatgtgcggggcagccggcgggagcccagcatcaaccactttgtgaagaaggtgtggttcttcctgcaccccagctacaagcccaatgacctggtggaggtgcgggagccccccttccacctgacccggcggggctggggcgagttccctgtgcgggtgcaggtgcacttcaaggacagccagaacaagagaattgacatcatccacaacctgaagctggacaggacctacacaggcctgcagaccctgggcgctgagaccgtggtggatgtggagctgcaccgccacagcctgggggaggactgcatctacccccagagcagcgagagtgacatcagtgatgccccacccagcctgcccctgaccatcccagcccctgtgaaggccagcagccccatcaagcagagccatgagcctgtgcctgacacctctgtggagaagggcttccctgccagcacagaagctgagcggcacacccccttctacgccctgcccagcagcctggagaggacccccaccaagatgaccaccagccagaaggtgaccttctgcagccacggcaacagcgccttccagcccatcgccagcagctgcaagatcgtgccccagagccaggtgcccaaccctgagagccctgggaagagcttccagcccatcaccatgagctgcaagatcgtgtctggcagccccatcagcacccccagccccagccccctgcccaggacccccaccagcacccctgtgcacgtgaagcagggcacagctggcagcgtcatcaacaacccctacgtgatcatggacaagcagcccggccaggtgattggagccaccacccccagcacaggcagccccaccaacaagatcagcacagccagccaggtgtcccagggcaccggcagccctgtgcccaagatccacggcagcagctttgtgaccagcacagtgaagcaggaggacagcctgtttgcctccatgccacccctgtgccccatcggcagccaccccaaggtgcagagccccaagcccatcaccggcggcctgggcgccttcaccaaggtgatcatcaagcaggagcctggagaggccccccacgtgcctgccaccggggccgccagccagagccccctgccccagtatgtgacagtgaagggcggccacatgattgctgtgagcccccagaagcaggtgatcaccccaggagagggcatcgcccagagcgccaaggtgcagcccagcaaggtggtgggcgtgcctgtgggcagcgccctgcccagcacagtgaagcaggccgtggccatcagcggcggccagatcctggtggccaaggccagcagctctgtgtccaaggctgtgggccccaagcaggtggtgacccagggcgtggccaaggccatcgtgtctgggggcggcggcaccatcgtggcccagcctgtgcagaccctgaccaaggcccaggtgacagctgctggcccccagaagagcggcagccagggctctgtgatggccaccctgcagctgcctgccaccaacctggccaacctggccaacctgcccccaggcaccaagctgtacctgaccaccaacagcaagaaccccagcggcaagggcaagctgctgctgatcccccagggcgccatcctgcgggccaccaacaatgccaacctgcagagcggcagcgctgccagcggcggcagcggggccggcggcggcggcggcggcggcggcggcggcggcagcggcagcggcggcggcggcagcactggaggcggcggcggcacagctgggggcggcacccagagcacagctggccctgggggcatcagccagcacctgacctacaccagctacatcctgaagcagaccccccagggcaccttcctggtgggccagcccagcccccagaccagcggcaagcagctgaccaccggctctgtggtgcagggcaccctgggcgtgtccaccagcagcgcccagggccagcagaccctgaaggtgatcagcggccagaagaccaccctcttcacccaggccgcccatggaggccaggccagcctgatgaagatcagtgacagcaccctgaagacagtgcctgccaccagccagctgagcaagccaggcaccaccatgctgcgggtggccggcggcgtcatcaccacagccaccagccctgctgtggccctgagcgccaacggccctgcccagcagagcgagggcatggcccctgtgagcagcagcacagtgtcctctgtgaccaagaccagcggccagcagcaggtgtgtgtgtcccaggccaccgtgggcacctgcaaggccgccacccccaccgtggtgtctgccaccagcctggtgcccacccccaaccccatcagcggcaaggccaccgtgtctggcctgctgaagatccacagcagccagagcagcccccagcaggccgtgctgaccatccccagccagctgaagcccctgtctgtgaacaccagcggaggagtgcagaccatcctgatgcctgtgaacaaggtggtgcagagcttcagcaccagcaagcccccagccatcctgcctgtggccgcccccacccctgtggtgcccagcagcgccccagctgctgtggccaaggtgaagacagagcctgagaccccaggccccagctgcctgagccaggagggccagacagctgtgaagacagaggagagcagcgagctgggcaactacgtgatcaagattgaccacctggagaccatccagcagctgctgacagctgtggtgaagaagatccccctcatcacagccaagtcagaagatgccagctgcttcagcgccaagtctgtggagcagtactacggctggaacatcggcaagagaagagctgctgagtggcagagggccatgaccatgaggaaggtgctgcaggagatcctggagaagaacccccgcttccaccacctgacccccctgaagaccaagcacatcgcccactggtgccgctgccacggctacaccccaccagaccctgagagcctgagaaatgatggagacagcattgaagatgtgctgacccagattgattctgagcctgagtgccccagcagcttcagcagcgctgacaacctgtgcaggaagctggaggacctgcagcagttccagaagcgggagccagaaaatgaggaggaggtggacatcctgagcctgtctgagcctgtgaagatcaacatcaagaaggagcaggaggagaagcaggaggaggtgaagttctacctgccccccaccccaggcagcgagttcatcggagatgtgacccagaagattggcatcaccctgcagcctgtggccctgcacagaaatgtgtatgcctctgtggtggaggacatgatcctgaaggccacagagcagctggtgaatgacatcctgcggcaggccctggccgtgggctaccagacagccagccacaaccgcatccccaaggagatcaccgtgagcaacatccaccaggccatctgcaacatccccttcctggacttcctgaccaacaagcacatgggcatcctgaatgaagaccagtag

SEQ ID NO: 176247 - DNA, 4269 bp, synthetic construct; identical to SEQ ID NO: 176246
  misc_feature 1..4269: note = Description of Artificial Sequence: Synthetic coding sequence
  source 1..4269: mol_type = other DNA

SEQ ID NO: 176248 - DNA, 684 bp, synthetic construct
  misc_feature 1..684: note = Description of Artificial Sequence: Synthetic coding sequence
  source 1..684: mol_type = other DNA
atgttcaagaggatggccgagtttggaccagacagcggcggccgggtgaagggcgtgaccatcgtgaagcccatcgtgtatggaaatgtggcccgctactttgggaagaagcgggaggaggatggccacacccaccagtggacagtgtatgtgaagccctacagaaatgaagacatgtctgcctacgtgaagaagatccagttcaagctgcacgagagctatggcaaccccctgcgggtggtgaccaagccaccctatgagatcacagaaacaggctggggcgagtttgagatcatcatcaagatcttcttcatcgaccccaatgaaagacctgtgaccctgtaccacctgctgaagctgttccagagcgacaccaatgccatgctgggcaagaagacagtggtgtctgagttctatgatgagatgatcttccaggaccccacagccatgatgcagcagctgctgaccaccagccggcagctgaccctgggcgcctacaagcatgaaacagaatttgctgagctggaggtgaagacccgggagaagctggaggccgccaagaagaagaccagctttgaaattgctgagctgaaggagcggctgaaggccagccgggagaccatcaactgcctgaagaatgagatcaggaagctggaggaggatgaccaggccaaggacatctag

SEQ ID NO: 176249 - DNA, 1053 bp, synthetic construct
  misc_feature 1..1053: note = Description of Artificial Sequence: Synthetic coding sequence
  source 1..1053: mol_type = other DNA
atggccaccacagctgccccagctgggggcgccagaaatggagctggccctgagtggggcggctttgaggagaacatccagggcggcggcagcgctgtgattgacatggagaacatggatgacaccagcggcagcagctttgaggacatgggagagctgcaccagaggctgcgggaggaggaggtggatgctgatgctgctgatgctgctgctgctgaggaggaggatggagagttcctgggcatgaagggcttcaagggccagctgagccggcaggtggccgaccagatgtggcaggccggcaagaggcaggccagccgggccttcagcctgtatgccaacatcgacatcctgcggccctactttgatgtggagcccgcccaggtgcgcagccggctgctggagagcatgatccccatcaagatggtgaacttcccccagaagattgctggggagctgtatggccccctgatgctggtgttcaccctggtggccatcctgctgcacggcatgaagaccagtgacaccatcatccgggagggcaccctgatgggcacagccatcggcacctgcttcggctactggctgggcgtgagcagcttcatctacttcctggcctacctgtgcaatgcccagatcaccatgctgcagatgctggccctgctgggctacggcctgtttggccactgcatcgtgctcttcatcacctacaacatccacctgcacgccctcttctacctgttctggctgctggtgggcggcctgagcaccctgaggatggtggccgtgctggtgtccaggacagtgggccccacccagaggctgctgctgtgtggcaccctggccgccctgcacatgctgttcctgctgtacctgcactttgcctaccacaaggtggtggagggcatcctggacaccctggagggccccaacatcccccccatccagagggtgccccgggacatcccagccatgctgcctgctgcccggctgcccaccaccgtgctgaatgccacagccaaggctgtggccgtgaccctgcagagccactag

SEQ ID NO: 176250 - DNA, 774 bp, synthetic construct
  misc_feature 1..774: note = Description of Artificial Sequence: Synthetic coding sequence
  source 1..774: mol_type = other DNA
atgagcggctttgagaacctgaacacagacttctaccagaccagctacagcattgatgaccagagccagcagagctatgactatggaggcagcggcggcccctacagcaagcagtatgccggctatgactacagccagcagggccgctttgtgcccccagacatgatgcagccccagcagccctacacaggccagatctaccagcccacccaggcctacaccccagccagcccccagcccttctacggcaacaactttgaagatgagccccccctgctggaggagctgggcatcaactttgaccacatctggcagaagaccctgactgtgctgcaccccctgaaggtggctgatggcagcatcatgaatgaaacagacctggccggccccatggtgttctgcctggcctttggagccaccctgctgctggccggcaagatccagtttggctacgtgtatggcatcagcgccatcggctgcctgggcatgttctgcctgctgaacctgatgtccatgactggagtgtcctttggctgtgtggcctctgtgctgggctactgcctgctgcccatgatcctgctgagcagctttgctgtgatcttcagcctgcagggcatggtgggcatcatcctgacagctggcatcatcggctggtgcagcttcagcgccagcaagatcttcatcagcgccctggccatggagggccagcagctgctggtggcctacccctgtgccctgctgtatggagtgtttgccctgatctctgtgttctag

SEQ ID NO: 176251 - DNA, 798 bp, synthetic construct
  misc_feature 1..798: note = Description of Artificial Sequence: Synthetic coding sequence
  source 1..798: mol_type = other DNA
atgagcggctttgagaacctgaacacagacttctaccagaccagctacagcattgatgaccagagccagcagagctatgactatggaggcagcggcggcccctacagcaagcagtatgccggctatgactacagccagcagggccgctttgtgcccccagacatgatgcagccccagcagccctacacaggccagatctaccagcccacccaggcctacaccccagccagcccccagcccttctacggcaacaactttgaagatgagccccccctgctggaggagctgggcatcaactttgaccacatctggcagaagaccctgactgtgctgcaccccctgaaggtggctgatggcagcatcatgaatgaaacagacctggccggccccatggtgttctgcctggcctttggagccaccctgctgctggccggcaagatccagtttggctacgtgtatggcatcagcgccatcggctgcctgggcatgttctgcctgctgaacctgatgtccatgactggagtgtcctttggctgtgtggcctctgtgctgggctactgcctgctgcccatgatcctgctgagcagctttgctgtgatcttcagcctgcagggcatggtgggcatcatcctgacagctggcatcatcggctggtgcagcttcagcgccagcaagatcttcatcagcgccctggccatggagggccagcagctgctggtggccctgcagcccaacatcacctacggcagcaactacttcctgttctgctgcctgccctacccccagcagcacttctag

SEQ ID NO: 176252 - DNA, 774 bp, synthetic construct; identical to SEQ ID NO: 176250
  misc_feature 1..774: note = Description of Artificial Sequence: Synthetic coding sequence
  source 1..774: mol_type = other DNA

SEQ ID NO: 176253 - DNA, 612 bp, synthetic construct
  misc_feature 1..612: note = Description of Artificial Sequence: Synthetic coding sequence
  source 1..612: mol_type = other DNA
atgatgcagccccagcagccctacacaggccagatctaccagcccacccaggcctacaccccagccagcccccagcccttctacggcaacaactttgaagatgagccccccctgctggaggagctgggcatcaactttgaccacatctggcagaagaccctgactgtgctgcaccccctgaaggtggctgatggcagcatcatgaatgaaacagacctggccggccccatggtgttctgcctggcctttggagccaccctgctgctggccggcaagatccagtttggctacgtgtatggcatcagcgccatcggctgcctgggcatgttctgcctgctgaacctgatgtccatgactggagtgtcctttggctgtgtggcctctgtgctgggctactgcctgctgcccatgatcctgctgagcagctttgctgtgatcttcagcctgcagggcatggtgggcatcatcctgacagctggcatcatcggctggtgcagcttcagcgccagcaagatcttcatcagcgccctggccatggagggccagcagctgctggtggcctacccctgtgccctgctgtatggagtgtttgccctgatctctgtgttctag

SEQ ID NO: 176254 - DNA, 534 bp, synthetic construct
  misc_feature 1..534: note = Description of Artificial Sequence: Synthetic coding sequence
  source 1..534: mol_type = other DNA
atgatgcagccccagcagccctacacaggccagatctaccagcccacccaggcctacaccccagccagcccccagcccttctacggcaacaactttgaagatgagccccccctgctggaggagctgggcatcaactttgaccacatctggcagaagaccctgactgtgctgcaccccctgaaggtggctgatggcagcatcatgaatgaaacagacctggccggccccatggtgttctgcctggcctttggagccaccctgctgctggccggcaagatccagtttggctacgtgtatggcatcagcgccatcggctgcctgggcatgttctgcctgctgaacctgatgtccatgactggagtgtcctttggctgtgtggcctctgtgctgggctactgcctgctgcccatgatcctgctgagcagctttgctgtgatcttcagcctgcagggcatggtgggcatcatcctgacagctggcatcatcggctggtgcagcttcagcgccagcaagatcttcatcagcgccctgtag

SEQ ID NO: 176255 - DNA, 306 bp, synthetic construct
  misc_feature 1..306: note = Description of Artificial Sequence: Synthetic coding sequence
  source 1..306: mol_type = other DNA
atgatgcagccccagcagccctacacaggccagatctaccagcccacccaggcctacaccccagccagcccccagcccttctacggcaacaactttgaagatgagccccccctgctggaggagctgggcatcaactttgaccacatctggcagaagaccctgactgtgctgcaccccctgaaggtggctgatggcagcatcatgaatgaaacagacctggccggccccatggtgttctgcctggcctttggagccaccctgctgctggccggcaagatccagtttggctacgtgtatggcatctag

SEQ ID NO: 176256 - DNA, 429 bp, synthetic construct
  misc_feature 1..429: note = Description of Artificial Sequence: Synthetic coding sequence
  source 1..429: mol_type = other DNA
atgagcggctttgagaacctgaacacagacttctaccagaccagctacagcattgatgaccagagccagcagagctatgactatggaggcagcggcggcccctacagcaagcagtatgccggctatgactacagccagcagggccgctttgtgcccccagacatgatgcagccccagcagccctacacaggccagatctaccagcccacccaggcctacaccccagccagcccccagcccttctacggcaacaactttgaagatgagccccccctgctggaggagctgggcatcaactttgaccacatctggcagaagaccctgactgtgctgcaccccctgaaggtggctgatggcagcatcatgaatgaaacagacctggcccagtggttctttgccctgctgctggagccccactgctactggtag

SEQ ID NO: 176257 - DNA, 882 bp, synthetic construct
  misc_feature 1..882: note = Description of Artificial Sequence: Synthetic coding sequence
  source 1..882: mol_type = other DNA
atggcctaccacagcggctatggagcccacggcagcaagcaccgggcccgggccgccccagaccccccacccctgtttgatgacaccagcggcggctacagcagccagcccggcggctacccagccactggagcagatgtggccttctctgtgaaccacctgctgggggaccccatggccaacgtggccatggcctacggcagcagcatcgccagccacggcaaggacatggtgcacaaggagctgcacagatttgtgtctgtgtccaagctgaagtacttctttgctgtggacacagcctacgtggccaagaagctgggcctgctggtgttcccctacacccaccagaactgggaggtgcagtacagcagagatgcccccctgcccccccggcaggacctgaatgccccagacctgtacatccccaccatggccttcatcacctacgtgctgctggccggcatggccctgggcatccagaagcgcttcagccctgaggtgctgggcctgtgtgccagcacagccctggtgtgggtggtgatggaggtgctggccctgctgctgggcctgtacctggccaccgtgcggagtgacctgagcaccttccacctgctggcctacagcggctacaagtatgtgggcatgatcctgtctgtgctgaccggcctgctgtttggaagtgatggctactacgtggccctggcctggaccagcagcgccctgatgtacttcatcgtgcgcagcctgaggacagctgccctgggccctgacagcatgggcggccctgtgccccggcagaggctgcagctgtacctgaccctgggcgctgctgccttccagcccctcatcatctactggctgaccttccacctggtgaggtag

SEQ ID NO: 176258 - DNA, 360 bp, synthetic construct
  misc_feature 1..360: note = Description of Artificial Sequence: Synthetic coding sequence
  source 1..360: mol_type = other DNA
atggtgaagatgaccaagagcaagaccttccaggcctacctgcccaactgccacaggacctacagctgcatccactgccgggcccacctggccaaccatgatgagctgatcagcaagagcttccagggcagccagggccgggcctacctgttcaacagcgtggtgaatgtgggctgcggccctgctgaggagcgggtgctgctgaccggcctgcatgctgtggccgacatctactgtgagaactgcaagaccaccctgggctggaagtatgagcacgcctttgagagcagccagaagtacaaggagggcaagttcatcatcgagctggcccacatgatcaaggacaatggctgggagtag

SEQ ID NO: 176259 - DNA, 360 bp, synthetic construct
  misc_feature 1..360: note = Description of Artificial Sequence: Synthetic coding sequence
  source 1..360: mol_type = other DNA
atggtgaagatgaccaggagcaagaccttccaggcctacctgcccagctgccacaggacctacagctgcatccactgccgggcccacctggccaaccatgatgagctgatcagcaagagcttccagggcagccagggccgggcctacctgttcaacagcgtggtgaatgtgggctgcggccctgctgaggagcgggtgctgctgaccggcctgcatgctgtggccgacatctactgtgagaactgcaagaccaccctgggctggaagtatgagcacgcctttgagagcagccagaagtacaaggagggcaagtacatcatcgagctggcccacatgatcaaggacaatggctgggactag

SEQ ID NO: 176260 - DNA, 360 bp, synthetic construct
  misc_feature 1..360: note = Description of Artificial Sequence: Synthetic coding sequence
  source 1..360: mol_type = other DNA
atggtgcgcatcagcaagcccaagaccttccaggcctacctggatgactgccaccggcgctacagctgtgcccactgccgggcccacctggccaaccatgatgacctgatcagcaagagcttccagggcagccagggccgggcctacctgttcaacagcgtggtgaatgtgggctgcggccctgctgaggagcgggtgctgctgaccggcctgcatgctgtggccgacatccactgtgagaactgcaagaccaccctgggctggaagtatgagcaggcctttgagagcagccagaagtacaaggagggcaagtacatcatcgagctgaaccacatgatcaaggacaatggctgggactag

SEQ ID NO: 176261 - DNA, 474 bp, synthetic construct
  misc_feature 1..474: note = Description of Artificial Sequence: Synthetic coding sequence
  source 1..474: mol_type = other DNA
atgtgtgtggcccaggtgctgacagcccacctgctgcccccccggcaggccctgggcagcctgtgcagcccctgggccgccccccgggtgggccccctgcccccagccccagccatggtgcgcatcagcaagcccaagaccttccaggcctacctggatgactgccaccggcgctacagctgtgcccactgccgggcccacctggccaaccatgatgacctgatcagcaagagcttccagggcagccagggccgggcctacctgttcaacagcgtggtgaatgtgggctgcggccctgctgaggagcgggtgctgctgaccggcctgcatgctgtggccgacatccactgtgagaactgcaagaccaccctgggctggaagtatgagcaggcctttgagagcagccagaagtacaaggagggcaagtacatcatcgagctgaaccacatgatcaaggacaatggctgggactag

SEQ ID NO: 176262 - DNA, 384 bp, synthetic construct
  misc_feature 1..384: note = Description of Artificial Sequence: Synthetic coding sequence
  source 1..384: mol_type = other DNA
atgcccagctgtgaccccggccctggccctgcctgcctgcccaccaagaccttccgcagctacctgccccgctgccacaggacctacagctgtgtgcactgccgggcccacctggccaagcatgatgagctgatcagcaagagcttccagggcagccacggccgggcctacctgttcaacagcgtggtgaatgtgggctgcggccctgctgagcagaggctgctgctgaccggcctgcacagcgtggccgacatcttctgtgagagctgcaagaccaccctgggctggaagtatgagcaggcctttgagaccagccagaagtacaaggagggcaagtacatcatcgagatgagccacatggtgaaggacaatggctgggactag

SEQ ID NO: 176263 - DNA, 384 bp, synthetic construct; identical to SEQ ID NO: 176262
  misc_feature 1..384: note = Description of Artificial Sequence: Synthetic coding sequence
  source 1..384: mol_type = other DNA

SEQ ID NO: 176264 - DNA, 384 bp, synthetic construct; identical to SEQ ID NO: 176262
  misc_feature 1..384: note = Description of Artificial Sequence: Synthetic coding sequence
  source 1..384: mol_type = other DNA

SEQ ID NO: 176265 - DNA, 243 bp, synthetic construct
  misc_feature 1..243: note = Description of Artificial Sequence: Synthetic coding sequence
  source 1..243: mol_type = other DNA
atgcccagctgtgaccccggccctggccctgcctgcctgcccaccaagaccttccgcagctacctgccccgctgccacaggacctacagctgtgtgcactgccgggcccacctggccaagcatgatgagctgatcagcaagagcttccagggcagccacggccgggcctacctgttcaacagcgtggtgaatgtgggctgcggccctgctgagcagaggctgctgctgaccggcctgcactag

SEQ ID NO: 176266 - DNA, 384 bp, synthetic construct; identical to SEQ ID NO: 176262
  misc_feature 1..384: note = Description of Artificial Sequence: Synthetic coding sequence
  source 1..384: mol_type = other DNA

SEQ ID NO: 176267 - DNA, 366 bp, synthetic construct
  misc_feature 1..366: note = Description of Artificial Sequence: Synthetic coding sequence
  source 1..366: mol_type = other DNA
atgggccgcatcttcctggaccacatcggcggcaccaggctcttcagctgtgccaactgtgacaccatcctgaccaacagaagtgagctgatcagcacccgcttcaccggggccaccggccgggccttcctgttcaacaaggtggtgaacctgcagtacagcgaggtgcaggacagagtgatgctgaccggccgccacatggtgagagatgtgtcctgcaagaactgcaacagcaagctgggctggatctatgaatttgccacagaggacagccagcgctacaaggagggccgggtcatcctggagcgggccctggtgcgggagagcgagggctttgaggagcacgtgcccagcgacaacagctag

SEQ ID NO: 176268 - DNA, 366 bp, synthetic construct; identical to SEQ ID NO: 176267
  misc_feature 1..366: note = Description of Artificial Sequence: Synthetic coding sequence
  source 1..366: mol_type = other DNA

SEQ ID NO: 176269 - DNA, 366 bp, synthetic construct; identical to SEQ ID NO: 176267
  misc_feature 1..366: note = Description of Artificial Sequence: Synthetic coding sequence
  source 1..366: mol_type = other DNA

SEQ ID NO: 176270 - DNA, 366 bp, synthetic construct; identical to SEQ ID NO: 176267
  misc_feature 1..366: note = Description of Artificial Sequence: Synthetic coding sequence
  source 1..366: mol_type = other DNA

SEQ ID NO: 176271 - DNA, 366 bp, synthetic construct; identical to SEQ ID NO: 176267
  misc_feature 1..366: note = Description of Artificial Sequence: Synthetic coding sequence
  source 1..366: mol_type = other DNA

SEQ ID NO: 176272 - DNA, 2322 bp, synthetic construct
  misc_feature 1..2322: note = Description of Artificial Sequence: Synthetic coding sequence
  source 1..2322: mol_type = other DNA
atgttcagcctgagcagcacagtgcagccccaggtgacagtgcccctgagccacctgatcaatgccttccacacccccaagaacacctctgtgtccctgagcggcgtgtctgtgtcccagaaccagcacagagatgtggtgcctgagcacgaggcccccagcagcgagtgcatgttcagtgacttcctgaccaagctgaacatcgtgtccatcggcaagggcaagatctttgagggctaccgctccatgttcatggagcccgccaagaggatgaagaagagcctggacaccacagacaactggcacatccggcctgagcccttcagcctgagcatcccccccagcctgaacctgcgggacctgggcctgtctgagctgaagattggccagattgaccagctggtggagaacctgctgcccggcttctgcaagggcaagaacatcagcagccactggcacaccagccacgtgtctgcccagagcttctttgagaacaagtatggcaacctggacatcttcagcaccctgcggagcagctgcctgtaccgccaccacagccgggccctgcagagcatctgcagcgacctgcagtactggcctgtgttcatccagagccggggcttcaagaccctgaagagcaggacccggcggctgcagagcaccagcgagcggctggccgagacccagaacatcgcccccagctttgtgaagggcttcctgctgcgggaccggggcagtgatgtggagagcctggacaagctgatgaagaccaagaacatccctgaggcccaccaggatgccttcaagacaggctttgctgagggcttcctgaaggcccaggccctgacccagaagaccaatgacagcctgcggaggaccaggctcatcctgtttgtgctgctgctgtttggcatctacggcctgctgaagaaccccttcctgtctgtgcgcttccgcaccaccaccggcctggacagcgctgtggaccctgtgcagatgaagaatgtgacctttgagcacgtgaagggcgtggaggaggccaagcaggagctgcaggaggtggtggagttcctgaagaacccccagaagttcaccatcctgggcggcaagctgcccaagggcatcctgctggtgggccccccaggcaccgggaagaccctgctggcccgggctgtggccggggaggctgatgtgcccttctactatgccagcggcagcgagtttgatgagatgtttgtgggcgtgggcgccagccgcatccggaacctcttccgggaggccaaggccaatgccccctgtgtgatcttcattgatgagctggacagcgtgggcggcaagagaattgagagccccatgcacccctacagccggcagaccatcaaccagctgctggccgagatggatggcttcaagcccaatgaaggagtcatcatcattggagccaccaacttccctgaggccctggacaatgccctgatccggcccggccgctttgacatgcaggtgacagtgcccaggccagatgtgaagggccgcacagagatcctgaagtggtacctgaacaagatcaagtttgaccagagcgtggaccctgagatcatcgcccggggcaccgtgggcttcagcggggctgagctggagaacctggtgaaccaggccgccctgaaggctgctgtggatggcaaggagatggtgaccatgaaggagctggagttcagcaaggacaagatcctgatgggccctgagaggagatctgtggagattgacaacaagaacaagaccatcacagcctaccatgaaagtggccacgccatcatcgcctactacaccaaggatgccatgcccatcaacaaggccaccatcatgccccggggccccaccctgggccacgtgtccctgctgcctgaaaatgaccgctggaatgagacccgggcccagctgctggcccagatggatgtgtccatgggcggccgggtggccgaggagctgatctttggaacagaccacatcaccaccggggccagcagtgactttgacaatgccaccaagatcgccaagaggatggtgaccaagtttggcatgtctgagaagctgggcgtgatgacctacagcgacaccgggaagctgagccctgagacccagagcgccatcgagcaggagatccgcatcctgctgcgggacagctatgagcgggccaagcacatcctgaagacccacgccaaggagcacaagaacctggccgaggccctgctgacctatgagaccctggatgccaaggagatccagatcgtgctggagggcaagaagctggaggtgaggtag

SEQ ID NO: 176273 - DNA, 2223 bp, synthetic construct
  misc_feature 1..2223: note = Description of Artificial Sequence: Synthetic coding sequence
  source 1..2223: mol_type = other DNA
atgttcagcctgagcagcacagtgcagccccaggtgacagtgcccctgagccacctgatcaatgccttccacacccccaagaacacctctgtgtccctgagcggcgtgtctgtgtcccagaaccagcacagagatgtggtgcctgagcacgaggcccccagcagcgagtgcatgttcagtgacttcctgaccaagctgaacatcgtgtccatcggcaagggcaagatctttgagggctaccgctccatgttcatggagcccgccaagaggatgaagaagagcctggacaccacagacaactggcacatccggcctgagcccttcagcctgagcatcccccccagcctgaacctgcgggacctgggcctgtctgagctgaagattggccagattgaccagctggtggagaacctgctgcccggcttctgcaagggcaagaacatcagcagccactggcacaccagccacgtgtctgcccagagcttctttgagaacaagtatggcaacctggacatcttcagcaccctgcggagcagctgcctgtaccgccaccacagccgggccctgcagagcatctgcagcgacctgcagtactggcctgtgttcatccagagccggggcttcaagaccctgaagagcaggacccggcggctgcagagcaccagcgagcggctggccgagacccagaacatcgcccccagctttgtgaagggcttcctgctgcgggaccggggcagtgatgtggagagcctggacaagctgatgaagaccaagaacatccctgaggcccaccaggatgccttcaagacaggctttgctgagggcttcctgaaggcccaggccctgacccagaagaccaatgacagcctgcggaggaccaggctcatcctgtttgtgctgctgctgtttggcatctacggcctgctgaagaaccccttcctgtctgtgcgcttccgcaccaccaccggcctggacagcgctgtggaccctgtgcagatgaagaatgtgacctttgagcacgtgaagggcgtggaggaggccaagcaggagctgcaggaggtggtggagttcctgaagaacccccagaagttcaccatcctgggcggcaagctgcccaagggcatcctgctggtgggccccccaggcaccgggaagaccctgctggcccgggctgtggccggggaggctgatgtgcccttctactatgccagcggcagcgagtttgatgagatgtttgtgggcgtgggcgccagccgcatccggaacctcttccgggaggccaaggccaatgccccctgtgtgatcttcattgatgagctggacagcgtgggcggcaagagaattgagagccccatgcacccctacagccggcagaccatcaaccagctgctggccgagatggatggcttcaagcccaatgaaggagtcatcatcattggagccaccaacttccctgaggccctggacaatgccctgatccggcccggccgctttgacatgcaggtgacagtgcccaggccagatgtgaagggccgcacagagatcctgaagtggtacctgaacaagatcaagtttgaccagagcgtggaccctgagatcatcgcccggggcaccgtgggcttcagcggggctgagctggagaacctggtgaaccaggccgccctgaaggctgctgtggatggcaaggagatggtgaccatgaaggagctggagttcagcaaggacaagatcctgatgggccctgagaggagatctgtggagattgacaacaagaacaagaccatcacagcctaccatgaaagtggccacgccatcatcgcctactacaccaaggatgccatgcccatcaacaaggccaccatcatgccccggggccccaccctgggccacgtgtccctgctgcctgaaaatgaccgctggaatgagacccgggcccagctgctggcccagatggatgtgtccatgggcggccgggtggccgaggagctgatctttggaacagaccacatcaccaccggggccagcagtgactttgacaatgccaccaagatcgccaagaggatggtgaccaagtttggcatgtctgagaagctgggcgtgatgacctacagcgacaccgggaagctgagccctgagacccagagcgccatcgagcaggagatccgcatcctgctgcgggacagctatgagcgggccaagcacatcctgaagacccacagctag

SEQ ID NO: 176274 - DNA, 2052 bp, synthetic construct
  misc_feature 1..2052: note = Description of Artificial Sequence: Synthetic coding sequence
  source 1..2052: mol_type = other DNA
atgttcagcctgagcagcacagtgcagccccaggtgacagtgcccctgagccacctgatcaatgccttccacacccccaagaacacctctgtgtccctgagcggcgtgtctgtgtcccagaaccagcacagagatgtggtgcctgagcacgaggcccccagcagcgagcccagcctgaacctgcgggacctgggcctgtctgagctgaagattggccagattgaccagctggtggagaacctgctgcccggcttctgcaagggcaagaacatcagcagccactggcacaccagccacgtgtctgcccagagcttctttgagaacaagtatgtgttcatccagagccggggcttcaagaccctgaagagcaggacccggcggctgcagagcaccagcgagcggctggccgagacccagaacatcgcccccagctttgtgaagggcttcctgctgcgggaccggggcagtgatgtggagagcctggacaagctgatgaagaccaagaacatccctgaggcccaccaggatgccttcaagacaggctttgctgagggcttcctgaaggcccaggccctgacccagaagaccaatgacagcctgcggaggaccaggctcatcctgtttgtgctgctgctgtttggcatctacggcctgctgaagaaccccttcctgtctgtgcgcttccgcaccaccaccggcctggacagcgctgtggaccctgtgcagatgaagaatgtgacctttgagcacgtgaagggcgtggaggaggccaagcaggagctgcaggaggtggtggagttcctgaagaacccccagaagttcaccatcctgggcggcaagctgcccaagggcatcctgctggtgggccccccaggcaccgggaagaccctgctggcccgggctgtggccggggaggctgatgtgcccttctactatgccagcggcagcgagtttgatgagatgtttgtgggcgtgggcgccagccgcatccggaacctcttccgggaggccaaggccaatgccccctgtgtgatcttcattgatgagctggacagcgtgggcggcaagagaattgagagccccatgcacccctacagccggcagaccatcaaccagctgctggccgagatggatggcttcaagcccaatgaaggagtcatcatcattggagccaccaacttccctgaggccctggacaatgccctgatccggcccggccgctttgacatgcaggtgacagtgcccaggccagatgtgaagggccgcacagagatcctgaagtggtacctgaacaagatcaagtttgaccagagcgtggaccctgagatcatcgcccggggcaccgtgggcttcagcggggctgagctggagaacctggtgaaccaggccgccctgaaggctgctgtggatggcaaggagatggtgaccatgaaggagctggagttcagcaaggacaagatcctgatgggccctgagaggagatctgtggagattgacaacaagaacaagaccatcacagcctaccatgaaagtggccacgccatcatcgcctactacaccaaggatgccatgcccatcaacaaggccaccatcatgccccggggccccaccctgggccacgtgtccctgctgcctgaaaatgaccgctggaatgagacccgggcccagctgctggcccagatggatgtgtccatgggcggccgggtggccgaggagctgatctttggaacagaccacatcaccaccggggccagcagtgactttgacaatgccaccaagatcgccaagaggatggtgaccaagtttggcatgtctgagaagctgggcgtgatgacctacagcgacaccgggaagctgagccctgagacccagagcgccatcgagcaggagatccgcatcctgctgcgggacagctatgagcgggccaagcacatcctgaagacccacgccaaggagcacaagaacctggccgaggccctgctgacctatgagaccctggatgccaaggagatccagatcgtgctggagggcaagaagctggaggtgaggtag

SEQ ID NO: 176275 - DNA, 2151 bp, synthetic construct
  misc_feature 1..2151: note = Description of Artificial Sequence: Synthetic coding sequence
  source 1..2151: mol_type = other DNA
atgttcagcctgagcagcacagtgcagccccaggtgacagtgcccctgagccacctgatcaatgccttccacacccccaagaacacctctgtgtccctgagcggcgtgtctgtgtcccagaaccagcacagagatgtggtgcctgagcacgaggcccccagcagcgagcccagcctgaacctgcgggacctgggcctgtctgagctgaagattggccagattgaccagctggtggagaacctgctgcccggcttctgcaagggcaagaacatcagcagccactggcacaccagccacgtgtctgcccagagcttctttgagaacaagtatggcaacctggacatcttcagcaccctgcggagcagctgcctgtaccgccaccacagccgggccctgcagagcatctgcagcgacctgcagtactggcctgtgttcatccagagccggggcttcaagaccctgaagagcaggacccggcggctgcagagcaccagcgagcggctggccgagacccagaacatcgcccccagctttgtgaagggcttcctgctgcgggaccggggcagtgatgtggagagcctggacaagctgatgaagaccaagaacatccctgaggcccaccaggatgccttcaagacaggctttgctgagggcttcctgaaggcccaggccctgacccagaagaccaatgacagcctgcggaggaccaggctcatcctgtttgtgctgctgctgtttggcatctacggcctgctgaagaaccccttcctgtctgtgcgcttccgcaccaccaccggcctggacagcgctgtggaccctgtgcagatgaagaatgtgacctttgaacatgtgaagggcgtggaggaggccaagcaggagctgcaggaggtggtggagttcctgaagaacccccagaagttcaccatcctgggcggcaagctgcccaagggcatcctgctggtgggccccccaggcaccgggaagaccctgctggcccgggctgtggccggggaggctgatgtgcccttctactatgccagcggcagcgagtttgatgagatgtttgtgggcgtgggcgccagccgcatccggaacctcttccgggaggccaaggccaatgccccctgcgtcatcttcattgatgagctggacagcgtgggcggcaagagaattgagagccccatgcacccctacagccggcagaccatcaaccagctgctggccgagatggatggcttcaagcccaatgaaggagtcatcatcatcggggccaccaacttccctgaggccctggacaatgccctgatccggcccggccgctttgacatgcaggtgacagtgcccaggccagatgtgaagggccgcacagagatcctgaagtggtacctgaacaagatcaagtttgaccagagcgtggaccctgagatcatcgcccggggcaccgtgggcttctctggagctgagctggagaacctggtgaaccaggccgccctgaaggctgctgtggatggcaaggagatggtgaccatgaaggagctggagttcagcaaggacaagatcctgatgggccctgagcggcgctctgtggagattgacaacaagaacaagaccatcacagcctaccacgagagcggccacgccatcatcgcctactacaccaaggatgccatgcccatcaacaaggccaccatcatgccccggggccccaccctgggccacgtgtccctgctgcctgaaaatgaccgctggaatgagacccgggcccagctgctggcccagatggatgtgtccatgggcggccgggtggccgaggagctgatcttcggcacagaccacatcaccactggagccagcagtgactttgacaatgccaccaagatcgccaagaggatggtgaccaagtttggcatgtctgagaagctgggcgtgatgacctacagcgacaccgggaagctgagccctgagacccagagcgccatcgagcaggagatccgcatcctgctgcgggacagctatgaaagagccaagcacatcctgaagacccacgccaaggagcacaagaacctggccgaggccctgctgacctatgagaccctggatgccaaggagatccagatcgtgctggagggcaagaagctggaggtgaggtag

SEQ ID NO: 176276 - DNA, 747 bp, synthetic construct
  misc_feature 1..747: note = Description of Artificial Sequence: Synthetic coding sequence
  source 1..747: mol_type = other DNA
atgtaccaggtgacagtgcccctgagccacctgatcaatgccttccacacccccaagaacacctctgtgtccctgagcggcgtgtctgtgtcccagaaccagcacagagatgtggtgcctgagcacgaggcccccagcagcgagcccagcctgaacctgcgggacctgggcctgtctgagctgaagattggccagattgaccagctggtggagaacctgctgcccggcttctgcaagggcaagaacatcagcagccactggcacaccagccacgtgtctgcccagagcttctttgagaacaagtatggcaacctggacatcttcagcaccctgcggagcagctgcctgtaccgccaccacagccgggccctgcagagcatctgcagcgacctgcagtactggcctgtgttcatccagagccggggcttcaagaccctgaagagcaggacccggcggctgcagagcaccagcgagcggctggccgagacccagaacatcgcccccagctttgtgaagggcttcctgctgcgggaccggggcagtgatgtggagagcctggacaagctgatgaagaccaagaacatccctgaggcccaccaggatgccttcaagacaggctttgctgagggcttcctgaaggcccaggccctgacccagaagaccaatgacagcctgcggaggaccaggctcatcctgtttgtgctgctgctgtttggcatctacggcctgctgaagaaccccttctag

SEQ ID NO: 176277 - DNA, 762 bp, synthetic construct
  misc_feature 1..762: note = Description of Artificial Sequence: Synthetic coding sequence
  source 1..762: mol_type = other DNA
atgttcagcctgagcagcacagtgcagccccaggtgacagtgcccctgagccacctgatcaatgccttccacacccccaagaacacctctgtgtccctgagcggcgtgtctgtgtcccagaaccagcacagagatgtggtgcctgagcacgaggcccccagcagcgagcccagcctgaacctgcgggacctgggcctgtctgagctgaagattggccagattgaccagctggtggagaacctgctgcccggcttctgcaagggcaagaacatcagcagccactggcacaccagccacgtgtctgcccagagcttctttgagaacaagtatgtgttcatccagagccggggcttcaagaccctgaagagcaggacccggcggctgcagagcaccagcgagcggctggccgagacccagaacatcgcccccagctttgtgaagggcttcctgctgcgggaccggggcagtgatgtggagagcctggacaagctgatgaagaccaagaacatccctgaggcccaccaggatgccttcaagacaggctttgctgagggcttcctgaaggcccaggccctgacccagaagaccaatgacagcctgcggaggaccaggctcatcctgtttgtgctgctgctgtttggcatctacggcctgctgaagaaccccttcctgtctgtgcgcttccgcaccaccaccggcctggacagcgctgtggaccctgtgcagatgaagaatgtgacctttgagcacgtgaagggctag

SEQ ID NO: 176278 - DNA, 1551 bp, synthetic construct
  misc_feature 1..1551: note = Description of Artificial Sequence: Synthetic coding sequence
  source 1..1551: mol_type = other DNA
atgaagaccaagaacatccctgaggcccaccaggatgccttcaagacaggctttgctgagggcttcctgaaggcccaggccctgacccagaagaccaatgacagcctgcggaggaccaggctcatcctgtttgtgctgctgctgtttggcatctacggcctgctgaagaaccccttcctgtctgtgcgcttccgcaccaccaccggcctggacagcgctgtggaccctgtgcagatgaagaatgtgacctttgagcacgtgaagggcgtggaggaggccaagcaggagctgcaggaggtggtggagttcctgaagaacccccagaagttcaccatcctgggcggcaagctgcccaagggcatcctgctggtgggccccccaggcaccgggaagaccctgctggcccgggctgtggccggggaggctgatgtgcccttctactatgccagcggcagcgagtttgatgagatgtttgtgggcgtgggcgccagccgcatccggaacctcttccgggaggccaaggccaatgccccctgtgtgatcttcattgatgagctggacagcgtgggcggcaagagaattgagagccccatgcacccctacagccggcagaccatcaaccagctgctggccgagatggatggcttcaagcccaatgaaggagtcatcatcattggagccaccaacttccctgaggccctggacaatgccctgatccggcccggccgctttgacatgcaggtgacagtgcccaggccagatgtgaagggccgcacagagatcctgaagtggtacctgaacaagatcaagtttgaccagagcgtggaccctgagatcatcgcccggggcaccgtgggcttcagcggggctgagctggagaacctggtgaaccaggccgccctgaaggctgctgtggatggcaaggagatggtgaccatgaaggagctggagttcagcaaggacaagatcctgatgggccctgagaggagatctgtggagattgacaacaagaacaagaccatcacagcctaccatgaaagtggccacgccatcatcgcctactacaccaaggatgccatgcccatcaacaaggccaccatcatgccccggggccccaccctgggccacgtgtccctgctgcctgaaaatgaccgctggaatgagacccgggcccagctgctggcccagatggatgtgtccatgggcggccgggtggccgaggagctgatctttggaacagaccacatcaccaccggggccagcagtgactttgacaatgccaccaagatcgccaagaggatggtgaccaagtttggcatgtctgagaagctgggcgtgatgacctacagcgacaccgggaagctgagccctgagacccagagcgccatcgagcaggagatccgcatcctgctgcgggacagctatgagcgggccaagcacatcctgaagacccacgccaaggagcacaagaacctggccgaggccctgctgacctatgagaccatgcccaagcgcttcaagctgttcctgcggggcaagtcctggaagtag

SEQ ID NO: 176279 - DNA, 1047 bp, synthetic construct
  misc_feature 1..1047: note = Description of Artificial Sequence: Synthetic coding sequence
  source 1..1047: mol_type = other DNA
atgtttggacctgccaagggccgccactttggagtgcacccagcccctggcttccctggaggagtgtcccagcaggccgccggcaccaaggccggccctgctggggcctggcctgtgggcagcaggacagacaccatgtggaggctgcgctgcaaggccaaggatggcacccacgtgctgcagggcctgagcagcaggaccagggtgcgggagctgcagggccagattgctgccatcaccggcatcgcccctgggggccagaggatcctggtgggctacccacctgagtgcctggacctgagcaatggagacaccatcctggaggacctgcccatccagagcggggacatgctgatcatcgaggaggaccagacccggcccaggagcagccctgccttcaccaagagaggagccagcagctatgtgcgggagaccctgcctgtgctgaccaggacagtggtgcctgctgacaacagctgcctcttcacctctgtgtactacgtggtggagggcggcgtgctgaacccagcctgtgcccctgagatgagaagactcatcgcccagatcgtggccagtgaccctgacttctacagcgaggccatcctgggcaagaccaaccaggagtactgtgactggatcaagagagatgacacctggggcggggccatcgagatcagcatcctgagcaagttctaccagtgtgagatctgtgtggtggacacccagacagtgagaattgacagatttggagaagatgctggctacaccaagagggtgctgctgatctatgatggcatccactatgaccccctgcagaggaacttcccagaccctgacaccccacccctgaccatcttcagcagcaatgatgacatcgtgctggtgcaggccctggagctggctgatgaggccaggagaagacggcagttcacagatgtgaaccgcttcaccctgcgctgcatggtgtgccagaagggcctgaccggccaggccgaggcccgggagcacgccaaggagaccggccacaccaactttggagaggtgtag

SEQ ID NO: 176280 - DNA, 915 bp, synthetic construct
  misc_feature 1..915: note = Description of Artificial Sequence: Synthetic coding sequence
  source 1..915: mol_type = other DNA
atggagaccctgcacatcatctacagcgaggccaagagcttcaccgtggagggcctgagcagcaggaccagggtgcgggagctgcagggccagattgctgccatcaccggcatcgcccctgggggccagaggatcctggtgggctacccacctgagtgcctggacctgagcaatggagacaccatcctggaggacctgcccatccagagcggggacatgctgatcatcgaggaggaccagacccggcccaggagcagccctgccttcaccaagagaggagccagcagctatgtgcgggagaccctgcctgtgctgaccaggacagtggtgcctgctgacaacagctgcctcttcacctctgtgtactacgtggtggagggcggcgtgctgaacccagcctgtgcccctgagatgagaagactcatcgcccagatcgtggccagtgaccctgacttctacagcgaggccatcctgggcaagaccaaccaggagtactgtgactggatcaagagagatgacacctggggcggggccatcgagatcagcatcctgagcaagttctaccagtgtgagatctgtgtggtggacacccagacagtgagaattgacagatttggagaagatgctggctacaccaagagggtgctgctgatctatgatggcatccactatgaccccctgcagaggaacttcccagaccctgacaccccacccctgaccatcttcagcagcaatgatgacatcgtgctggtgcaggccctggagctggctgatgaggccaggagaagacggcagttcacagatgtgaaccgcttcaccctgcgctgcatggtgtgccagaagggcctgaccggccaggccgaggcccgggagcacgccaaggagaccggccacaccaactttggagaggtgtag

SEQ ID NO: 176281 - DNA, 915 bp, synthetic construct; identical to SEQ ID NO: 176280
  misc_feature 1..915: note = Description of Artificial Sequence: Synthetic coding sequence
  source 1..915: mol_type = other DNA

SEQ ID NO: 176282 - DNA, 840 bp, synthetic construct
  misc_feature 1..840: note = Description of Artificial Sequence: Synthetic coding sequence
  source 1..840: mol_type = other DNA
atgagccctgcccggcgctgccggggcatgagagctgctgtggccgcctctgtgggcctgtctgagggccctgctggcagccgcagcggccgcctcttccggccccccagccctgccccagctgcccctggggcccggctgctgcggctgcccggcagcggggctgtgcaggccgccagccctgagcgggccggctggacagaggccctgcgggctgctgtggccgagctgcgggccggggctgtggtggccgtgcccacagacaccctgtatggcctggcctgtgccgccagctgcagcgctgccctgcgggctgtgtaccgcctgaagggccgctctgaggccaagcccctggccgtgtgcctgggccgggtggctgatgtgtaccgctactgccgggtgcgggtgcctgagggcctgctgaaggacctgctgcccggccctgtgaccctggtgatggagaggtctgaggagctgaacaaggacctgaaccccttcacccccctggtgggcatccgcatcccagaccacgccttcatgcaggacctggcccagatgtttgagggccccctggccctgaccagcgccaacctgagcagccaggccagcagcctgaatgtggaggagttccaggacctgtggccccagctgagcctggtgattgatggcggccagattggagatggccagagcccagaatgtcggctgggcagcacagtggtggacctgtctgtgcctgggaagtttggcatcatccggcccggctgtgccctggagagcaccacagccatcctgcagcagaagtatggcctgctgcccagccacgccagctacctgtag

SEQ ID NO: 176283 - DNA, 1740 bp, synthetic construct
  misc_feature 1..1740: note = Description of Artificial Sequence: Synthetic coding sequence
  source 1..1740: mol_type = other DNA
atgtctgccagcagcctgctggagcagaggcccaagggccagggcaacaaggtgcagaatggatctgtgcaccagaaggatggcctgaatgatgatgactttgagccctacctgagcccccaggcccggcccaacaatgcctacacagccatgtctgacagctacctgcccagctactacagccccagcatcggcttctcctacagcctgggggaggccgcctggagcactggaggagacacagccatgccctacctgaccagctatggccagctgagcaatggagagccccacttcctgcctgatgccatgtttggccagcccggggccctgggcagcacccccttcctgggccagcacggcttcaacttcttccccagcggcatcgacttcagcgcctggggcaacaacagcagccagggccagagcacccagagcagcggctacagcagcaactatgcctatgcccccagcagcctgggcggggccatgattgatggccagagcgcctttgccaatgagaccctgaacaaggcccctggcatgaacaccatcgaccagggcatggccgccctgaagctgggcagcacagaggtggccagcaatgtgcccaaggtggtgggcagcgctgtgggcagcggcagcatcaccagcaacatcgtggccagcaacagcctgcccccagccaccatcgccccacccaagccagcctcctgggccgacatcgccagcaagccagccaagcagcagcccaagctgaagaccaagaatggaattgctggcagcagcctgcccccaccacccatcaagcacaacatggacatcggcacctgggacaacaagggccctgtggccaaggcccccagccaggccctggtgcagaacatcggccagcccacccagggcagcccccagcctgtgggccagcaggccaacaacagcccccctgtggcccaggcctctgtgggccagcagacccagcccctgcccccacctccaccccagcctgcccagctgtctgtgcagcagcaggccgcccagcccacccgctgggtggcccccaggaacagaggcagcggcttcggccacaacggggtggatggaaatggagtgggccagagccaggccggcagcggcagcaccccatctgagccccaccctgtgctggagaagctgcggagcatcaacaactacaaccccaaggactttgactggaacctgaagcacggccgggtcttcatcatcaagagctacagtgaagatgacatccacaggagcatcaagtacaacatctggtgcagcacagaacatggcaacaagaggctggatgctgcctaccgctccatgaatggcaagggccctgtgtacctgctcttctctgtgaatggcagcggccacttctgtggggtggccgagatgaagtctgctgtggactacaacacctgtgccggcgtgtggagccaggacaagtggaagggccgctttgatgtgcgctggatctttgtgaaggatgtgcccaacagccagctgcggcacatccggctggagaacaatgaaaacaagcctgtgaccaacagccgggacacccaggaggtgcccctggagaaggccaagcaggtgctgaagatcatcgccagctacaagcacaccaccagcatctttgatgacttcagccactatgagaagaggcaggaggaggaggagagcgtgaagaaggagcggcagggccggggcaagtag

SEQ ID NO: 176284 - DNA, 1710 bp, synthetic construct
  misc_feature 1..1710: note = Description of Artificial Sequence: Synthetic coding sequence
  source 1..1710: mol_type = other DNA
atgtctgccagcagcctgctggagcagaggcccaagggccagggcaacaaggtgcagaatggatctgtgcaccagaaggatggcctgaatgatgatgactttgagccctacctgagcccccaggcccggcccaacaatgcctacacagccatgtctgacagctacctgcccagctactacagccccagcatcggcttctcctacagcctgggggaggccgcctggagcactggaggagacacagccatgccctacctgaccagctatggccagctgagcaatggagagccccacttcctgcctgatgccatgtttggccagcccggggccctgggcagcacccccttcctgggccagcacggcttcaacttcttccccagcggcatcgacttcagcgcctggggcaacaacagcagccagggccagagcacccagagcagcggctacagcagcaactatgcctatgcccccagcagcctgggcggggccatgattgatggccagagcgcctttgccaatgagaccctgaacaaggcccctggcatgaacaccatcgaccagggcatggccgccctgaagctgggcagcacagaggtggccagcaatgtgcccaaggtggtgggcagcgctgtgggcagcggcagcatcaccagcaacatcgtggccagcaacagcctgcccccagccaccatcgccccacccaagccagcctcctgggccgacatcgccagcaagccagccaagcagcagcccaagctgaagaccaagaatggaattgctggcagcagcctgcccccaccacccatcaagcacaacatggacatcggcacctgggacaacaagggccctgtggccaaggcccccagccaggccctggtgcagaacatcggccagcccacccagggcagcccccagcctgtgggccagcaggccaacaacagcccccctgtggcccaggcctctgtgggccagcagacccagcccctgcccccacctccaccccagcctgcccagctgtctgtgcagcagcaggccgcccagcccacccgctgggtggcccccaggaacagaggcagcggcttcggccacaacggggtggatggaaatggagtgggccagagccaggccggcagcggcagcaccccatctgagccccaccctgtgctggagaagctgcggagcatcaacaactacaaccccaaggactttgactggaacctgaagcacggccgggtcttcatcatcaagagctacagtgaagatgacatccacaggagcatcaagtacaacatctggtgcagcacagaacatggcaacaagaggctggatgctgcctaccgctccatgaatggcaagggccctgtgtacctgctcttctctgtgaatggcagcggccacttctgtggggtggccgagatgaagtctgctgtggactacaacacctgtgccggcgtgtggagccaggacaagtggaagggccgctttgatgtgcgctggatctttgtgaaggatgtgcccaacagccagctgcggcacatccggctggagaacaatgaaaacaagcctgtgaccaacagccgggacacccaggaggtgcccctggagaaggccaagcaggtgctgaagatcatcgccagctacaagcacaccaccagcatctttgatgacttcagccactatgagaagaggcagggccgcaggaagtgctag

SEQ ID NO: 176285 - DNA, 1590 bp, synthetic construct
  misc_feature 1..1590: note = Description of Artificial Sequence: Synthetic coding sequence
  source 1..1590: mol_type = other DNA
atgtctgacagctacctgcccagctactacagccccagcatcggcttctcctacagcctgggggaggccgcctggagcactggaggagacacagccatgccctacctgaccagctatggccagctgagcaatggagagccccacttcctgcctgatgccatgtttggccagcccggggccctgggcagcacccccttcctgggccagcacggcttcaacttcttccccagcggcatcgacttcagcgcctggggcaacaacagcagccagggccagagcacccagagcagcggctacagcagcaactatgcctatgcccccagcagcctgggcggggccatgattgatggccagagcgcctttgccaatgagaccctgaacaaggcccctggcatgaacaccatcgaccagggcatggccgccctgaagctgggcagcacagaggtggccagcaatgtgcccaaggtggtgggcagcgctgtgggcagcggcagcatcaccagcaacatcgtggccagcaacagcctgcccccagccaccatcgccccacccaagccagcctcctgggccgacatcgccagcaagccagccaagcagcagcccaagctgaagaccaagaatggaattgctggcagcagcctgcccccaccacccatcaagcacaacatggacatcggcacctgggacaacaagggccctgtggccaaggcccccagccaggccctggtgcagaacatcggccagcccacccagggcagcccccagcctgtgggccagcaggccaacaacagcccccctgtggcccaggcctctgtgggccagcagacccagcccctgcccccacctccaccccagcctgcccagctgtctgtgcagcagcaggccgcccagcccacccgctgggtggcccccaggaacagaggcagcggcttcggccacaacggggtggatggaaatggagtgggccagagccaggccggcagcggcagcaccccatctgagccccaccctgtgctggagaagctgcggagcatcaacaactacaaccccaaggactttgactggaacctgaagcacggccgggtcttcatcatcaagagctacagtgaagatgacatccacaggagcatcaagtacaacatctggtgcagcacagaacatggcaacaagaggctggatgctgcctaccgctccatgaatggcaagggccctgtgtacctgctcttctctgtgaatggcagcggccacttctgtggggtggccgagatgaagtctgctgtggactacaacacctgtgccggcgtgtggagccaggacaagtggaagggccgctttgatgtgcgctggatctttgtgaaggatgtgcccaacagccagctgcggcacatccggctggagaacaatgaaaacaagcctgtgaccaacagccgggacacccaggaggtgcccctggagaaggccaagcaggtgctgaagatcatcgccagctacaagcacaccaccagcatctttgatgacttcagccactatgagaagaggcaggaggaggaggagagcgtgaagaaggagcggcagggccggggcaagtag

SEQ ID NO: 176286 - DNA, 1740 bp, synthetic construct; identical to SEQ ID NO: 176283
  misc_feature 1..1740: note = Description of Artificial Sequence: Synthetic coding sequence
  source 1..1740: mol_type = other DNA

SEQ ID NO: 176287 - DNA, 1245 bp, synthetic construct
  misc_feature 1..1245: note = Description of Artificial Sequence: Synthetic coding sequence
  source 1..1245: mol_type = other DNA
atggccagcggggacaccctgtacatcgccacagatggcagcgagatgcctgctgagatcgtggagctgcacgagattgaggtggagaccatccctgtggagaccatcgagaccaccgtggtgggggaggaggaggaggaggatgatgatgatgaagatggcggcggcggggaccatggaggcggcggcggccacggccacgccggccaccaccaccaccaccaccaccaccaccaccacccccccatgattgccctgcagcccctggtgacagatgaccccacccaggtgcaccaccaccaggaggtgatcctggtgcagacccgggaggaggtggtgggcggagatgacagtgatggcctgcgggcagaagatggctttgaggaccagatcctgatccctgtgcctgccccagctggaggagatgatgactacatcgagcagaccctggtgacagtggccgccgccggcaagagcggcggcggcggcagcagcagcagcggcggcggccgggtgaagaagggcggcggcaagaagagcggcaagaagagctacctgtctggaggagctggagctgctgggggcggcggcgctgaccccggcaacaagaagtgggagcagaagcaggtgcagatcaagaccctggagggggagttctctgtgaccatgtggagcagtgatgagaagaaggacatcgaccacgagaccgtggtggaggagcagatcattggagagaacagccccccagactacagcgagtacatgaccgggaagaagctgcccccaggcggcatccctggcatcgacctgagtgaccccaagcagctggccgagtttgccaggatgaagcccaggaagatcaaggaggatgatgcccccaggaccatcgcctgcccccacaagggctgcaccaagatgttccgggacaacagcgccatgaggaagcacctgcacacccacggcccccgggtgcacgtgtgtgctgaatgtgggaaggcctttgtggagagcagcaagctgaagaggcaccagctggtgcacactggagagaagcccttccagtgcacctttgagggctgtgggaagcgcttcagcctggacttcaacctgcggacccacgtgcgcatccacactggagaccggccctacgtgtgcccctttgatggctgcaacaagaagtttgcccagagcaccaacctgaagagccacatcctgacccacgccaaggccaagaacaaccagtag

SEQ ID NO: 176288 - DNA, 105 bp, synthetic construct
  misc_feature 1..105: note = Description of Artificial Sequence: Synthetic coding sequence
  source 1..105: mol_type = other DNA
atggccagcggggacaccctgtacatcgccacagatggcagcgagatgcctgctgagatcgtggagctgcacgagattgaggtggagaccatccctgtggagtag

SEQ ID NO: 176289 - DNA, 1221 bp, synthetic construct
  misc_feature 1..1221: note = Description of Artificial Sequence: Synthetic coding sequence
  source 1..1221: mol_type = other DNA
atggcccaggccccagctgaccccggccgggagggccacctggagcagaggatcctgcaggtgctgacagaagctggcagccctgtgaagctggcccagctggtgaaggagtgccaggcccccaagcgggagctgaaccaggtgctgtacaggatgaagaaggagctgaaggtgtccctgaccagccctgccacctggtgcctgggcggcacagatcctgagggggagggccctgctgagctggccctgagcagccctgaggaggacatctaccgcttcctgaaggacaatggcccccagagggccctggtgattgcccaggccctgggcatgaggacagccaaggatgtgaacagagacctgtacaggatgaagagccgccacctgctggacatggatgagcagagcaaggcctggaccatctacagaccagaagattctggaagaagagccaagagcgccagcatcatctaccagcacaaccccatcaacatgatctgccagaatggccccaacagctggatcagcatcgccaacagcgaggccatccagattggacatggcaacatcatcacccggcagacagtgtccagagaagatggcagcgctggccccaggcacctgcccagcatggcccctggggacagcagcacctggggcaccctggtggacccctggggcccccaggacatccacatggagcagagcatcctgcggcgggtgcagctgggccacagcaatgagatgaggctgcacggcgtgcccagcgagggccctgcccacatccccccaggcagcccccctgtgtctgccacagctgctggccctgaggccagctttgaggcccgcatccccagccctggcacccaccctgagggggaggccgcccagaggatccacatgaagagctgcttcctggaggatgccaccatcggcaacagcaacaagatgagcatcagccctggggtggccggccctgggggcgtggccggcagcggggagggggagcctggagaagatgctggaagaagacctgctgacacccagagccgcagccacttcccccgggacatcggccagcccatcacccccagccacagcaagctgacccccaagctggagaccatgaccctgggcaacagaagccacaaggctgctgagggcagccactacgtggatgaggccagccatgagggctcctggtggggcggcggcatctag

SEQ ID NO: 176290 - DNA, 1341 bp, synthetic construct
  misc_feature 1..1341: note = Description of Artificial Sequence: Synthetic coding sequence
  source 1..1341: mol_type = other DNA
atggcccaggccccagctgaccccggccgggagggccacctggagcagaggatcctgcaggtgctgacagaagctggcagccctgtgaagctggcccagctggtgaaggagtgccaggcccccaagcgggagctgaaccaggtgctgtacaggatgaagaaggagctgaaggtgtccctgaccagccctgccacctggtgcctgggcggcacagatcctgagggggagggccctgctgagctggccctgagcagccctgctgagcggccccagcagcacgccgccaccatccctgagaccccaggcccccagttcagccagcagcgggaggaggacatctaccgcttcctgaaggacaatggcccccagagggccctggtgattgcccaggccctgggcatgaggacagccaaggatgtgaacagagacctgtacaggatgaagagccgccacctgctggacatggatgagcagagcaaggcctggaccatctacagacctgaggacagcggccggcgggccaagagcgccagcatcatctaccagcacaaccccatcaacatgatctgccagaatggccccaacagctggatcagcatcgccaacagcgaggccatccagatcggccacggcaacatcatcacccggcagacagtgtcccgggaggatggcagcgctggccccaggcacctgcccagcatggcccctggggacagcagcacctggggcaccctggtggacccctggggcccccaggacatccacatggagcagagcatcctgcggcgggtgcagctgggccacagcaatgagatgaggctgcatggagtgcccagcgagggccctgcccacatccccccaggcagcccccctgtgtctgccacagctgctggccctgaggccagctttgaggcccgcatccccagccctggcacccaccctgagggggaggccgcccagaggatccacatgaagagctgcttcctggaggatgccaccatcggcaacagcaacaagatgagcatcagccctggggtggccggccctggaggagtggccggcagcggggagggggagcccggggaggatgctgtggccgccttcacagaggtgctgaaccccagcaagagcttcatgaagtttggcatcaacttcttccagacccctgtgaatgtggacagcctgaccagcagccatgagagccagatgttcctgacagcctgccgcctggtgatcttcagccgccgcttcagcacctactttgcccagatccacctgaggaaccacagcgtgctgcacctgtgcccccacaagatctacctgctgaagaacaagaagtag

SEQ ID NO: 176291 - DNA, 1143 bp, synthetic construct
  misc_feature 1..1143: note = Description of Artificial Sequence: Synthetic coding sequence
  source 1..1143: mol_type = other DNA
atggcccaggccccagctgaccccggccgggagggccacctggagcagaggatcctgcaggtgctgacagaagctggcagccctgtgaagctggcccagctggtgaaggagtgccaggcccccaagcgggagctgaaccaggtgctgtacaggatgaagaaggagctgaaggtgtccctgaccagccctgccacctggtgcctgggcggcacagatcctgagggggagggccctgctgagctggccctgagcagccctgctgagcggccccagcagcacgccgccaccatccctgagaccccaggcccccagttcagccagcagcgggaggaggacatctaccgcttcctgaaggacaatggcccccagagggccctggtgattgcccaggccctgggcatgaggacagccaaggatgtgaacagagacctgtacaggatgaagagccgccacctgctggacatggatgagcagagcaaggcctggaccatctacagacctgaggacagcggccggcgggccaagagcgccagcatcatctaccagcacaaccccatcaacatgatctgccagaatggccccaacagctggatcagcatcgccaacagcgaggccatccagatcggccacggcaacatcatcacccggcagacagtgtcccgggaggatggcagcgctggccccaggcacctgcccagcatggcccctggggacagcagcacctggggcaccctggtggacccctggggcccccaggacatccacatggagcagagcatcctgcggcgggtgcagctgggccacagcaatgagatgaggctgcatggagtgcccagcgagggccctgcccacatccccccaggcagcccccctgtgtctgccacagctgctggccctgaggccagctttgaggcccgcatccccagccctggcacccaccctgagggggaggccgcccagaggatccacatgaagagctgcttcctggaggatgccaccatcggcaacagcaacaagatgagcatcagccctggggtggccggccctggaggagtggccggcagcggggagggggagcccggggaggatgctggccggcggcctgctgacacccaggcccggagctttgatggccaggagtag

SEQ ID NO: 176292 - DNA, 1290 bp, synthetic construct
  misc_feature 1..1290: note = Description of Artificial Sequence: Synthetic coding sequence
  source 1..1290: mol_type = other DNA
atggcccaggccccagctgaccccggccgggagggccacctggagcagaggatcctgcaggtgctgacagaagctggcagccctgtgaagctggcccagctggtgaaggagtgccaggcccccaagcgggagctgaaccaggtgctgtacaggatgaagaaggagctgaaggtgtccctgaccagccctgccacctggtgcctgggcggcacagatcctgagggggagggccctgctgagctggccctgagcagccctgctgagcggccccagcagcacgccgccaccatccctgagaccccaggcccccagttcagccagcagcgggaggaggacatctaccgcttcctgaaggacaatggcccccagagggccctggtgattgcccaggccctgggcatgaggacagccaaggatgtgaacagagacctgtacaggatgaagagccgccacctgctggacatggatgagcagagcaaggcctggaccatctacagacctgaggacagcggccggcgggccaagagcgccagcatcatctaccagcacaaccccatcaacatgatctgccagaatggccccaacagctggatcagcatcgccaacagcgaggccatccagatcggccacggcaacatcatcacccggcagacagtgtcccgggaggatggcagcgctggccccaggcacctgcccagcatggcccctggggacagcagcacctggggcaccctggtggacccctggggcccccaggacatccacatggagcagagcatcctgcggcgggtgcagctgggccacagcaatgagatgaggctgcatggagtgcccagcgagggccctgcccacatccccccaggcagcccccctgtgtctgccacagctgctggccctgaggccagctttgaggcccgcatccccagccctggcacccaccctgagggggaggccgcccagaggatccacatgaagagctgcttcctggaggatgccaccatcggcaacagcaacaagatgagcatcagccctggggtggccggccctggaggagtggccggcagcggggagggggagcccggggaggatgctggccggcggcctgctgacacccagagccgcagccacttcccccgggacatcggccagcccatcacccccagccacagcaagctgacccccaagctggagaccatgaccctgggcaacagaagccacaaggctgctgagggcagccactacgtggatgaggccagccatgagggctcctggtggggcggcggcatctag

SEQ ID NO: 176293 - DNA, 747 bp, synthetic construct
  misc_feature 1..747: note = Description of Artificial Sequence: Synthetic coding sequence
  source 1..747: mol_type = other DNA
atggcccaggccccagctgaccccggccgggagggccacctggagcagaggatcctgcaggtgctgacagaagctggcagccctgtgaagctggcccagctggtgaaggagtgccaggcccccaagcgggagctgaaccaggtgctgtacaggatgaagaaggagctgaaggtgtccctgaccagccctgccacctggtgcctgggcggcacagatcctgagggggagggccctgctgagctggccctgagcagccctgctgagcggccccagcagcacgccgccaccatccctgagaccccaggcccccagttcagccagcagcgggaggaggacatctaccgcttcctgaaggacaatggcccccagagggccctggtgattgcccaggccctgggcatgaggacagccaaggatgtgaacagagacctgtacaggatgaagagccgccacctgctggacatggatgagcagagcaaggcctggaccatctacagacctgaggacagcggccggcgggccaagagcgccagcatcatctaccagcacaaccccatcaacatgatctgccagaatggccccaacagctggatcagcatcgccaacagcgaggccatccagatcggccacggcaacatcatcacccggcagacagtgtcccgggaggatggcaagagccccaagagggcccagggcggggacctgggcggggagcccccagaccccctgggcggcggcaaaggatag

SEQ ID NO: 176294 - DNA, 1065 bp, synthetic construct
  misc_feature 1..1065: note = Description of Artificial Sequence: Synthetic coding sequence
  source 1..1065: mol_type = other DNA
atggcccaggccccagctgaccccggccgggaggccgagcggccccagcagcacgccgccaccatccctgagaccccaggcccccagttcagccagcagcgggaggaggacatctaccgcttcctgaaggacaatggcccccagagggccctggtgattgcccaggccctgggcatgaggacagccaaggatgtgaacagagacctgtacaggatgaagagccgccacctgctggacatggatgagcagagcaaggcctggaccatctacagaccagaagattctggaagaagagccaagagcgccagcatcatctaccagcacaaccccatcaacatgatctgccagaatggccccaacagctggatcagcatcgccaacagcgaggccatccagattggacatggcaacatcatcacccggcagacagtgtccagagaagatggcagcgctggccccaggcacctgcccagcatggcccctggggacagcagcacctggggcaccctggtggacccctggggcccccaggacatccacatggagcagagcatcctgcggcgggtgcagctgggccacagcaatgagatgaggctgcacggcgtgcccagcgagggccctgcccacatccccccaggcagcccccctgtgtctgccacagctgctggccctgaggccagctttgaggcccgcatccccagccctggcacccaccctgagggggaggccgcccagaggatccacatgaagagctgcttcctggaggatgccaccatcggcaacagcaacaagatgagcatcagccctggggtggccggccctgggggcgtggccggcagcggggagggggagcctggagaagatgctggaagaagacctgctgacacccagagccgcagccacttcccccgggacatcggccagcccatcacccccagccacagcaagctgacccccaagctggagaccatgaccctgggcaacagaagccacaaggctgctgagggcagccactacgtggatgaggccagccatgagggctcctggtggggcggcggcatctag

SEQ ID NO: 176295 - DNA, 1860 bp, synthetic construct
  misc_feature 1..1860: note = Description of Artificial Sequence: Synthetic coding sequence
  source 1..1860: mol_type = other DNA
atgccagaccctgctgcccacctgcccttcttctacggcagcatcagcagagctgaggccgaggagcacctgaagctggccggcatggctgatggcctcttcctgctgcggcagtgcctgcggagcctgggcggctacgtgctgagcctggtgcatgatgtgcgcttccaccacttccccatcgagcggcagctgaatggcacctacgccatcgccggcggcaaggcccactgcggccctgctgagctgtgtgagttctacagccgggaccctgatggcctgccctgcaacctgaggaagccctgcaaccggcccagcggcctggagccccagcccggggtgtttgactgcctgagagatgccatggtgcgggactatgtgcggcagacctggaagctggagggggaggccctggagcaggccatcatcagccaggccccccaggtggagaagctgattgccaccacagcccacgagaggatgccctggtaccacagcagcctgacccgggaggaggccgagaggaagctgtacagcggggcccagacagatggcaagttcctgctgcggcccaggaaggagcagggcacctacgccctgagcctcatctacggcaagacagtgtaccactacctgatcagccaggacaaggccggcaagtactgcatccctgagggcaccaagtttgacaccctgtggcagctggtggagtacctgaagctgaaggcagatggcctcatctactgcctgaaggaggcctgccccaacagcagcgccagcaatgccagcggggccgccgcccccaccctgcctgcccaccccagcaccctgacccacccccagaggagaattgacaccctgaacagtgatggctacaccccagagcccgcccgcatcaccagcccagacaagccccggcccatgcccatggacacctctgtgtatgagagcccctacagcgaccctgaggagctgaaggacaagaagctgttcctgaagagggacaacctgctgattgctgacatcgagctgggctgcggcaactttggatctgtgcggcagggcgtgtacaggatgaggaagaagcagattgatgtggccatcaaggtgctgaagcagggcacagagaaggctgacacagaggagatgatgagggaggcccagatcatgcaccagctggacaacccctacatcgtgcggctcatcggcgtgtgccaggccgaggccctgatgctggtgatggagatggccggcggcggccccctgcacaagttcctggtgggcaagcgggaggagatccctgtgtccaatgtggccgagctgctgcaccaggtgtccatgggcatgaagtacctggaggagaagaactttgtgcaccgggacctggccgccagaaatgtgctgctggtgaacagacactacgccaagatcagtgactttggcctgagcaaggccctgggcgcagatgacagctactacacagcccggtctgctgggaagtggcccctgaagtggtacgcccctgagtgcatcaacttcaggaagttcagcagcagaagtgatgtgtggagctatggagtgaccatgtgggaggccctgtcctatggccagaagccctacaagaagatgaagggccctgaggtgatggccttcatcgagcagggcaagaggatggagtgccccccagaatgtcctcctgagctgtatgccctgatgtctgactgctggatctacaagtgggaggacagaccagacttcctgactgtggagcagaggatgagggcctgctactacagcctggccagcaaggtggagggccccccaggcagcacccagaaggccgaggccgcctgtgcctag

SEQ ID NO: 176296 - DNA, 1482 bp, synthetic construct
  misc_feature 1..1482: note = Description of Artificial Sequence: Synthetic coding sequence
  source 1..1482: mol_type = other DNA
atgaggctgggcccccgctggaagggggaggccctggagcaggccatcatcagccaggccccccaggtggagaagctgattgccaccacagcccacgagaggatgccctggtaccacagcagcctgacccgggaggaggccgagaggaagctgtacagcggggcccagacagatggcaagttcctgctgcggcccaggaaggagcagggcacctacgccctgagcctcatctacggcaagacagtgtaccactacctgatcagccaggacaaggccggcaagtactgcatccctgagggcaccaagtttgacaccctgtggcagctggtggagtacctgaagctgaaggcagatggcctcatctactgcctgaaggaggcctgccccaacagcagcgccagcaatgccagcggggccgccgcccccaccctgcctgcccaccccagcaccctgacccacccccagaggagaattgacaccctgaacagtgatggctacaccccagagcccgcccgcatcaccagcccagacaagccccggcccatgcccatggacacctctgtgtatgagagcccctacagcgaccctgaggagctgaaggacaagaagctgttcctgaagagggacaacctgctgattgctgacatcgagctgggctgcggcaactttggatctgtgcggcagggcgtgtacaggatgaggaagaagcagattgatgtggccatcaaggtgctgaagcagggcacagagaaggctgacacagaggagatgatgagggaggcccagatcatgcaccagctggacaacccctacatcgtgcggctcatcggcgtgtgccaggccgaggccctgatgctggtgatggagatggccggcggcggccccctgcacaagttcctggtgggcaagcgggaggagatccctgtgtccaatgtggccgagctgctgcaccaggtgtccatgggcatgaagtacctggaggagaagaactttgtgcaccgggacctggccgccagaaatgtgctgctggtgaacagacactacgccaagatcagtgactttggcctgagcaaggccctgggcgcagatgacagctactacacagcccggtctgctgggaagtggcccctgaagtggtacgcccctgagtgcatcaacttcaggaagttcagcagcagaagtgatgtgtggagctatggagtgaccatgtgggaggccctgtcctatggccagaagccctacaagaagatgaagggccctgaggtgatggccttcatcgagcagggcaagaggatggagtgccccccagaatgtcctcctgagctgtatgccctgatgtctgactgctggatctacaagtgggaggacagaccagacttcctgactgtggagcagaggatgagggcctgctactacagcctggccagcaaggtggagggccccccaggcagcacccagaaggccgaggccgcctgtgcctag

SEQ ID NO: 176297 - DNA, 939 bp, synthetic construct
  misc_feature 1..939: note = Description of Artificial Sequence: Synthetic coding sequence
  source 1..939: mol_type = other DNA
atgcccatggacacctctgtgtatgagagcccctacagcgaccctgaggagctgaaggacaagaagctgttcctgaagagggacaacctgctgattgctgacatcgagctgggctgcggcaactttggatctgtgcggcagggcgtgtacaggatgaggaagaagcagattgatgtggccatcaaggtgctgaagcagggcacagagaaggctgacacagaggagatgatgagggaggcccagatcatgcaccagctggacaacccctacatcgtgcggctgattggagtgtgccaggccgaggccctgatgctggtgatggagatggccggcggcggccccctgcacaagttcctggtgggcaagcgggaggagatccctgtgtccaatgtggccgagctgctgcaccaggtgtccatgggcatgaagtacctggaggagaagaactttgtgcaccgggacctggccgccagaaatgtgctgctggtgaacagacactacgccaagatcagtgactttggcctgagcaaggccctgggcgcagatgacagctactacacagcccggtctgctgggaagtggcccctgaagtggtacgcccctgagtgcatcaacttcaggaagttcagcagcagaagtgatgtgtggagctatggagtgaccatgtgggaggccctgtcctatggccagaagccctacaagaagatgaagggccctgaggtgatggccttcatcgagcagggcaagaggatggagtgccccccagagtgccccccagagctgtatgccctgatgtctgactgctggatctacaagtgggaggacagaccagacttcctgactgtggagcagaggatgagggcctgctactacagcctggccagcaaggtggagggccccccaggcagcacccagaaggccgaggccgcctgtgcctag

SEQ ID NO: 176298 - DNA, 1344 bp, synthetic construct
  misc_feature 1..1344: note = Description of Artificial Sequence: Synthetic coding sequence
  source 1..1344: mol_type = other DNA
atgctgctggatgctggcccccagtacccagccatcggcgtgaccacctttggagccagccgccaccacagcgctggagatgtggccgagagagatgtgggcctgggcatcaacccctttgctgatggcatgggcgccttcaagctgaaccccagcagccatgagctggccagcgctggccagacagccttcaccagccaggcccctggctacgccgctgctgctgccctgggccaccaccaccaccctggccacgtgggcagctacagcagcgctgccttcaacagcacccgggacttcctgttcaggaacagaggatttggagatgctgctgctgctgccagcgcccagcacagcctgtttgctgccagcgctgggggctttggaggcccccacggccacacagatgctgctggccacctgctcttccctggcctgcacgagcaggccgccggccacgccagccccaacgtggtgaatggccagatgaggctgggcttcagcggggacatgtaccccaggcctgagcagtatggccaggtgaccagccccaggtctgagcactacgccgccccccagctgcacggctacggccccatgaatgtgaacatggccgcccaccacggggccggggccttcttccgctacatgaggcagcccatcaagcaggagctgatctgcaagtggattgagcctgagcagctggccaaccccaagaagagctgcaacaagaccttcagcaccatgcatgagctggtgacccacgtgacagtggagcacgtgggcggccctgagcagagcaaccacatctgcttctgggaggagtgcccccgggagggcaagcccttcaaggccaagtacaagctggtgaaccacatccgggtgcacactggagagaagcccttcccctgccccttccctggctgcggcaaggtgtttgcccggtctgagaacctgaagatccacaagaggacccacactggagagaagcccttcaagtgtgaatttgagggctgtgacagaagatttgccaacagcagtgacaggaagaagcacatgcacgtgcacaccagtgacaagccctacctgtgcaagatgtgtgacaagagctacacccaccccagcagcctgaggaagcacatgaaggtgcatgagagcagcagccagggcagccagcccagccctgctgccagcagcggctatgagagcagcaccccacccaccatcgtgagccccagcacagacaaccccaccaccagcagcctgagccccagcagcagcgctgtgcaccacacagctggccacagcgccctgagcagcaacttcaatgagtggtacgtgtag

SEQ ID NO: 176299 - DNA, 1599 bp, synthetic construct
  misc_feature 1..1599: note = Description of Artificial Sequence: Synthetic coding sequence
  source 1..1599: mol_type = other DNA
atgctgctggatgctggcccccagtttcctgccatcggcgtgggcagctttgcccggcaccaccaccacagcgctgctgctgctgctgctgctgctgctgagatgcaggaccgggagctgagcctggccgccgcccagaatggatttgtggacagcgctgctgcccacatgggcgccttcaagctgaaccctggggcccacgagctgagccctggccagagcagcgccttcaccagccagggccctggggcctacccaggcagcgctgctgctgctgctgctgctgctgccctgggcccccacgccgcccacgtgggcagctacagcggcccccccttcaacagcacccgggacttcctgttccgcagccggggctttggagacagcgcccctgggggcggccagcacggcctgtttggacctggagctgggggcctgcaccacgcccacagtgatgcccagggccacctgctcttccctggcctgcctgagcagcacggcccccacggcagccagaatgtgctgaatggccagatgaggctgggcctgcccggggaggtgtttggccgctctgagcagtaccggcaggtggccagccccaggacagacccctacagcgctgcccagctgcacaaccagtatggccccatgaacatgaacatgggcatgaacatggctgctgctgctgcccaccaccaccaccaccaccaccaccaccctggggccttcttccgctacatgaggcagcagtgcatcaagcaggagctgatctgcaagtggattgatcctgagcagctgagcaaccccaagaagagctgcaacaagaccttcagcaccatgcatgagctggtgacccacgtgtctgtggagcacgtgggcggccctgagcagagcaaccacgtgtgcttctgggaggagtgcccccgggagggcaagcccttcaaggccaagtacaagctggtgaaccacatccgggtgcacactggagagaagcccttcccctgccccttccctggctgtgggaaggtgtttgcccggtctgagaacctgaagatccacaagaggacccacactggagagaagcccttccagtgtgaatttgagggctgtgacagaagatttgccaacagcagtgacaggaagaagcacatgcacgtgcacaccagtgacaagccctacctgtgcaagatgtgtgacaagagctacacccaccccagcagcctgaggaagcacatgaaggtgcatgagagcagcccccagggcagcgagagcagccctgctgccagcagcggctatgagagcagcaccccacctggcctggtgagccccagcgctgagccccagagcagcagcaacctgagccctgctgctgctgctgctgctgctgctgctgctgctgctgctgctgctgtgtctgctgtgcacagaggaggcggcagcggcagcggcggggccggcggcggcagcggcggcggcagcggcagcggcggcggcggcggcggggccggcggcggcggcggcggcagcagcggcggcggcagcggcacagctgggggccacagcggcctgagcagcaacttcaatgagtggtacgtgtag

SEQ ID NO: 176300 - DNA, 489 bp, synthetic construct
  misc_feature 1..489: note = Description of Artificial Sequence: Synthetic coding sequence
  source 1..489: mol_type = other DNA
cctcctcctcctcctcctcctccagcccctcctcctcctccacccctgaaccccaagaagagctgcaacaagaccttcagcaccatgcatgagctggtgacccacgtgtctgtggagcacgtgggcggccctgagcagagcaaccacgtgtgcttctgggaggagtgcccccgggagggcaagcccttcaaggccaagtacaagctggtgaaccacatccgggtgcacactggagagaagcccttcccctgccccttccctggctgcggcaaggtgtttgcccggtctgagaacctgaagatccacaagaggacccacactggagagaagcccttccagtgtgaatttgagggctgtgacagaagatttgccaacagcagtgacaggaagaagcacatgcacgtgcacaccagtgacaagccctacctgtgcaagatgtgtgacaagagctacacccaccccagcagcctgaggaagcacatgaagtag

SEQ ID NO: 176301 - DNA, 783 bp, synthetic construct
  misc_feature 1..783: note = Description of Artificial Sequence: Synthetic coding sequence
  source 1..783: mol_type = other DNA
atgctgctggatgctggcccccagtttcctgccatcggcgtgggcagctttgcccggcaccaccaccacagcgctgctgctgctgctgctgctgctgctgagatgcaggaccgggagctgagcctggccgccgcccagaatggatttgtggacagcgctgctgcccacatgggcgccttcaagctgaaccctggggcccacgagctgagccctggccagagcagcgccttcaccagccagggccctggggcctacccaggcagcgctgctgctgctgctgctgctgctgccctgggcccccacgccgcccacgtgggcagctacagcggcccccccttcaacagcacccgggacttcctgttccgcagccggggctttggagacagcgcccctgggggcggccagcacggcctgtttggacctggagctgggggcctgcaccacgcccacagtgatgcccagggccacctgctcttccctggcctgcctgagcagcacggcccccacggcagccagaatgtgctgaatggccagatgaggctgggcctgcccggggaggtgtttggccgctctgagcagtaccggcaggtggccagccccaggacagacccctacagcgctgcccagctgcacaaccagtatggccccatgaacatgaacatgggcatgaacatggctgctgctgctgcccaccaccaccaccaccaccaccaccctgtgcccagcctgctgaccaactgtgtgcacagcggcctgctgctgagccccccacgctggttctag

SEQ ID NO: 176302 - DNA, 1404 bp, synthetic construct
  misc_feature 1..1404: note = Description of Artificial Sequence: Synthetic coding sequence
  source 1..1404: mol_type = other DNA
atgaccatgctgctggatggcggcccccagtttcctggcctgggcgtgggcagctttggagcccccaggcaccacgagatgcccaaccgggagcctgctggcatgggcctgaacccctttggagacagcacccacgccgctgctgctgctgctgctgctgctgccttcaagctgagccctgctgctgcccatgacctgagcagcggccagagcagcgccttcaccccccagggcagcggctacgccaatgccctgggccaccaccaccaccaccaccaccaccaccaccacaccagccaggtgcccagctatggaggagctgccagcgctgccttcaacagcacccgggagttcctgttccggcagaggagcagcggcctgtctgaggccgccagcggcggcggccagcacggcctgtttgctggcagcgccagcagcctgcacgccccagctggcatccctgagccccccagctacctgctcttccctggcctgcacgagcagggcgccggccaccccagccccaccggccacgtggacaacaaccaggtgcacctgggcctgcggggggagctgtttggccgggctgacccctacagacctgtggccagccccaggacagacccctatgctgctggggcccagttccccaactacagccccatgaacatgaacatgggcgtgaatgtggccgcccaccacggccctggggccttcttccgctacatgaggcagcccatcaagcaggagctgagctgcaagtggattgatgaggcccagctgagccggcccaagaagagctgtgacaggaccttcagcaccatgcatgagctggtgacccacgtgaccatggagcacgtgggcggccctgagcagaacaaccacgtgtgctactgggaggagtgcccccgggagggcaagagcttcaaggccaagtacaagctggtgaaccacatccgggtgcacactggagagaagcccttcccctgccccttccctggctgcggcaagatctttgcccggtctgagaacctgaagatccacaagaggacccacactggagagaagcccttcaagtgtgaatttgagggctgtgacagaagatttgccaacagcagtgacaggaagaagcacatgcacgtgcacaccagtgacaagccctacatctgcaaggtgtgtgacaagagctacacccaccccagcagcctgaggaagcacatgaaggtgcatgagagccagggcagtgacagcagccctgctgccagcagcggctatgagagcagcaccccaccagccatcgccagcgccaacagcaaggacaccaccaagacccccagcgctgtgcagaccagcaccagccacaaccctggcctgccccccaacttcaatgagtggtacgtgtag

SEQ ID NO: 176303 - DNA, 1374 bp, synthetic construct
  misc_feature 1..1374: note = Description of Artificial Sequence: Synthetic coding sequence
  source 1..1374: mol_type = other DNA
atgaccatgctgctggatggcggcccccagtttcctggcctgggcgtgggcagctttggagcccccaggcaccacgagatgcccaaccgggagcctgctggcatgggcctgaacccctttggagacagcacccacgccgctgctgctgctgctgctgctgctgccttcaagctgagccctgctgctgcccatgacctgagcagcggccagagcagcgccttcaccccccagggcagcggctacgccaatgccctgggccaccaccaccaccaccaccaccaccaccaccacaccagccaggtgcccagctatggaggagctgccagcgctgccttcaacagcacccgggagttcctgttccggcagaggagcagcggcctgtctgaggccgccagcggcggcggccagcacggcctgtttgctggcagcgccagcagcctgcacgccccagctggcatccctgagccccccagctacctgctcttccctggcctgcacgagcagggcgccggccaccccagccccaccggccacgtggacaacaaccaggtgcacctgggcctgcggggggagctgtttggccgggctgacccctacagacctgtggccagccccaggacagacccctatgctgctggggcccagttccccaactacagccccatgaacatgaacatgggcgtgaatgtggccgcccaccacggccctggggccttcttccgctacatgaggcagcccatcaagcaggagctgagctgcaagtggattgatgaggcccagctgagccggcccaagaagagctgtgacaggaccttcagcaccatgcatgagctggtgacccacgtgaccatggagcacgtgggcggccctgagcagaacaaccacgtgtgctactgggaggagtgcccccgggagggcaagagcttcaaggccaagtacaagctggtgaaccacatccgggtgcacactggagagaagcccttcccctgccccttccctggctgcggcaagatctttgcccggtctgagaacctgaagatccacaagaggacccacactggagagaagcccttcaagtgtgaatttgagggctgtgacagaagatttgccaacagcagtgacaggaagaagcacatgcacgtgcacaccagtgacaagccctacatctgcaaggtgtgtgacaagagctacacccaccccagcagcctgaggaagcacatgaagtgctgcccagcctggtacccaggccagagcctcatcccagatgaggagctggacacagatgtgggcatgcagcagcctgccctgcacaacaccacctaccccaagtgccgggtgaatgctgagcccaccgtgcaggagatgatctactag

SEQ ID NO: 176304 - DNA, 1005 bp, synthetic construct
  misc_feature 1..1005: note = Description of Artificial Sequence: Synthetic coding sequence
  source 1..1005: mol_type = other DNA
atgagatacaagaccagcctggtgatgaggaagaggctgcggctgtacagaaacaccctgaaggagagcagcagcagcagcggccaccacggcccccagctgacagctgccagcagccccagcgtcttccctggcctgcacgaggagcccccccaggccagccccagccggcccctgaatggcctgctgcggctgggcctgcccggggacatgtatgcccggcctgagcccttccccccaggccctgctgcccggagtgatgccctggccgctgctgctgccctgcacggctacggcggcatgaacctgactgtgaacctggccgcccctcatggccctggggccttcttccgctacatgaggcagcccatcaagcaggagctgatctgcaagtggctggccgcagatggaacagccacccccagcctgtgcagcaagaccttcagcaccatgcatgagctggtgacccacgtgacagtggagcacgtgggcggccctgagcaggccaaccacatctgcttctgggaggagtgcccccggcagggcaagcccttcaaggccaagtacaagctggtgaaccacatccgggtgcacactggagagaagcccttcccctgccccttccctggctgcggcaaggtgtttgcccggtctgagaacctgaagatccacaagaggacccacactggagagaagcccttccgctgtgaatttgagggctgtgaaagaagatttgccaacagcagtgacaggaagaagcacagccacgtgcacaccagtgacaagccctacacctgcaaggtgcggggctgtgacaagtgctacacccaccccagcagcctgaggaagcacatgaaggtgcacggccgcagccccccacccagcagcggctatgacagcgccacccccagcgccctggtgagccccagcagtgactgtggccacaagagccaggtggccagcagcgctgctgtggccgccaggacagctgacctgtctgagtag

SEQ ID NO: 176305 - DNA, 1119 bp, synthetic construct
  misc_feature 1..1119: note = Description of Artificial Sequence: Synthetic coding sequence
  source 1..1119: mol_type = other DNA
atgaatggcccctgccagagcctgaggaaggccgagggcctgctggagggctgcaccagcgctgtgacagtgttcaggaagctgcccctggacagcaaggcccagagccagaagatgagatacaagaccagcctggtgatgaggaagaggctgcggctgtacagaaacaccctgaaggagagcagcagcagcagcggccaccacggcccccagctgacagctgccagcagccccagcgtcttccctggcctgcacgaggagcccccccaggccagccccagccggcccctgaatggcctgctgcggctgggcctgcccggggacatgtatgcccggcctgagcccttccccccaggccctgctgcccggagtgatgccctggccgctgctgctgccctgcacggctacggcggcatgaacctgactgtgaacctggccgcccctcatggccctggggccttcttccgctacatgaggcagcccatcaagcaggagctgatctgcaagtggctggccgcagatggaacagccacccccagcctgtgcagcaagaccttcagcaccatgcatgagctggtgacccacgtgacagtggagcacgtgggcggccctgagcaggccaaccacatctgcttctgggaggagtgcccccggcagggcaagcccttcaaggccaagtacaagctggtgaaccacatccgggtgcacactggagagaagcccttcccctgccccttccctggctgcggcaaggtgtttgcccggtctgagaacctgaagatccacaagaggacccacactggagagaagcccttccgctgtgaatttgagggctgtgaaagaagatttgccaacagcagtgacaggaagaagcacagccacgtgcacaccagtgacaagccctacacctgcaaggtgcggggctgtgacaagtgctacacccaccccagcagcctgaggaagcacatgaaggtgcacggccgcagccccccacccagcagcggctatgacagcgccacccccagcgccctggtgagccccagcagtgactgtggccacaagagccaggtggccagcagcgctgctgtggccgccaggacagctgacctgtctgagtag

SEQ ID NO: 176306 - DNA, 690 bp, synthetic construct
  misc_feature 1..690: note = Description of Artificial Sequence: Synthetic coding sequence
  source 1..690: mol_type = other DNA
atgagatacaagaccagcctggtgatgaggaagaggctgcggctgtacagaaacaccctgaaggagagcagcagcagcagcggccaccacggcccccagctgacagctgccagcagccccagcgtcttccctggcctgcacgaggagcccccccaggccagccccagccggcccctgaatggcctgctgcggctgggcctgcccggggacatgtatgcccggcctgagcccttccccccaggccctgctgcccggagtgatgccctggccgctgctgctgccctgcacggctacggcggcatgaacctgactgtgaacctggccgcccctcatggccctggggccttcttccgctacatgaggcagcccatcaagcaggagctgatctgcaagtggctggccgcagatggaacagccacccccagcctgtgcagcaagaccttcagcaccatgcatgagctggtgacccacgtgacagtggagcacgtgggcggccctgagcaggccaaccacatctgcttctgggaggagtgcccccggcagggcaagcccttcaaggccaagtacaagctggtgaaccacatccgggtgcacactggagagaagcccttcccctgccccttccctggctgcggcaaggtgtttgcccggtctgagaacctgaagatccacaagaggacccacacctag

SEQ ID NO: 176307 - DNA, 207 bp, synthetic construct
  misc_feature 1..207: note = Description of Artificial Sequence: Synthetic coding sequence
  source 1..207: mol_type = other DNA
atgagatacaagaccagcctggtgatgaggaagaggctgcggctgtacagaaacaccctgaaggagagcagcagcagcagcggccaccacggcccccagctgacagctgccagcagccccagcgtcttccctggcctgcacgaggagcccccccaggccagccccagccggcccctgaatggcctgctgcggctgggcctgccctag

SEQ ID NO: 176308 - DNA, 1005 bp, synthetic construct; identical to SEQ ID NO: 176304
  misc_feature 1..1005: note = Description of Artificial Sequence: Synthetic coding sequence
  source 1..1005: mol_type = other DNA

SEQ ID NO: 176309 - DNA, 1005 bp, synthetic construct; identical to SEQ ID NO: 176304
  misc_feature 1..1005: note = Description of Artificial Sequence: Synthetic coding sequence
  source 1..1005: mol_type = other DNA

SEQ ID NO: 176310 - DNA, 234 bp, synthetic construct
  misc_feature 1..234: note = Description of Artificial Sequence: Synthetic coding sequence
  source 1..234: mol_type = other DNA
atgagatacaagaccagcctggtgatgaggaagaggctgcggctgtacagaaacaccctgaaggagagcagcagcagcagcggccaccacggcccccagctgacagctgccagcagccccagcgtcttccctggcctgcacgaggagcccccccaggccagccccagccggcccctgaatggcctgctgcggctgggcctgcccggggacatgtatgcccggcctgagccctag

SEQ ID NO: 176311 - DNA, 1155 bp, synthetic construct
  misc_feature 1..1155: note = Description of Artificial Sequence: Synthetic coding sequence
  source 1..1155: mol_type = other DNA
atgccacccttctgcagaaatgccaagctgggcctgctgtccttcctgatctgtgccggccgcagcctgctgcccctgggcaagaatgccttctggctggagagaattgagaacaacaacaccctgtgggagaaggcccagagccagaagatgagatacaagaccagcctggtgatgaggaagaggctgcggctgtacagaaacaccctgaaggagagcagcagcagcagcggccaccacggcccccagctgacagctgccagcagccccagcgtcttccctggcctgcacgaggagcccccccaggccagccccagccggcccctgaatggcctgctgcggctgggcctgcccggggacatgtatgcccggcctgagcccttccccccaggccctgctgcccggagtgatgccctggccgctgctgctgccctgcacggctacggcggcatgaacctgactgtgaacctggccgcccctcatggccctggggccttcttccgctacatgaggcagcccatcaagcaggagctgatctgcaagtggctggccgcagatggaacagccacccccagcctgtgcagcaagaccttcagcaccatgcatgagctggtgacccacgtgacagtggagcacgtgggcggccctgagcaggccaaccacatctgcttctgggaggagtgcccccggcagggcaagcccttcaaggccaagtacaagctggtgaaccacatccgggtgcacactggagagaagcccttcccctgccccttccctggctgcggcaaggtgtttgcccggtctgagaacctgaagatccacaagaggacccacactggagagaagcccttccgctgtgaatttgagggctgtgaaagaagatttgccaacagcagtgacaggaagaagcacagccacgtgcacaccagtgacaagccctacacctgcaaggtgcggggctgtgacaagtgctacacccaccccagcagcctgaggaagcacatgaaggtgcacggccgcagccccccacccagcagcggctatgacagcgccacccccagcgccctggtgagccccagcagtgactgtggccacaagagccaggtggccagcagcgctgctgtggccgccaggacagctgacctgtctgagtag

SEQ ID NO: 176312 - DNA, 684 bp, synthetic construct
  misc_feature 1..684: note = Description of Artificial Sequence: Synthetic coding sequence
  source 1..684: mol_type = other DNA
atgggcggcaagcagagcacagctgcccggagccggggccccttccctggggtgtccacagatgattctgctgtgcccccacctgggggcgccccccacttcggccactacagaactggaggaggagccatgggcctgcggagccgctctgtgtcctctgtggccggcatgggcatggaccccagcacagctgggggcgtgcccttcggcctgtacaccccagccagccggggcactggagacagcgagcgggcccctgggggcggcggcagcgccagtgacagcacctacgcccatggaaatggctaccaggagaccggcggcggccaccacagagatggcatgctgtacctgggcagccgggccagcctggctgatgccctgcccctgcacatcgccccccgctggttcagcagccacagcggcttcaagtgccccatctgcagcaagtctgtggccagtgatgagatggagatgcacttcatcatgtgcctgagcaagccccggctgagctacaatgatgatgtgctgaccaaggatgctggagaatgtgtgatctgcctggaggagctgctgcagggcgacaccatcgcccggctgccctgcctgtgcatctaccacaagagctgcatcgacagctggtttgaggtgaacagaagctgcccagagcaccctgctgactag

SEQ ID NO: 176313 - DNA, 543 bp, synthetic construct
  misc_feature 1..543: note = Description of Artificial Sequence: Synthetic coding sequence
  source 1..543: mol_type = other DNA
cagaggggcgtgcctgctgctggcacccccagcagcccccggctgctggtgagccgcagcctgggcggcgctgtgggctctgtggccagcggggcccgggccgcccagagccccttcagcatccccaacagcagcagcggcccctacggcagccaggacagcgtgcacagcagcccagaagatggcggcggcggccgggacaggcctgtgggcggcagccctgggggcccccggctggtgattggcagcctgcctgcccacctgagcccccacatgtttggaggcttcaagtgccctgtgtgcagcaagtttgtgtccagtgatgagatggacctgcacctggtgatgtgcctgaccaagccccgcatcacctacaatgaagatgtgctgagcaaggatgctggggagtgtgccatctgcctggaggagctgcagcagggcgacaccatcgcccggctgccctgcctgtgcatctaccacaagggctgcattgatgagtggtttgaggtgaacagaagctgcccagagcaccccagcgactag

SEQ ID NO: 176314 - DNA, 729 bp, synthetic construct
  misc_feature 1..729: note = Description of Artificial Sequence: Synthetic coding sequence
  source 1..729: mol_type = other DNA
atgggcgccaagcagagcggccctgctgctgccaacggccgcacccgggcctacagcggcagtgacctgcccagcagcagcagcggcggggccaacggcacagctgggggcggcggcggggcccgggctgctgctgctggccgcttccctgcccaggtgcccagcgcccaccagcccagcgccagcggcggcgctgctgctgctgctgctgccccagctgccccagctgcccccaggagccgcagcctgggcggcgctgtgggctctgtggccagcggggcccgggccgcccagagccccttcagcatccccaacagcagcagcggcccctacggcagccaggacagcgtgcacagcagcccagaagatggcggcggcggccgggacaggcctgtgggcggcagccctgggggcccccggctggtgattggcagcctgcctgcccacctgagcccccacatgtttggaggcttcaagtgccctgtgtgcagcaagtttgtgtccagtgatgagatggacctgcacctggtgatgtgcctgaccaagccccgcatcacctacaatgaagatgtgctgagcaaggatgctggggagtgtgccatctgcctggaggagctgcagcagggcgacaccatcgcccggctgccctgcctgtgcatctaccacaagggctgcattgatgagtggtttgaggtgaacagaagctgcccagagcaccccagcgactag

SEQ ID NO: 176315 - DNA, 2511 bp, synthetic construct
  misc_feature 1..2511: note = Description of Artificial Sequence: Synthetic coding sequence
  source 1..2511: mol_type = other DNA
atgcaccccctgggcctgtgcaacaacaatgatgaggaggacctgtatgaatatggctgggtgggcgtggtgaagctggagcagcctgagctggaccccaagccctgcctgactgtgctgggcaaggccaagagagctgtgcagagaggagccacagctgtgatctttgatgtgtctgagaaccctgaggccatcgaccagctgaaccagggcagcgaggaccccctgaagaggcctgtggtgtatgtgaagggagcagatgccatcaagctgatgaacatcgtgaacaagcagaaggtggcccgggcccgcatccagcacaggcctccccggcagcccacagagtactttgacatgggcatcttcctggccttctttgtggtggtgtccctggtgtgcctgatcctgctggtgaagatcaagctgaagcagaggaggagccagaacagcatgaaccggctggccgtgcaggccctggagaagatggagaccaggaagttcaacagcaagagcaagggccggcgggagggcagctgtggggccctggacaccctgagcagcagcagcaccagtgactgtgccatctgcctggagaagtacattgatggagaggagctgcgggtcatcccctgcacccaccgcttccacaggaaatgtgtggacccctggctgctgcagcaccacacctgcccccactgccgccacaacatcatcgagcagaagggcaaccccagcgctgtgtgtgtggagaccagcaacctgagccggggccggcagcagagggtgaccctgcctgtgcactacccaggccgggtgcacaggaccaatgccatcccagcctaccccaccaggacctccatggacagccacggcaaccctgtgaccctgctgaccatggacagacatggagagcagagcctgtacagcccccagaccccagcctacatccgcagctacccacccctgcacctggaccacagcctggccgcccaccgctgtggcctggagcaccgggcctacagccctgcccaccccttcagaagacccaagctgagcggccgctccttcagcaaggccgcctgcttcagccagtatgagaccatgtaccagcactactacttccagggcctgagctacccagagcaggagggccagagcccccccagcctggccccccggggccctgcccgggccttcccccccagcggcagcggcagcctgctcttccccaccgtggtgcacgtggccccacccagccacctggagagcggcagcaccagcagcttcagctgctaccacggccacaggtctgtgtgcagcggctacctggccgactgccccggcagtgacagcagcagcagcagcagcagcggccagtgccactgcagcagcagtgacagcgtggtggactgcacagaggtgagcaaccagggcgtgtatggcagctgcagcaccttccgcagcagcctgagcagtgactatgaccccttcatctaccgcagccgcagcccctgccgggccagcgaggccggcggcagcggcagcagcggccggggccctgccctgtgctttgagggcagccccccacctgaggagctgcctgctgtgcacagccatggagctggccgcggggagccctggccaggccctgccagccccagcggggaccaggtgtccacctgcagcctggagatgaactacagcagcaacagcagcctggagcaccggggccccaacagcagcaccagcgaggtgggcctggaggccagccctggagctgccccagacctgcggaggacctggaagggcggccacgagctgcccagctgtgcctgctgctgtgagccccagcccagccctgctggccccagcgctggagctgctggcagcagcaccctcttcctgggcccccacctgtatgagggcagcggccctgctggaggagagccccagagcggcagcagccagggcctgtatggcctgcacccagaccacctgcccaggacagatggagtgaagtatgagggcctgccctgctgcttctatgaggagaagcaggtggcccggggcggcggcggcggcagcggctgctacacagaggactacagcgtgtctgtgcagtacaccctgacagaggagcccccacctggctgctacccaggggcccgggacctgagccagaggatccccatcatcccagaagatgtggactgtgacctgggcctgcccagcgactgccagggcacccacagcctgggctcctggggcggcacccggggccctgacaccccccggccccaccggggcctgggcgccacccgggaggaggagcgggccctgtgctgccaggcccgggccctgctgcggcccggctgccccccagaggaggccggggctgtgcgggccaacttccccagcgccctgcaggacacccaggagagcagcaccacagccacagaagctgctggccccaggagccacagcgctgacagcagcagccctggggcctag

SEQ ID NO: 176316 - DNA, 2511 bp, synthetic construct; identical to SEQ ID NO: 176315
  misc_feature 1..2511: note = Description of Artificial Sequence: Synthetic coding sequence
  source 1..2511: mol_type = other DNA

SEQ ID NO: 176317 - DNA, 2511 bp, synthetic construct; identical to SEQ ID NO: 176315
  misc_feature 1..2511: note = Description of Artificial Sequence: Synthetic coding sequence
  source 1..2511: mol_type = other DNA

SEQ ID NO: 176318 - DNA, 1932 bp, synthetic construct
  misc_feature 1..1932: note = Description of Artificial Sequence: Synthetic coding sequence
  source 1..1932: mol_type = other DNA
gtgcccagcgtgtggaggagcaccctgatggagaggagctgtggcagcagccctgtgctgaccggcttcaccggcagcgcctggacccccctgctgcagcaccacacctgcccccactgccgccacaacatcatcgagcagaagggcaaccccagcgctgtgtgtgtggagaccagcaacctgagccggggccggcagcagagggtgaccctgcctgtgcactacccaggccgggtgcacaggaccaatgccatcccagcctaccccaccaggacctccatggacagccacggcaaccctgtgaccctgctgaccatggacagacatggagagcagagcctgtacagcccccagaccccagcctacatccgcagctacccacccctgcacctggaccacagcctggccgcccaccgctgtggcctggagcaccgggcctacagccctgcccaccccttccggcggcccaagctgagcggccgctccttcagcaaggccgcctgcttcagccagtatgagaccatgtaccagcactactacttccagggcctgagctacccagagcaggagggccagagcccccccagcctggccccccggggccctgcccgggccttccccccatctggcagcggcagcctgctcttccccaccgtggtgcacgtggccccacccagccacctggagagcggcagcaccagcagcttcagctgctaccacggccacaggtctgtgtgcagcggctacctggccgactgccccggcagtgacagcagcagcagcagcagcagcggccagtgccactgcagcagcagtgacagcgtggtggactgcacagaggtgagcaaccagggcgtgtatggcagctgcagcaccttccgcagcagcctgagcagtgactatgaccccttcatctaccgcagccgcagcccctgccgggccagcgaggccggcggcagcggcagcagcggccggggccctgccctgtgctttgagggcagccccccacctgaggagctgcctgctgtgcacagccacggggccggccgcggggagccctggccaggccctgccagccccagcggggaccaggtgtccacctgcagcctggagatgaactacagcagcaacagcagcctggagcaccggggccccaacagcagcaccagcgaggtgggcctggaggccagccctggggccgccccagacctgcggaggacctggaagggcggccacgagctgcccagctgtgcctgctgctgtgagccccagcccagccctgctggccccagcgctggagctgctggcagcagcaccctcttcctgggcccccacctgtatgagggcagcggccctgctggaggagagccccagagcggcagcagccagggcctgtatggcctgcacccagaccacctgcccaggacagatggagtgaagtatgagggcctgccctgctgcttctatgaggagaagcaggtggcccggggcggcggcggcggcagcggctgctacacagaggactacagcgtgtctgtgcagtacaccctgacagaggagcccccacctggctgctacccaggggcccgggacctgagccagaggatccccatcatcccagaagatgtggactgtgacctgggcctgcccagcgactgccagggcacccacagcctgggctcctggggcggcacccggggccctgacaccccccggccccaccggggcctgggcgccacccgggaggaggagcgggccctgtgctgccaggcccgggccctgctgcggcccggctgccccccagaggaggccggggctgtgcgggccaacttccccagcgccctgcaggacacccaggagagcagcaccacagccacagaggccgccggccccaggagccacagcgctgacagcagcagccctggggcctag

SEQ ID NO: 176319 - DNA, 2811 bp, synthetic construct
  misc_feature 1..2811: note = Description of Artificial Sequence: Synthetic coding sequence
  source 1..2811: mol_type = other DNA
atgaggcccaggtctgggggccggcctggggccaccggcagaagaagaagaaggctgcggcggcggccccggggcctgcgctgcagccggctgcccccacctccacccctgcccctgctgctgggcctgctgctggccgccgccggccctggggccgcccgggccaaggagacagcctttgtggaggtggtgctgtttgagagcagccccagcggggactacaccacctacaccaccggcctgaccggccgcttcagccgggccggggccaccctgtctgctgagggggagatcgtgcagatgcaccccctgggcctgtgcaacaacaatgatgaggaggacctgtatgaatatggctgggtgggcgtggtgaagctggagcagcctgagctggaccccaagccctgcctgactgtgctgggcaaggccaagagagctgtgcagagaggagccacagctgtgatctttgatgtgtctgagaaccctgaggccatcgaccagctgaaccagggcagcgaggaccccctgaagaggcctgtggtgtatgtgaagggagcagatgccatcaagctgatgaacatcgtgaacaagcagaaggtggcccgggcccgcatccagcacaggcctccccggcagcccacagagtactttgacatgggcatcttcctggccttctttgtggtggtgtccctggtgtgcctgatcctgctggtgaagatcaagctgaagcagaggaggagccagaacagcatgaaccggctggccgtgcaggccctggagaagatggagaccaggaagttcaacagcaagagcaagggccggcgggagggcagctgtggggccctggacaccctgagcagcagcagcaccagtgactgtgccatctgcctggagaagtacattgatggagaggagctgcgggtcatcccctgcacccaccgcttccacaggaaatgtgtggacccctggctgctgcagcaccacacctgcccccactgccgccacaacatcatcgagcagaagggcaaccccagcgctgtgtgtgtggagaccagcaacctgagccggggccggcagcagagggtgaccctgcctgtgcactacccaggccgggtgcacaggaccaatgccatcccagcctaccccaccaggacctccatggacagccacggcaaccctgtgaccctgctgaccatggacagacatggagagcagagcctgtacagcccccagaccccagcctacatccgcagctacccacccctgcacctggaccacagcctggccgcccaccgctgtggcctggagcaccgggcctacagccctgcccaccccttcagaagacccaagctgagcggccgctccttcagcaaggccgcctgcttcagccagtatgagaccatgtaccagcactactacttccagggcctgagctacccagagcaggagggccagagcccccccagcctggccccccggggccctgcccgggccttcccccccagcggcagcggcagcctgctcttccccaccgtggtgcacgtggccccacccagccacctggagagcggcagcaccagcagcttcagctgctaccacggccacaggtctgtgtgcagcggctacctggccgactgccccggcagtgacagcagcagcagcagcagcagcggccagtgccactgcagcagcagtgacagcgtggtggactgcacagaggtgagcaaccagggcgtgtatggcagctgcagcaccttccgcagcagcctgagcagtgactatgaccccttcatctaccgcagccgcagcccctgccgggccagcgaggccggcggcagcggcagcagcggccggggccctgccctgtgctttgagggcagccccccacctgaggagctgcctgctgtgcacagccatggagctggccgcggggagccctggccaggccctgccagccccagcggggaccaggtgtccacctgcagcctggagatgaactacagcagcaacagcagcctggagcaccggggccccaacagcagcaccagcgaggtgggcctggaggccagccctggagctgccccagacctgcggaggacctggaagggcggccacgagctgcccagctgtgcctgctgctgtgagccccagcccagccctgctggccccagcgctggagctgctggcagcagcaccctcttcctgggcccccacctgtatgagggcagcggccctgctggaggagagccccagagcggcagcagccagggcctgtatggcctgcacccagaccacctgcccaggacagatggagtgaagtatgagggcctgccctgctgcttctatgaggagaagcaggtggcccggggcggcggcggcggcagcggctgctacacagaggactacagcgtgtctgtgcagtacaccctgacagaggagcccccacctggctgctacccaggggcccgggacctgagccagaggatccccatcatcccagaagatgtggactgtgacctgggcctgcccagcgactgccagggcacccacagcctgggctcctggggcggcacccggggccctgacaccccccggccccaccggggcctgggcgccacccgggaggaggagcgggccctgtgctgccaggcccgggccctgctgcggcccggctgccccccagaggaggccggggctgtgcgggccaacttccccagcgccctgcaggacacccaggagagcagcaccacagccacagaagctgctggccccaggagccacagcgctgacagcagcagccctggggcctag

SEQ ID NO: 176320 - DNA, 339 bp, synthetic construct
  misc_feature 1..339: note = Description of Artificial Sequence: Synthetic coding sequence
  source 1..339: mol_type = other DNA
atgagctaccctgtgaccagccagccccagtgtgccaccaccagctgctaccagacccagctgagtgactggcacacaggcctgacagactgctgcaatgacatgcctgtgtgcctgtgtggcacctttgcccccctgtgcctggcctgccgcatcagtgatgactttggagagtgctgctgtgccccctacctgcccggcggcctgcacagcatcagaacaggcatgagggagcgctaccacatccagggctctgtgggccatgactgggccgccctgaccttctgcctgccctgtgccctgtgccagatggcccgggagctgaagatccgggagtag

SEQ ID NO: 176321 - DNA, 1440 bp, synthetic construct
  misc_feature 1..1440: note = Description of Artificial Sequence: Synthetic coding sequence
  source 1..1440: mol_type = other DNA
atggccgccctggagaagatgaccttccccaagaagatgaccttccctgagaagcccagccacaagaagtaccgggccgccctgaagaaggagaagaggaagaagaggcggcaggagctggcccggctgcgggacagcggcctgagccaggaggaggaggaggacaccttcatcgaggagcagcagctggaggaggagaagctgctggagcgggagcgggagcggctgcacgaggagtggctgctgcgggagcagaaggcccaggaggagttccgcatcaagaaggagaaggaggaggccgccaagaagtggctggaggagcaggagaggaagctgaaggagcagtggaaggagcagcagaggaaggagcgggaggaggaggagcagaagcagcaggagaagaaggagaaggaggaggccgtgcagaagatgctggaccaggctgaaaatgacctggagaacagcaccacctggcagaaccctgagccccctgtggacttccgggtgatggagaaggaccgggccaactgccccttctacagcaagacaggagcctgccgctttggagaccgctgcagcaggaagcacaacttccccaccagcagccccaccctgctgatcaagtccatgttcaccaccttcggcatggagcagtgcagaagagatgattatgaccctgatgccagcctggagtacagcgaggaggagacctaccagcagttcctggacttctatgaagatgtgctgcctgagttcaagaatgtgggcaaggtgatccagttcaaggtgtcctgcaacctggagccccacctgcggggaaatgtgtatgtgcagtaccagagcgaggaggagtgccaggccgccctgagcctcttcaacggccgctggtacgccggccggcagctgcagtgtgagttctgccctgtgacccgctggaagatggccatctgtggcctgtttgagatccagcagtgcccccggggcaagcactgcaacttcctgcacgtgttcaggaaccccaacaatgagttctgggaggccaacagagacatctacctgagcagtgaccagacaggcagcagctttgggaagaacagcgagcggcgggagaagatgggccaccacgaccactactacagccggcagagaggaagaagaaaccccagcccagaccacacctacaagagaaatggagagagcgagaggaagaagagcagccaccggggcaagaagagccacaagaggaccagcaagagccgggagcggcacaacagccccagccggggcaggaacagacaccgctcctgggaccagggccgccgcagccagagcagaagaagccacaggagccgcagccagagcagcagccgctgccgcagccggggccgcaggaagagcggcaacagagacagaacagtgcagagcccccagagcaagtag

SEQ ID NO: 176322 - DNA, 1449 bp, synthetic construct
  misc_feature 1..1449: note = Description of Artificial Sequence: Synthetic coding sequence
  source 1..1449: mol_type = other DNA
atggccgcccctgagaagatgaccttccctgagaagcccagccacaagaagtaccgggccgccctgaagaaggagaagaggaagaagaggcggcaggagctggcccggctgcgggacagcggcctgagccagaaggaggaggaggaggacaccttcatcgaggagcagcagctggaggaggagaagctgctggagcgggagcggcagaggctgcacgaggagtggctgctgcgggagcagaaggcccaggaggagttccgcatcaagaaggagaaggaggaggccgccaagaagaggcaggaggagcaggagaggaagctgaaggagcagtgggaggagcagcagaggaaggagcgggaggaggaggagcagaagaggcaggagaagaaggagaaggaggaggccctgcagaagatgctggaccaggccgagaatgagctggagaatggcaccacctggcagaaccctgagccccctgtggacttccgggtgatggagaaggaccgggccaactgccccttctacagcaagacaggagcctgccgctttggagaccgctgcagcaggaagcacaacttccccaccagcagccccaccctgctgatcaagtccatgttcaccaccttcggcatggagcagtgcagaagagatgattatgaccctgatgccagcctggagtacagcgaggaggagacctaccagcagttcctggacttctatgaagatgtgctgcctgagttcaagaatgtgggcaaggtgatccagttcaaggtgtcctgcaacctggagccccacctgcggggaaatgtgtatgtgcagtaccagagcgaggaggagtgccaggccgccctgagcctcttcaacggccgctggtacgccggccggcagctgcagtgtgagttctgccctgtgacccgctggaagatggccatctgtggcctgtttgagatccagcagtgcccccggggcaagcactgcaacttcctgcacgtgttcaggaaccccaacaatgagttctgggaggccaacagagacatctacctgagcccagacagaacaggcagcagctttgggaagaacagcgagcggcgggagaggatgggccaccatgatgactactacagccggctgcggggcagaagaaaccccagcccagaccacagctacaagagaaatggagagagcgagaggaagagcagccgccaccggggcaagaagagccacaagaggaccagcaagagccgggagcggcacaacagccgcagccggggcaggaacagagacaggagccgggacaggagccggggccggggcagccgcagccgcagccgcagccgcagccgccgcagcagaagaagccgcagccagagcagcagccgcagccgcagccggggcagaagaagaagtggcaacagagacagaacagtgcagagccccaagagcaagtag

SEQ ID NO: 176323 - DNA, 444 bp, synthetic construct
  misc_feature 1..444: note = Description of Artificial Sequence: Synthetic coding sequence
  source 1..444: mol_type = other DNA
atggccgcccctgagaagatgaccttccctgagaagcccagccacaagaagtaccgggccgccctgaagaaggagaagaggaagaagaggcggcaggagctggcccggctgcgggacagcggcctgagccagaaggaggaggaggaggacaccttcatcgaggagcagcagctggaggaggagaagctgctggagcgggagcggctggagtgcagcggggtcatcagcgcccacaggaacctgcacctgcccggcagccatgacagccctgccagcgccagccgggtggccggcatcaccggcacccaccgccacacccagctgatcttcttctgcaccttcagcagagatggagtgagcccctgctggccaggctggagccgcagcctggacctgatgatctgccccccccggccccacaaggtgctgcggctgcaggtgtag

SEQ ID NO: 176324 - DNA, 3438 bp, synthetic construct
  misc_feature 1..3438: note = Description of Artificial Sequence: Synthetic coding sequence
  source 1..3438: mol_type = other DNA
atgtgcaagtgctgcaacctcttcagccccaaccagagcgagctgctgagccacgtgtctgagaagcacatggaggagggcgtgaatgtggatgagatcatcatccccctgcggcccctgagcaccccagagccccccaacagcagcaagacaggagatgagttcctggtgatgaagaggaagaggggccggcccaagggcagcaccaagaagagcagcacagaggaggagctggccgagaacatcgtgagccccacagaggacagccccctggcccctgaggagggcaacagcctgccccccagcagcctggagtgcagcaagtgctgcaggaagttcagcaacacccggcagctgaggaagcacatctgcatcatcgtgctgaacctgggggaggaggagggggaggccggaaatgaaagtgacctggagctggagaagaagtgcaaggaggatgaccgggagaaggccagcaagaggcccaggagccagaagacagagaaggtgcagaagatcagcggcaaggaggcccggcagctgagcggggccaagaagcccatcatctctgtggtgctgacagcccacgaggccatccctggggccaccaagatcgtgcctgtggaggccggccccccagagaccggggccaccaacagcgagaccaccagcgctgacctggtgccccggcggggctaccaggagtatgccatccagcagaccccctatgagcagcccatgaagagcagccggctgggccccacccagctgaagatcttcacctgtgagtactgcaacaaggtgttcaagttcaagcacagcctgcaggcccacctgcgcatccacaccaatgagaagccctacaagtgcccccagtgcagctatgccagcgccatcaaggccaacctgaatgtgcacctgaggaagcacactggagagaagtttgcctgtgactactgcagcttcacctgcctgagcaagggccacctgaaggtgcacatcgagcgggtgcacaagaagatcaagcagcactgccgcttctgcaagaagaagtacagtgatgtgaagaacctgatcaagcacatcagagatgcccatgacccccaggacaagaaggtgaaggaggccctggatgagctgtgcctgatgacccgggagggcaagaggcagctgctgtatgactgccacatctgtgagaggaagttcaagaatgagctggaccgggacagacacatgctggtgcacggggacaagtggccctttgcctgtgagctgtgtggccatggagccaccaagtaccaggccctggagctgcacgtgaggaagcacccctttgtgtatgtgtgtgctgtgtgcaggaagaagtttgtgagcagcatccggctgcggacccacatcaaggaggtgcatggagctgcccaggaggccctggtgttcaccagcagcatcaaccagagcttctgcctgctggagcctggaggagacatccagcaggaggccctgggggaccagctgcagctggtggaggaggagtttgccctgcagggcgtgaatgccctgaaggaggaggcctgccctggggacacccagctggaggagggcaggaaggagcctgaggcccctggagagatgcctgccccagctgtgcacctggccagcccccaggccgagagcacagccctgcccccctgtgagctggagaccaccgtggtgagcagcagtgacctgcacagccaggaggtggtgtctgatgacttcctgctgaagaatgacaccagcagcgctgaggcccacgccgcccctgagaagcccccagacatgcagcacaggagctctgtgcagacccagggcgaggtgatcaccctgctgctgagcaaggcccagagcgctggcagtgaccaggagagccacggggcccagagccccctgggggagggccagaacatggctgtgctgtctgctggggaccctgaccccagccgctgcctgcggagcaacccagctgaggccagtgacctgctgccccctgtggccggcggcggggacaccatcacccaccagcctgacagctgcaaggccgcccctgagcacaggagcggcatcacagccttcatgaaggtgctgaacagcctgcagaagaagcagatgaacaccagcctgtgtgagcgcatcaggaaggtgtatggagacctggagtgtgagtactgcggcaagctgttctggtaccaggtgcactttgacatgcacgtgaggacccacacccgggagcacctgtactactgcagccagtgccactacagcagcatcaccaagaactgcctgaagagacatgtgatccagaagcacagcaacatcctgctgaagtgccccacagatggctgtgactacagcaccccagacaagtacaagctgcaggcccacctgaaggtgcacacagccctggacaagaggagctacagctgccctgtgtgtgagaagagcttctctgaagatagactcatcaagagccacatcaagaccaaccaccctgaggtgtccatgagcaccatcagcgaggtgctgggcagaagagtgcagctgaagggcctgattggcaagagggccatgaagtgcccctactgtgacttctacttcatgaagaatggaagtgacctgcagaggcacatctgggcccatgaaggagtgaagcccttcaagtgcagcctgtgtgaatatgccaccaggagcaagagcaacctgaaggcccacatgaacagacacagcacagagaagacccacctgtgtgacatgtgtgggaagaagttcaagagcaagggcaccctgaagagccacaagctgctgcacacagcagatggcaagcagttcaagtgcaccgtgtgtgactacacagctgcccagaagccccagctgctgcggcacatggagcagcacgtgtccttcaagcccttccgctgtgcccactgccactacagctgcaacatcagcggcagcctgaagaggcactacaacaggaagcaccccaatgaggagtatgccaacgtgggcactggagagctggccgctgaggtgctgatccagcagggcggcctgaagtgccctgtgtgcagctttgtgtatggcaccaagtgggagttcaacagacacctgaagaacaagcacggcctgaaggtggtggagattgatggagaccccaagtgggaggtgacagaggaggagcccagcagcaaccacacagtgatgatccaggagaccgtgcagcaggcctctgtggagctggccgagcagcaccacctggtggtgtccagtgatgatgtggagggcattgaaacagtgacagtgtacacccagggcggggaggccagcgagttcatcgtgtatgtgcaggaggccatgcagcctgtggaggagcaggccgtggagcagcctgcccaggagctgtag

SEQ ID NO: 176325 - DNA, 3546 bp, synthetic construct
  misc_feature 1..3546: note = Description of Artificial Sequence: Synthetic coding sequence
  source 1..3546: mol_type = other DNA
atggagaccagggctgctgaaaatacagccatcttcatgtgcaagtgctgcaacctcttcagccccaaccagagcgagctgctgagccacgtgtctgagaagcacatggaggagggcgtgaatgtggatgagatcatcatccccctgcggcccctgagcaccccagagccccccaacagcagcaagacaggagatgagttcctggtgatgaagaggaagaggggccggcccaagggcagcaccaagaagagcagcacagaggaggagctggccgagaacatcgtgagccccacagaggacagccccctggcccctgaggagggcaacagcctgccccccagcagcctggagtgcagcaagtgctgcaggaagttcagcaacacccggcagctgaggaagcacatctgcatcatcgtgctgaacctgggggaggaggagggggaggccggggccaccaagatcgtgcctgtggaggccggccccccagagaccggggccaccaacagcgagaccaccagcgctgacctggtgccccggcggggctaccaggagtatgccatccagcagaccccctatgagcagcccatgaagagcagccggctgggccccacccagctgaagatcttcacctgtgagtactgcaacaaggtgttcaagttcaagcacagcctgcaggcccacctgcgcatccacaccaatgagaagccctacaagtgcccccagtgcagctatgccagcgccatcaaggccaacctgaatgtgcacctgaggaagcacactggagagaagtttgcctgtgactactgcagcttcacctgcctgagcaagggccacctgaaggtgcacatcgagcgggtgcacaagaagatcaagcagcactgccgcttctgcaagaagaagtacagtgatgtgaagaacctgatcaagcacatcagagatgcccatgacccccaggacaagaaggtgaaggaggccctggatgagctgtgcctgatgacccgggagggcaagaggcagctgctgtatgactgccacatctgtgagaggaagttcaagaatgagctggaccgggacagacacatgctggtgcacggggacaagtggccctttgcctgtgagctgtgtggccatggagccaccaagtaccaggccctggagctgcacgtgaggaagcacccctttgtgtatgtgtgtgctgtgtgcaggaagaagtttgtgagcagcatccggctgcggacccacatcaaggaggtgcatggagctgcccaggaggccctggtgttcaccagcagcatcaaccagagcttctgcctgctggagcctggaggagacatccagcaggaggccctgggggaccagctgcagctggtggaggaggagtttgccctgcagggcgtgaatgccctgaaggaggaggcctgccctggggacacccagctggaggagggcaggaaggagcctgaggcccctggagagatgcctgccccagctgtgcacctggccagcccccaggccgagagcacagccctgcccccctgtgagctggagaccaccgtggtgagcagcagtgacctgcacagccaggaggtggtgtctgatgacttcctgctgaagaatgacaccagcagcgctgaggcccacgccgcccctgagaagcccccagacatgcagcacaggagctctgtgcagacccagggcgaggtgatcaccctgctgctgagcaaggcccagagcgctggcagtgaccaggagagccacggggcccagagccccctgggggagggccagaacatggctgtgctgtctgctggggaccctgaccccagccgctgcctgcggagcaacccagctgaggccagtgacctgctgccccctgtggccggcggcggggacaccatcacccaccagcctgacagctgcaaggccgcccctgagcacaggagcggcatcacagccttcatgaaggtgctgaacagcctgcagaagaagcagatgaacaccagcctgtgtgagcgcatcaggaaggtgtatggagacctggagtgtgagtactgcggcaagctgttctggtaccaggtgcactttgacatgcacgtgaggacccacacccgggagcacctgtactactgcagccagtgccactacagcagcatcaccaagaactgcctgaagagacatgtgatccagaagcacagcaacatcctgctgaagtgccccacagatggctgtgactacagcaccccagacaagtacaagctgcaggcccacctgaaggtgcacacagccctggacaagaggagctacagctgccctgtgtgtgagaagagcttctctgaagatagactcatcaagagccacatcaagaccaaccaccctgaggtgtccatgagcaccatcagcgaggtgctgggcagaagagtgcagctgaagggcctgattggcaagagggccatgaagtgcccctactgtgacttctacttcatgaagaatggaagtgacctgcagaggcacatctgggcccatgaaggagtgaagcccttcaagtgcagcctgtgtgaatatgccaccaggagcaagagcaacctgaaggcccacatgaacagacacagcacagagaagacccacctgtgtgacatgtgtgggaagaagttcaagagcaagggcaccctgaagagccacaagctgctgcacacagcagatggcaagcagttcaagtgcaccgtgtgtgactacacagctgcccagaagccccagctgctgcggcacatggagcagcacgtgtccttcaagcccttccgctgtgcccactgccactacagctgcaacatcagcggcagcctgaagaggcactacaacaggaagcaccccaatgaggagtatgccaacgtgggcactggagagctggccgctgaggtgctgatccagcagggcggcctgaagtgccctgtgtgcagctttgtgtatggcaccaagtgggagttcaacagacacctgaagaacaagcacggcctgaaggtggtggagattgatggagaccccaagtgggagacagccacagaggcccctgaggagcccagcacccagtacctgcacatcacagaagcagaagaagatgtgcagggcacccaggccgctgtggccgccctgcaggacctgcgctacaccagcgagagcggggaccggctggaccccacagctgtgaacatcctgcagcagatcatcgagctgggcgctgagacccatgatgccacagccctggcctctgtggtggccatggcccctggcaccgtgacagtggtgaagcaggtgacagaggaggagcccagcagcaaccacacagtgatgatccaggagaccgtgcagcaggcctctgtggagctggccgagcagcaccacctggtggtgtccagtgatgatgtggagggcattgaaacagtgacagtgtacacccagggcggggaggccagcgagttcatcgtgtatgtgcaggaggccatgcagcctgtggaggagcaggccgtggagcagcctgcccaggagctgtag

SEQ ID NO: 176326 - DNA, 177 bp, synthetic construct
  misc_feature 1..177: note = Description of Artificial Sequence: Synthetic coding sequence
  source 1..177: mol_type = other DNA
atggagaccagggctgctggcctgctggagtttgctgggggccccctgcacaccctgtttgcctgggtgtcccctgtggaggccgctgagcagcagaggctgctgcctgtgcctgccagcggcagctttgtgcctgagggccacctgcctgatgccagccagagcagccctgtgtag

SEQ ID NO: 176327 - DNA, 1653 bp, synthetic construct
  misc_feature 1..1653: note = Description of Artificial Sequence: Synthetic coding sequence
  source 1..1653: mol_type = other DNA
atggacctgaccaagatgggcatgatccagctgcagaaccccagccaccccaccggcctgctgtgcaaggccaaccagatgaggctggccggcaccctgtgtgatgtggtgatcatggtggacagccaggagttccacgcccacaggacagtgctggcctgcaccagcaagatgtttgagatcctcttccacaggaacagccagcactacaccctggacttcctgagccccaagaccttccagcagatcctggagtatgcctacacagccaccctgcaggccaaggccgaggacctggatgacctgctgtatgctgctgagatcctggagattgagtacctggaggagcagtgcctgaagatgctggagaccatccaggccagtgatgacaatgacacagaggccaccatggctgatggaggagctgaggaggaggaggacaggaaggcccgctacctgaagaacatcttcatcagcaagcacagcagcgaggagagcggctacgcctctgtggccggccagagcctgcccggccccatggtggaccagagccccagcgtgtccaccagctttggcctgagcgccatgagccccaccaaggctgctgtggacagcctgatgaccatcggccagagcctgctgcagggcaccctgcagcccccagctggccctgaggagcccaccctggccggcggcggccgccaccctggggtggccgaggtgaagacagagatgatgcaggtggatgaggtgcccagccagggcttcatccagcgggagctgttcagcaagctgggggagctggccgtgggcatgaagtctgagagcaggaccatcggggagcagtgcagcgtgtgtggggtggagctgcctgacaatgaagctgtggagcagcacaggaagctgcacagcggcatgaagacctacggctgtgagctgtgtgggaagcgcttcctggacagcctgcggctgaggatgcacctgctggcccacagcgctggggccaaggcctttgtgtgtgaccagtgtggggcccagttcagcaaggaggatgccctggagacccaccggcagacccacactggaacagacatggctgtgttctgcctgctgtgtgggaagcgcttccaggcccagagcgccctgcagcagcacatggaggtgcacgccggcgtgcgcagctacatctgcagcgagtgcaacagaaccttccccagccacacagccctgaagaggcacctgcggagccacactggagaccacccctatgaatgtgagttctgtggcagctgcttcagagatgagagcaccctgaagagccacaagaggatccacactggagagaagccctatgagtgcaatggctgtgggaagaagttcagcctgaagcaccagctggagacccactacagagtgcacactggagagaagccctttgagtgcaagctgtgccaccagaggagccgggactacagcgccatgatcaagcacctgcggacccacaacggggccagcccctaccagtgcaccatctgcacagagtactgccccagcctgagctccatgcagaagcacatgaagggccacaagccagaggagatccccccagactggagaattgagaagacctacctgtacctgtgctacgtgtag

SEQ ID NO: 176328 - DNA, 2022 bp, synthetic construct
  misc_feature 1..2022: note = Description of Artificial Sequence: Synthetic coding sequence
  source 1..2022: mol_type = other DNA
atggacctgaccaagatgggcatgatccagctgcagaaccccagccaccccaccggcctgctgtgcaaggccaaccagatgaggctggccggcaccctgtgtgatgtggtgatcatggtggacagccaggagttccacgcccacaggacagtgctggcctgcaccagcaagatgtttgagatcctcttccacaggaacagccagcactacaccctggacttcctgagccccaagaccttccagcagatcctggagtatgcctacacagccaccctgcaggccaaggccgaggacctggatgacctgctgtatgctgctgagatcctggagattgagtacctggaggagcagtgcctgaagatgctggagaccatccaggccagtgatgacaatgacacagaggccaccatggctgatggaggagctgaggaggaggaggacaggaaggcccgctacctgaagaacatcttcatcagcaagcacagcagcgaggagagcggctacgcctctgtggccggccagagcctgcccggccccatggtggaccagagccccagcgtgtccaccagctttggcctgagcgccatgagccccaccaaggctgctgtggacagcctgatgaccatcggccagagcctgctgcagggcaccctgcagcccccagctggccctgaggagcccaccctggccggcggcggccgccaccctggggtggccgaggtgaagacagagatgatgcaggtggatgaggtgcccagccaggacagccctggagctgctgagagcagcatcagcggcggcatgggagacaaggtggaggagcggggcaaggagggccctggcacccccaccaggagcagcgtcatcaccagcgcccgggagctgcactacggccgggaggagagcgctgagcaggtgcccccacctgctgaggccggccaggcccccaccggccggcctgagcacccagcccctcctcctgagaagcacctgggcatctacagcgtgctgcccaaccacaaggcagatgctgtgctgtccatgcccagctctgtgaccagcggcctgcacgtgcagcctgccctggccgtgtccatggacttcagcacctatggaggcctgctgccccagggcttcatccagcgggagctgttcagcaagctgggggagctggccgtgggcatgaagtctgagagcaggaccatcggggagcagtgcagcgtgtgtggggtggagctgcctgacaatgaggccgtggagcagcacaggaagctgcacagcggcatgaagacctacggctgtgagctgtgtgggaagcgcttcctggacagcctgcggctgaggatgcacctgctggcccacagcgctggggccaaggcctttgtgtgtgaccagtgtggggcccagttcagcaaagaagatgccctggagacccaccggcagacccacactggaacagacatggctgtgttctgcctgctgtgtgggaagcgcttccaggcccagagcgccctgcagcagcacatggaggtgcatgctggggtgcgcagctacatctgcagcgagtgcaacagaaccttccccagccacacagccctgaagaggcacctgcggagccacactggagaccacccctatgaatgtgagttctgtggcagctgcttcagagatgagagcaccctgaagagccacaagaggatccacactggagagaagccctatgaatgtaatggctgcggcaagaagttcagcctgaagcaccagctggagacccactacagagtgcacactggagagaagccctttgagtgcaagctgtgccaccagaggagccgggactacagcgccatgatcaagcacctgcggacccacaatggagccagcccctaccagtgcaccatctgcacagagtactgccccagcctgagctccatgcagaagcacatgaagggccacaagccagaggagatccccccagactggagaattgagaagacctacctgtacctgtgctacgtgtag

SEQ ID NO: 176329 - DNA, 2022 bp, synthetic construct; identical to SEQ ID NO: 176328
  misc_feature 1..2022: note = Description of Artificial Sequence: Synthetic coding sequence
  source 1..2022: mol_type = other DNA

SEQ ID NO: 176330 - DNA, 447 bp, synthetic construct
  misc_feature 1..447: note = Description of Artificial Sequence: Synthetic coding sequence
  source 1..447: mol_type = other DNA
atggacctgaccaagatgggcatgatccagctgcagaaccccagccaccccaccggcctgctgtgcaaggccaaccagatgaggctggccggcaccctgtgtgatgtggtgatcatggtggacagccaggagttccacgcccacaggacagtgctggcctgcaccagcaagatgtttgagatcctcttccacaggaacagccagcactacaccctggacttcctgagccccaagaccttccagcagatcctggagtatgcctacacagccaccctgcaggccaaggccgaggacctggatgacctgctgtatgctgctgagatcctggagattgagtacctggaggagcagtgcctgaagatgctggagaccatccaggccagtgatgacaatgacacagaggccaccatggctgatggaggagctgaggaggaggaggacagatag

SEQ ID NO: 176331 - DNA, 348 bp, synthetic construct
  misc_feature 1..348: note = Description of Artificial Sequence: Synthetic coding sequence
  source 1..348: mol_type = other DNA
atggacctgaccaagatgggcatgatccagctgcagaaccccagccaccccaccggcctgctgtgcaaggccaaccagatgaggctggccggcaccctgtgtgatgtggtgatcatggtggacagccaggagttccacgcccacaggacagtgctggcctgcaccagcaagatgtttgagatcctcttccacaggaacagccagcactacaccctggacttcctgagccccaagaccttccagcagatcctggagtatgcctacacagccaccctgcaggccaaggccgaggacctggatgacctgctgtatgctgctgagatcctggagattgagtacctggagtag

SEQ ID NO: 176332 - DNA, 723 bp, synthetic construct
  misc_feature 1..723: note = Description of Artificial Sequence: Synthetic coding sequence
  source 1..723: mol_type = other DNA
gaggccctgcctgtgcggctgctgcggcccctgctgctgcggccccacttccaggatgcccctcctggggaccccaggcatggccagggcgcccaggtgcccaccctgcggcaggaggtgcagcccggcaacctgaagaggcacctgcgcatccacagcggggagaagccctacgtgtgcatccactgccagaggcagtttgctgaccccggggccctgcagagacatgtgcgcatccacactggagagaagccctgccagtgtgtgatgtgtgggaaggccttcacccaggccagcagcctcatcgcccacgtgcggcagcacactggagagaagccctacgtgtgtgagcgctgtgggaagagatttgtgcagagcagccagctggccaaccacatccgccaccacgacaacatccggccccacaagtgcagcgtgtgcagcaaggcctttgtgaatgtgggggacctgagcaagcacatcatcatccacactggagagaagccctacctgtgtgacaagtgtggccggggcttcaacagagtggacaacctgcggagccacgtgaagacagtgcaccagggcaaggccggcatcaagatcctggagcctgaggagggcagcgaggtgtctgtggtgacagtggatgacatggtgaccctggccacagaggccctggccgccacagctgtgacccagctgactgtggtgcctgtgggctag

SEQ ID NO: 176333 - DNA, 2433 bp, synthetic construct
  misc_feature 1..2433: note = Description of Artificial Sequence: Synthetic coding sequence
  source 1..2433: mol_type = other DNA
atggacttcccccagcacagccagcacgtgctggagcagctgaaccagcagaggcagctgggcctgctgtgtgactgcacctttgtggtggatggagtgcacttcaaggcccacaaggctgtgctggccgcctgcagcgagtacttcaagatgctgtttgtggaccagaaggatgtggtgcacctggacatcagcaatgctgctggcctgggccaggtgctggagttcatgtacacagccaagctgagcctgagcccagaaaatgtggatgatgtgctggccgtggccaccttcctgcagatgcaggacatcatcacagcctgccacgccctgaagagcctggccgagcccgccaccagccctggaggaaatgctgaggccctggccacagagggcggggacaagagggccaaggaggagaaggtggccaccagcaccctgagccggctggagcaggccggccgcagcacccccatcggccccagccgggacctgaaggaggagcggggcggccaggcccagagcgctgccagcggggctgagcagacagagaaggcagatgccccccgggagcccccacctgtggagctgaagccagaccccaccagcggcatggctgctgctgaggccgaggccgccctgtctgagagcagcgagcaggagatggaggtggagcccgccaggaaaggagaggaggagcagaaggagcaggaggagcaggaggaggagggcgccggccctgctgaggtgaaggaggagggcagccagctggagaatggagaggccccagaagaaaatgaaaatgaggagagcgctggaacagacagcggccaggagctgggcagcgaggcccggggcctgcggagcggcacctacggggacagaacagagagcaaggcctacggcagcgtcatccacaagtgtgaggactgtgggaaggagttcacccacacaggcaacttcaagaggcacatccgcatccacactggagagaagcccttcagctgccgggagtgcagcaaggccttcagtgaccctgctgcctgcaaggcccacgagaagacccacagccccctgaagccctacggctgtgaggagtgtgggaagagctaccgcctcatcagcctgctgaacctgcacaagaagaggcacagcggggaggcccgctaccgctgtgaggactgtgggaagctgttcaccaccagcggcaacctgaagaggcaccagctggtgcacagcggggagaagccctaccagtgtgactactgcggccgctccttcagtgaccccaccagcaagatgaggcacctggagacccatgacacagacaaggagcacaagtgcccccactgtgacaagaagttcaaccaggtgggcaacctgaaggcccacctgaagatccacatcgcagatggccccctgaagtgccgggagtgtgggaagcagttcaccaccagcggcaacctgaagaggcacctgcgcatccacagcggggagaagccctacgtgtgcatccactgccagaggcagtttgctgaccccggggccctgcagagacatgtgcgcatccacactggagagaagccctgccagtgtgtgatgtgtgggaaggccttcacccaggccagcagcctcatcgcccacgtgcggcagcacactggagagaagccctacgtgtgtgagcgctgtgggaagagatttgtgcagagcagccagctggccaaccacatccgccaccacgacaacatccggccccacaagtgcagcgtgtgcagcaaggcctttgtgaatgtgggggacctgagcaagcacatcatcatccacactggagagaagccctacctgtgtgacaagtgtggccggggcttcaacagagtggacaacctgcggagccacgtgaagacagtgcaccagggcaaggccggcatcaagatcctggagcctgaggagggcagcgaggtgtctgtggtgacagtggatgacatggtgaccctggccacagaggccctggccgccacagctgtgacccagctgactggacctgccaccctgcctgctgtggtgcctgtgggcgctgctgtgacagcagatgaaacagaggtgctgaaggccgagatcagcaaggctgtgaagcaggtgcaggaggaggaccccaacacccacatcctgtatgcctgtgacagctgtggggacaagttcctggatgccaacagcctggcccagcacgtgcgcatccacacagcccaggccctggtgatgttccagacagatgctgacttctaccagcagtatggccctgggggcacctggccagctggccaggtgctgcaggccggggagctggtgttccggcccagagatggagctgagggccagcctgccctggccgagaccagccccacagcccctgagtgccccccacctgctgagtag

SEQ ID NO: 176334 - DNA, 2412 bp, synthetic construct
  misc_feature 1..2412: note = Description of Artificial Sequence: Synthetic coding sequence
  source 1..2412: mol_type = other DNA
atggacttcccccagcacagccagcacgtgctggagcagctgaaccagcagaggcagctgggcctgctgtgtgactgcacctttgtggtggatggagtgcacttcaaggcccacaaggctgtgctggccgcctgcagcgagtacttcaagatgctgtttgtggaccagaaggatgtggtgcacctggacatcagcaatgctgctggcctgggccaggtgctggagttcatgtacacagccaagctgagcctgagcccagaaaatgtggatgatgtgctggccgtggccaccttcctgcagatgcaggacatcatcacagcctgccacgccctgaagagcctggccgagcccgccaccagccctggaggaaatgctgaggccctggccacagagggcggggacaagagggccaaggaggagaaggtggccaccagcaccctgagccggctggagcaggccggccgcagcacccccatcggccccagccgggacctgaaggaggagcggggcggccaggcccagagcgctgccagcggggctgagcagacagagaaggcagatgccccccgggagcccccacctgtggagctgaagccagaccccaccagcggcatggctgctgctgaggccgaggccgccctgtctgagagcagcgagcaggagatggaggtggagcccgccaggaaaggagaggaggagcagaaggagcaggaggagcaggaggaggagggcgccggccctgctgaggtgaaggaggagggcagccagctggagaatggagaggccccagaagaaaatgaaaatgaggagagcgctggaacagacagcggccaggagctgggcagcgaggcccggggcctgcggagcggcacctacggggacagaacagagagcaaggcctacggcagcgtcatccacaagtgtgaggactgtgggaaggagttcacccacacaggcaacttcaagaggcacatccgcatccacactggagagaagcccttcagctgccgggagtgcagcaaggccttcagtgaccctgctgcctgcaaggcccacgagaagacccacagccccctgaagccctacggctgtgaggagtgtgggaagagctaccgcctcatcagcctgctgaacctgcacaagaagaggcacagcggggaggcccgctaccgctgtgaggactgtgggaagctgttcaccaccagcggcaacctgaagaggcaccagctggtgcacagcggggagaagccctaccagtgtgactactgcggccgctccttcagtgaccccaccagcaagatgaggcacctggagacccatgacacagacaaggagcacaagtgcccccactgtgacaagaagttcaaccaggtgggcaacctgaaggcccacctgaagatccacatcgcagatggccccctgaagtgccgggagtgtgggaagcagttcaccaccagcggcaacctgaagaggcacctgcgcatccacagcggggagaagccctacgtgtgcatccactgccagaggcagtttgctgaccccggggccctgcagagacatgtgcgcatccacactggagagaagccctgccagtgtgtgatgtgtgggaaggccttcacccaggccagcagcctcatcgcccacgtgcggcagcacactggagagaagccctacgtgtgtgagcgctgtgggaagagatttgtgcagagcagccagctggccaaccacatccgccaccacgacaacatccggccccacaagtgcagcgtgtgcagcaaggcctttgtgaatgtgggggacctgagcaagcacatcatcatccacactggagagaagccctacctgtgtgacaagtgtggccggggcttcaacagagtggacaacctgcggagccacgtgaagacagtgcaccagggcaaggccggcatcaagatcctggagcctgaggagggcagcgaggtgtctgtggtgacagtggatgacatggtgaccctggccacagaggccctggccgccacagctgtgacccagctgactgtggtgcctgtgggcgctgctgtgacagcagatgaaacagaggtgctgaaggccgagatcagcaaggctgtgaagcaggtgcaggaggaggaccccaacacccacatcctgtatgcctgtgacagctgtggggacaagttcctggatgccaacagcctggcccagcacgtgcgcatccacacagcccaggccctggtgatgttccagacagatgctgacttctaccagcagtatggccctgggggcacctggccagctggccaggtgctgcaggccggggagctggtgttccggcccagagatggagctgagggccagcctgccctggccgagaccagccccacagccccagaatgtcctcctcctgctgagtag

SEQ ID NO: 176335 - DNA, 633 bp, synthetic construct
  misc_feature 1..633: note = Description of Artificial Sequence: Synthetic coding sequence
  source 1..633: mol_type = other DNA
tgaagcaagcacatcatcatccacactggagagaagccctacctgtgtgacaagtgtggccggggcttcaacagagtggacaacctgcggagccacgtgaagacagtgcaccagggcaaggccggcatcaagatcctggagcctgaggagggcagcgaggtgtctgtggtgacagtggatgacatggtgaccctggccacagaggccctggccgccacagctgtgacccagctgactggacctgccaccctgcctgctgtggtgcctgtgggcgctgctgtgacagcagatgaaacagaggtgctgaaggccgagatcagcaaggctgtgaagcaggtgcaggaggaggaccccaacacccacatcctgtatgcctgtgacagctgtggggacaagttcctggatgccaacagcctggcccagcacgtgcgcatccacacagcccaggccctggtgatgttccagacagatgctgacttctaccagcagtatggccctgggggcacctggccagctggccaggtgctgcaggccggggagctggtgttccggcccagagatggagctgagggccagcctgccctggccgagaccagccccacagcccctgagtgccccccacctgctgagtag

SEQ ID NO: 176336 - DNA, 726 bp, synthetic construct
  misc_feature 1..726: note = Description of Artificial Sequence: Synthetic coding sequence
  source 1..726: mol_type = other DNA
tgagaagccctgcctgtgcggctgctgcggcccctgctgctgcggccccacttccaggatgcccctcctggggaccccaggcatggccagggcgcccaggtgcccaccctgcggcaggaggtgcagcccggcaacctgaagaggcacctgcgcatccacagcggggagaagccctacgtgtgcatccactgccagaggcagtttgctgaccccggggccctgcagagacatgtgcgcatccacactggagagaagccctgccagtgtgtgatgtgtgggaaggccttcacccaggccagcagcctgattgcccacgtgcggcagcacactggagagaagccctacgtgtgtgagcgctgtgggaagagatttgtgcagagcagccagctggccaaccacatccgccaccacgacaacatccggccccacaagtgcagcgtgtgcagcaaggcctttgtgaatgtgggggacctgagcaagcacatcatcatccacactggagagaagccctacctgtgtgacaagtgtggccggggcttcaacagagtggacaacctgcggagccacgtgaagacagtgcaccagggcaaggccggcatcaagatcctggagcctgaggagggcagcgaggtgtctgtggtgacagtggatgacatggtgaccctggccacagaggccctggccgccacagctgtgacccagctgactgtggtgcctgtgggctag

SEQ ID NO: 176337 - DNA, 2169 bp, synthetic construct
  misc_feature 1..2169: note = Description of Artificial Sequence: Synthetic coding sequence
  source 1..2169: mol_type = other DNA
atggacttcccccagcacagccagcacgtgctggagcagctgaaccagcagaggcagctgggcctgctgtgtgactgcacctttgtggtggatggagtgcacttcaaggcccacaaggctgtgctggccgcctgcagcgagtacttcaagatgctgtttgtggaccagaaggatgtggtgcacctggacatcagcaatgctgctggcctgggccaggtgctggagttcatgtacacagccaagctgagcctgagcccagaaaatgtggatgatgtgctggccgtggcccctggagctgagcagacagagaaggcagatgccccccgggagcccccacctgtggagctgaagccagaccccaccagcggcatggctgctgctgaggccgaggccgccctgtctgagagcagcgagcaggagatggaggtggagcccgccaggaagggggaggaggagcagaaggagcaggaggagcaggaggaggagggcgccggccctgctgaggtgaaggaggagggcagccagctggagaatggagaggcccctgaggagaatgaaaatgaggagagcgctggaacagattctggccaggagctgggcagcgaggcccggggcctgcggagcggcacctatggagacagaacagagagcaaggcctacggcagcgtcatccacaagtgtgaggactgtgggaaggagttcacccacactggaaacttcaagaggcacatccgcatccacactggagagaagcccttcagctgcagagaatgttccaaggccttcagtgaccctgctgcctgcaaggcccacgagaagacccacagccccctgaagccctacggctgtgaagaatgtgggaagagctaccgcctcatcagcctgctgaacctgcacaagaagaggcacagcggggaggcccgctaccgctgtgaggactgtgggaagctgttcaccaccagcggcaacctgaagaggcaccagctggtgcacagcggggagaagccctaccagtgtgactactgcggccgctccttcagtgaccccaccagcaagatgaggcacctggagacccatgacacagacaaggagcacaagtgcccccactgtgacaagaagttcaaccaggtgggcaacctgaaggcccacctgaagatccacatcgcagatggccccctgaagtgcagagaatgtgggaagcagttcaccaccagcggcaacctgaagaggcacctgcgcatccacagcggggagaagccctacgtgtgcatccactgccagaggcagtttgctgaccccggggccctgcagagacatgtgcgcatccacactggagagaagccctgccagtgtgtgatgtgtgggaaggccttcacccaggccagcagcctgattgcccacgtgcggcagcacactggagagaagccctacgtgtgtgagcgctgtgggaagagatttgtgcagagcagccagctggccaaccacatccgccaccacgacaacatccggccccacaagtgcagcgtgtgcagcaaggcctttgtgaatgtgggggacctgagcaagcacatcatcatccacactggagagaagccctacctgtgtgacaagtgtggccggggcttcaacagagtggacaacctgcggagccacgtgaagacagtgcaccagggcaaggccggcatcaagatcctggagcctgaggagggcagcgaggtgtctgtggtgacagtggatgacatggtgaccctggccacagaggccctggccgccacagctgtgacccagctgactgtggtgcctgtgggcgctgctgtgacagcagatgaaacagaggtgctgaaggccgagatcagcaaggctgtgaagcaggtgcaggaggaggaccccaacacccacatcctgtatgcctgtgacagctgtggggacaagttcctggatgccaacagcctggcccagcacgtgcgcatccacacagcccaggccctggtgatgttccagacagatgctgacttctaccagcagtatggccctgggggcacctggccagctggccaggtgctgcaggccggggagctggtgttccggcccagagatggagctgagggccagcctgccctggccgagaccagccccacagcccctgagtgccccccacctgctgagtag

SEQ ID NO: 176338 - DNA, 1530 bp, synthetic construct
  misc_feature 1..1530: note = Description of Artificial Sequence: Synthetic coding sequence
  source 1..1530: mol_type = other DNA
atggacttcccccagcacagccagcacgtgctggagcagctgaaccagcagaggcagctgggcctgctgtgtgactgcacctttgtggtggatggagtgcacttcaaggcccacaaggctgtgctggccgcctgcagcgagtacttcaagatgctgtttgtggaccagaaggatgtggtgcacctggacatcagcaatgctgctggaggagacaagagggccaaggaggagaaggtggccaccagcaccctgagccggctggagcaggccggccgcagcacccccatcggccccagccgggacctgaaggaggagcggggcggccaggcccagagcgctgccagcggggctgagcagacagagaaggcagatgccccccgggagcccccacctgtggagctgaagccagaccccaccagcggcatggctgctgctgaggccgaggccgccctgtctgagagcagcgagcaggagatggaggtggagcccgccaggaagggggaggaggagcagaaggagcaggaggagcaggaggaggagggcgccggccctgctgaggtgaaggaggagggcagccagctggagaatggagaggcccctgaggagaatgaaaatgaggagagcgctggaacagattctggccaggagctgggcagcgaggcccggggcctgcggagcggcacctatggagacagaacagagagcaaggcctacggcagcgtcatccacaagtgtgaggactgtgggaaggagttcacccacactggaaacttcaagaggcacatccgcatccacactggagagaagcccttcagctgcagagaatgttccaaggccttcagtgaccctgctgcctgcaaggcccacgagaagacccacagccccctgaagccctacggctgtgaagaatgtgggaagagctaccgcctcatcagcctgctgaacctgcacaagaagaggcacagcggggaggcccgctaccgctgtgaggactgtgggaagctgttcaccaccagcggcaacctgaagaggcaccagctggtgcacagcggggagaagccctaccagtgtgactactgcggccgctccttcagtgaccccaccagcaagatgaggcacctggagacccatgacacagacaaggagcacaagtgcccccactgtgacaagaagttcaaccaggtgtgtggccccctgcctgagcccgcccctggcagccgccgctggccccagccccacgcctgccacgtggtgggccgggccggcagcacagccccagccagccgcagcagcagcgcctgcagccccaggaagcaggcccagcgggagcccctgccccggggcagcagccggctgctgtgtggcggccaggccgacagcggccggggcctggtgctgaagaagtggggcggggccgcctacctgagccccctgggccctggcaccagcccagaccccggggagattgagcccttcacagatcctgggaagccagagagccagctgttcctgtgtggccggggccgctag

SEQ ID NO: 176339 - DNA, 2166 bp, synthetic construct
  misc_feature 1..2166: note = Description of Artificial Sequence: Synthetic coding sequence
  source 1..2166: mol_type = other DNA
atgatgtgctggccctggcccctgagcagcaaatgtaggaccagcagcaggcctgccatgcccagcagccacctgctgagccggctgcctgccctgggggagatgaggcggccctggccccagaaggtgtgccctgtgcccagccctggaggagacaagagggccaaggaggagaaggtggccaccagcaccctgagccggctggagcaggccggccgcagcacccccatcggccccagccgggacctgaaggaggagcggggcggccaggcccagagcgctgccagcggggctgagcagacagagaaggcagatgccccccgggagcccccacctgtggagctgaagccagaccccaccagcggcatggctgctgctgaggccgaggccgccctgtctgagagcagcgagcaggagatggaggtggagcccgccaggaaaggagaggaggagcagaaggagcaggaggagcaggaggaggagggcgccggccctgctgaggtgaaggaggagggcagccagctggagaatggagaggccccagaagaaaatgaaaatgaggagagcgctggaacagacagcggccaggagctgggcagcgaggcccggggcctgcggagcggcacctacggggacagaacagagagcaaggcctacggcagcgtcatccacaagtgtgaggactgtgggaaggagttcacccacacaggcaacttcaagaggcacatccgcatccacactggagagaagcccttcagctgccgggagtgcagcaaggccttcagtgaccctgctgcctgcaaggcccacgagaagacccacagccccctgaagccctacggctgtgaggagtgtgggaagagctaccgcctcatcagcctgctgaacctgcacaagaagaggcacagcggggaggcccgctaccgctgtgaggactgtgggaagctgttcaccaccagcggcaacctgaagaggcaccagctggtgcacagcggggagaagccctaccagtgtgactactgcggccgctccttcagtgaccccaccagcaagatgaggcacctggagacccatgacacagacaaggagcacaagtgcccccactgtgacaagaagttcaaccaggtgggcaacctgaaggcccacctgaagatccacatcgcagatggccccctgaagtgccgggagtgtgggaagcagttcaccaccagcggcaacctgaagaggcacctgcgcatccacagcggggagaagccctacgtgtgcatccactgccagaggcagtttgctgaccccggggccctgcagagacatgtgcgcatccacactggagagaagccctgccagtgtgtgatgtgtgggaaggccttcacccaggccagcagcctcatcgcccacgtgcggcagcacactggagagaagccctacgtgtgtgagcgctgtgggaagagatttgtgcagagcagccagctggccaaccacatccgccaccacgacaacatccggccccacaagtgcagcgtgtgcagcaaggcctttgtgaatgtgggggacctgagcaagcacatcatcatccacactggagagaagccctacctgtgtgacaagtgtggccggggcttcaacagagtggacaacctgcggagccacgtgaagacagtgcaccagggcaaggccggcatcaagatcctggagcctgaggagggcagcgaggtgtctgtggtgacagtggatgacatggtgaccctggccacagaggccctggccgccacagctgtgacccagctgactgtggtgcctgtgggcgctgctgtgacagcagatgaaacagaggtgctgaaggccgagatcagcaaggctgtgaagcaggtgcaggaggaggaccccaacacccacatcctgtatgcctgtgacagctgtggggacaagttcctggatgccaacagcctggcccagcacgtgcgcatccacacagcccaggccctggtgatgttccagacagatgctgacttctaccagcagtatggccctgggggcacctggccagctggccaggtgctgcaggccggggagctggtgttccggcccagagatggagctgagggccagcctgccctggccgagaccagccccacagccccagaatgtcctcctcctgctgagtag

SEQ ID NO: 176340 - DNA, 2007 bp, synthetic construct
  misc_feature 1..2007: note = Description of Artificial Sequence: Synthetic coding sequence
  source 1..2007: mol_type = other DNA
atgacagagcgcatccacagcatcaacctgcacaacttcagcaacagcgtgctggagaccctgaatgagcagaggaacagaggccacttctgtgatgtgacagtgcgcatccacggctccatgctgcgggcccaccgctgtgtgctggccgccggcagccccttcttccaggacaagctgctgctgggctacagcgacatcgagatccccagcgtggtgtctgtgcagagcgtgcagaagctgattgacttcatgtacagcggcgtgctgcgggtgtcccagagcgaggccctgcagatcctgacagctgccagcatcctgcagatcaagacagtgattgatgaatgtaccagaattgtgtcccagaatgtgggagatgtgtttcctggcatccaggacagcggccaggacaccccccggggcaccccagagagcggcaccagcggccagagcagtgacacagagagcggctacctgcagagccacccccagcacagcgtggaccgcatctacagcgccctgtatgcctgcagcatgcagaatggaagtggagagaggagcttctacagcggggctgtggtgagccaccatgaaacagccctgggcctgccccgggaccaccacatggaggaccccagctggatcacccgcatccacgagaggagccagcagatggagcgctacctgagcaccaccccagagaccacccactgcaggaagcagcccaggcctgtgcgcatccagaccctggtgggcaacatccacatcaagcaggagatggaggatgattatgactactacggccagcagagggtgcagatcctggagagaaatgaaagtgaggagtgcacagaggacacagaccaggccgagggcacagaaagtgagcccaagggggagagctttgacagcggcgtgagcagcagcatcggcacagagccagacagcgtggagcagcagtttggacctggagctgcccgggacagccaggccgagcccacccagcctgagcaggccgctgaggccccagctgagggcggcccccagaccaaccagctggagactggagccagcagccctgagaggagcaatgaggtggagatggacagcaccgtcatcaccgtgagcaacagcagtgacaagtctgtgctgcagcagcccagcgtgaacaccagcatcggccagcccctgcccagcacccagctgtacctgcggcagacagagaccctgaccagcaacctgaggatgcccctgaccctgaccagcaacacccaggtgattggaacagctggcaacacctacctgcctgccctcttcaccacccagcctgctggcagcggccccaagcccttcctgttcagcctgccccagcccctggccggccagcagacccagtttgtgacagtgtcccagcccggcctgagcaccttcaccgcccagctgcctgccccccagcccctggccagcagcgctggccacagcacagccagcggccagggcgagaagaagccctatgagtgcaccctgtgcaacaagaccttcaccgccaagcagaactacgtgaagcacatgtttgtgcacactggagagaagccccaccagtgcagcatctgctggaggagcttcagcctgaaggactacctgatcaagcacatggtgacccacactggagtgcgggcctaccagtgcagcatctgcaacaagcgcttcacccagaagagcagcctgaatgtgcacatgaggctgcacagaggagagaagagctatgagtgctacatctgcaagaagaagttcagccacaagaccctgctggagagacatgtggccctgcacagcgccagcaatggcaccccacctgctggcaccccacctggggcccgggccggccccccaggagtggtggcctgcacagagggcaccacctacgtgtgcagcgtgtgcccagccaagtttgaccagatcgagcagttcaatgaccacatgaggatgcacgtgtctgatggatag

SEQ ID NO: 176341 - DNA, 2007 bp, synthetic construct; identical to SEQ ID NO: 176340
  misc_feature 1..2007: note = Description of Artificial Sequence: Synthetic coding sequence
  source 1..2007: mol_type = other DNA

SEQ ID NO: 176342 - DNA, 2007 bp, synthetic construct; identical to SEQ ID NO: 176340
  misc_feature 1..2007: note = Description of Artificial Sequence: Synthetic coding sequence
  source 1..2007: mol_type = other DNA

SEQ ID NO: 176343 - DNA, 2007 bp, synthetic construct; identical to SEQ ID NO: 176340
  misc_feature 1..2007: note = Description of Artificial Sequence: Synthetic coding sequence
  source 1..2007: mol_type = other DNA

SEQ ID NO: 176344 - DNA, 174 bp, synthetic construct
  misc_feature 1..174: note = Description of Artificial Sequence: Synthetic coding sequence
  source 1..174: mol_type = other DNA
atgacagagcgcatccacagcatcaacctgcacaacttcagcaacagcgtgctggagaccctgaatgagcagaggaacagaggccacttctgtgatgtgacagtgcgcatccacggctccatgctgcgggcccaccgctgtgtgctggccgccggcagccccttcttccagtag

SEQ ID NO: 176345 - DNA, 2007 bp, synthetic construct; identical to SEQ ID NO: 176340
  misc_feature 1..2007: note = Description of Artificial Sequence: Synthetic coding sequence
  source 1..2007: mol_type = other DNA

SEQ ID NO: 176346 - DNA, 2226 bp, synthetic construct
  misc_feature 1..2226: note = Description of Artificial Sequence: Synthetic coding sequence
  source 1..2226: mol_type = other DNA
atgctggagaggaagaagcccaagacagctgagaaccagaaggccagcgaggagaatgagatcacccagcccggcggcagcagcgccaagccaggcctgccctgcctgaactttgaggccgtgctgagcccagaccctgccctgatccacagcacccacagcctgaccaacagccacgcccacacaggcagcagtgactgtgacatcagctgcaagggcatgacagagcgcatccacagcatcaacctgcacaacttcagcaacagcgtgctggagaccctgaatgagcagaggaacagaggccacttctgtgatgtgacagtgcgcatccacggctccatgctgcgggcccaccgctgtgtgctggccgccggcagccccttcttccaggacaagctgctgctgggctacagcgacatcgagatccccagcgtggtgtctgtgcagagcgtgcagaagctgattgacttcatgtacagcggcgtgctgcgggtgtcccagagcgaggccctgcagatcctgacagctgccagcatcctgcagatcaagacagtgattgatgagtgcacccgcatcgtgtcccagaatgtgggagatgtgtttcctggcatccaggacagcggccaggacaccccccggggcaccccagagagcggcaccagcggccagagcagtgacacagaaagtggctacctgcagagccacccccagcacagcgtggaccgcatctacagcgccctgtatgcctgcagcatgcagaatggcagcggggagaggagcttctacagcggggctgtggtgagccaccacgagacagccctgggcctgccccgggaccaccacatggaggaccccagctggatcacccgcatccacgagaggagccagcagatggagcgctacctgagcaccaccccagagaccacccactgcaggaagcagcccaggcctgtgcgcatccagaccctggtgggcaacatccacatcaagcaggagatggaggatgattatgactactacggccagcagagggtgcagatcctggagagaaatgaaagtgaagaatgtacagaggacacagaccaggccgagggcacagagagcgagcccaagggggagagctttgattctggagtgagcagcagcattggaacagagccagattctgtggagcagcagtttggacctggggccgcccgggacagccaggccgagcccacccagcctgagcaggccgctgaggccccagctgagggcggcccccagaccaaccagctggagaccggggccagcagccctgagaggagcaatgaggtggagatggacagcaccgtcatcaccgtgagcaacagcagtgacaagtctgtgctgcagcagcccagcgtgaacaccagcatcggccagcccctgcccagcacccagctgtacctgcggcagacagagaccctgaccagcaacctgaggatgcccctgaccctgaccagcaacacccaggtgattggaacagctggcaacacctacctgcctgccctcttcaccacccagcctgctggcagcggccccaagcccttcctgttcagcctgccccagcccctggccggccagcagacccagtttgtgacagtgtcccagcccggcctgagcaccttcaccgcccagctgcctgccccccagcccctggccagcagcgctggccacagcacagccagcggccagggcgagaagaagccctatgaatgtaccctgtgcaacaagaccttcaccgccaagcagaactacgtgaagcacatgtttgtgcacactggagagaagccccaccagtgcagcatctgctggaggagcttcagcctgaaggactacctgatcaagcacatggtgacccacactggagtgcgggcctaccagtgcagcatctgcaacaagcgcttcacccagaagagcagcctgaatgtgcacatgaggctgcacagaggagagaagagctatgagtgctacatctgcaagaagaagttcagccacaagaccctgctggagcggcacgtggccctgcacagcgccagcaatggcaccccacctgctggcaccccacctggggcccgggccggccccccaggagtggtggcctgcacagagggcaccacctacgtgtgcagcgtgtgcccagccaagtttgaccagatcgagcagttcaatgaccacatgaggatgcacgtgtctgatggatag

SEQ ID NO: 176347 - DNA, 2007 bp, synthetic construct; identical to SEQ ID NO: 176340
  misc_feature 1..2007: note = Description of Artificial Sequence: Synthetic coding sequence
  source 1..2007: mol_type = other DNA

SEQ ID NO: 176348 - DNA, 60 bp, synthetic construct
  misc_feature 1..60: note = Description of Artificial Sequence: Synthetic coding sequence
  source 1..60: mol_type = other DNA
atgctggagaggaagaagcccaagacagctgagaaccagaaggccagcgaggagaactag

SEQ ID NO: 176349 - DNA, 489 bp, synthetic construct
  misc_feature 1..489: note = Description of Artificial Sequence: Synthetic coding sequence
  source 1..489: mol_type = other DNA
atggccgagaccgtggccgacaccaggaggctcatcaccaagccccagaacctgaatgatgcctacggcccccccagcaacttcctggagattgatgtgagcaacccccagacagtgggcgtgggccggggccgcttcaccacctatgagatccgggtgaagaccaacctgcccatcttcaagctgaaggagagcacagtgagaagacgctacagcgactttgagtggctgcggtctgagctggagcgggagagcaaggtggtggtgccccccctgcccgggaaggccttcctgcggcagctgcccttcagaggagatgatggcatctttgatgacaacttcatcgaggagaggaagcagggcctggagcagttcatcaacaaggtggccggccaccccctggcccagaatgaacgctgcctgcacatgttcctgcaggatgagatcatcgacaagagctacacccccagcaagatcagacatgcctag

SEQ ID NO: 176350 - DNA, 1308 bp, synthetic construct
  misc_feature 1..1308: note = Description of Artificial Sequence: Synthetic coding sequence
  source 1..1308: mol_type = other DNA
atggacacagccagccacagcctggtgctgctgcagcagctgaacatgcagcgggagtttggcttcctgtgtgactgcaccgtggccatcggagatgtgtacttcaaggcccacagagctgtgctggccgccttcagcaactacttcaagatgatcttcatccaccagaccagcgagtgcatcaagatccagcccacagacatccagcctgacatcttctcctacctgctgcacatcatgtacaccgggaagggccccaagcagatcgtggaccacagccggctggaggagggcatccgcttcctgcacgccgactacctgagccacatcgccacagagatgaaccaggtgttcagccctgagaccgtgcagagcagcaacctgtatggcatccagatcagcaccacccagaagacagtggtgaagcagggcctggaggtgaaggaggcccccagcagcaacagcggcaacagagctgctgtgcagggcgaccacccccagctgcagctgagcctggccatcggcctggatgatggaacagctgaccagcagagggcctgcccagccacccaggccctggaggagcaccagaagccccctgtgtccatcaagcaggagcgctgtgaccctgagagcgtcatcagccagagccaccccagccccagcagcgaggtgacaggccccaccttcacagagaacagcgtgaagatccacctgtgccactactgtggggagagatttgacagccgcagcaacctgcggcagcacctgcacacccacgtgtctggcagcctgccctttggagtgcctgccagcatcctggagagcaatgacctgggggaggtgcaccccctgaatgaaaattctgaggccctggagtgccggcggctgagcagcttcatcgtgaaggaaaatgagcagcagcctgaccacaccaacagaggcaccacagagcccctgcagatcagccaggtgtccctcatcagcaaggacacagagcctgtggagctgaactgcaacttctccttcagcaggaagaggaagatgagctgcaccatctgtggccacaagttccccaggaagagccagctgctggagcacatgtacacccacaagggcaagagctaccgctacaaccgctgccagagatttggaaatgccctggcccagcgcttccagccctactgtgacagctggagcgatgtgtccctgaagagcagccggctgagccaggagcacctggacctgccctgtgccctggagagcgagctgacccaggagaatgtggacaccatcctggtggagtag

SEQ ID NO: 176351 - DNA, 1308 bp, synthetic construct; identical to SEQ ID NO: 176350
  misc_feature 1..1308: note = Description of Artificial Sequence: Synthetic coding sequence
  source 1..1308: mol_type = other DNA

SEQ ID NO: 176352 - DNA, 1464 bp, synthetic construct
  misc_feature 1..1464: note = Description of Artificial Sequence: Synthetic coding sequence
  source 1..1464: mol_type = other DNA
atgagcctgccccccatccggctgcccagcccctacggcagtgaccggctggtgcagctggccgcccggctgcggcctgccctgtgtgacaccctcatcaccgtgggcagccaggagttccctgcccacagcctggtgctggccggcgtgtcccagcagctgggccggcggggccagtgggccctgggggagggcatcagccccagcacctttgcccagctgctgaactttgtgtatggagagagcgtggagctgcagcctggagagctgcggcccctgcaggaggccgcccgggccctgggcgtgcagagcctggaggaggcctgctggagggcccggggggaccgggccaagaagccagaccccggcctgaagaagcaccaggaggagcctgagaagcccagcaggaaccctgagcgggagctgggggaccctggagagaagcagaagccagagcaggtgtccaggactggaggccgggagcaggagatgctgcacaagcacagccccccccggggccggcctgagatggccggggccacccaggaggcccagcaggagcagaccaggagcaaggagaagaggctgcaggcccctgtgggccagagaggagcagatggcaagcatggagtgctgacctggctgagagaaaatcctgggggcagcgaggagagcctgaggaagctgcccggccccctgcccccagctggcagcctgcagacctctgtgaccccccggcccagctgggccgaggccccctggctggtgggcggccagcctgccctgtggagcatcctgctgatgccacccaggtatggcatccccttctaccacagcacccccaccactggagcctggcaggaggtgtggagggagcagaggatccccctgagcctgaatgcccccaagggcctgtggagccagaaccagctggccagcagcagccccaccccaggcagcctgccccagggccctgcccagctgagccctggagagatggaggagagtgaccagggccacactggagccctggccacctgtgccggccacgaggacaaggccggctgccccccccggccccaccccccaccagcccccccagcccggagccggccctatgcctgcagcgtgtgtgggaagcgcttcagcctgaagcaccagatggagacccactacagagtgcacactggagagaagcccttcagctgcagcctgtgcccccagaggagccgggacttcagcgccatgaccaagcacctgcggacccatggagctgccccctaccgctgcagcctgtgtggggccggctgccccagcctggcctccatgcaggcccacatgaggggccacagccccagccagctgcccccaggctggaccatccgcagcaccttcctgtacagcagcagccggcccagccggcccagcaccagcccctgctgccccagcagcagcaccacctag

SEQ ID NO: 176353 - DNA, 1464 bp, synthetic construct; identical to SEQ ID NO: 176352
  misc_feature 1..1464: note = Description of Artificial Sequence: Synthetic coding sequence
  source 1..1464: mol_type = other DNA

SEQ ID NO: 176354 - DNA, 2019 bp, synthetic construct
  misc_feature 1..2019: note = Description of Artificial Sequence: Synthetic coding sequence
  source 1..2019: mol_type = other DNA
atggagagcaggaagctgatcagcgccacagacatccagtacagcggcagcctgctgaacagcctgaatgagcagaggggccacggcctcttctgtgatgtgacagtgattgtggaggacaggaagttccgggcccacaagaacatcctgagcgccagcagcacctacttccaccagctgttctctgtggccggccaggtggtggagctgtccttcatccgggcagagatctttgctgagatcctgaactacatctacagcagcaagatcgtgcgggtgcggagtgacctgctggatgagctgatcaagagcggccagctgctgggcgtgaagttcatcgccgagctgggcgtgcccctgagccaggtgaagagcatctctggaacagcccaggacggcaacacagagcccctgcccccagacagcggggacaagaacctggtgatccagaagagcaaggatgaggcccaggacaatggagccaccatcatgcccatcatcacagagagcttcagcctgtctgctgaggactatgagatgaagaagatcatcgtgacagacagtgatgatgatgatgatgatgtgatcttctgcagcgagatcctgcccaccaaggagaccctgcccagcaacaacacagtggcccaggtgcagagcaaccctggccctgtggccatcagtgatgtggcccccagcgccagcaacaacagcccccccctgaccaacatcacccccacccagaagctgcccacccctgtgaaccaggccaccctgagccagacccagggcagcgagaagctgctggtgtcctctgcccccacccacctgacccccaacatcatcctgctgaaccagacccccctgagcaccccaccaaatgtgagcagcagcctgcccaaccacatgcccagcagcatcaacctgctggtgcagaaccagcagacccccaacagcgccatcctgaccggcaacaaggccaatgaggaggaggaggaggagatcattgatgatgatgatgacaccatcagcagcagcccagacagcgctgtgagcaacaccagcctggtgccccaggccgacaccagccagaacaccagctttgatggcagcctcatccagaagatgcagatccccaccctgctgcaggagcccctgagcaacagcctgaagatcagtgacatcatcaccaggaacaccaatgaccccggggtgggcagcaagcacctgatggagggccagaagatcatcaccctggacacagccacagaaattgagggcctgagcacaggctgcaaggtgtatgccaacattggagaggacacctatgacatcgtcatccctgtgaaggatgatcctgatgaaggagaggcccggctggagaatgagatccccaagaccagcggcagcgagatggccaacaagaggatgaaggtgaagcatgatgaccactatgagctgattgtggatggccgggtgtactacatctgcatcgtgtgcaagaggagctatgtgtgcctgaccagcctgcggcggcacttcaacatccacagctgggagaagaagtacccctgccgctactgtgagaaggtgttccccctggccgagtaccgcaccaagcatgagatccaccacactggagagcggcgctaccagtgcctggcctgtgggaagagcttcatcaactaccagttcatgagcagccacatcaagtctgtgcacagccaggaccccagcggggacagcaagctgtaccgcctgcacccctgccgcagcctgcagatccggcagtatgcctacctgagtgacaggagcagcaccatcccagccatgaaggatgatggcatcggctacaaggtggacaccgggaaggagccccctgtgggcaccaccaccagcacccagaacaagcccatgacctgggaggacatcttcatccagcaggagaatgacagcatcttcaagcagaatgtgacagatggcagcacagaatttgagttcatcatccctgagagctactag

SEQ ID NO: 176355 - DNA, 2019 bp, synthetic construct; identical to SEQ ID NO: 176354
  misc_feature 1..2019: note = Description of Artificial Sequence: Synthetic coding sequence
  source 1..2019: mol_type = other DNA

SEQ ID NO: 176356 - DNA, 2019 bp, synthetic construct; identical to SEQ ID NO: 176354
  misc_feature 1..2019: note = Description of Artificial Sequence: Synthetic coding sequence
  source 1..2019: mol_type = other DNA

SEQ ID NO: 176357 - DNA, 1515 bp, synthetic construct
  misc_feature 1..1515: note = Description of Artificial Sequence: Synthetic coding sequence
  source 1..1515: mol_type = other DNA
atgtctgtggagatggacagcagcagcttcatccagtttgatgtgcctgagtacagcagcacagtgctgagccagctgaatgagctgcggctgcagggcaagctgtgtgacatcatcgtgcacatccagggccagcccttccgggcccacaaggctgtgctggccgccagcagcccctacttccgggaccacagcgccctgagcaccatgagcggcctgagcatcagcgtcatcaagaaccccaacgtgtttgagcagctgctgtccttctgctacacaggccgcatgagcctgcagctgaaggatgtggtgtccttcctgacagctgccagcttcctgcagatgcagtgtgtgattgacaagtgcacccagatcctggagagcatccacagcaagatctctgtgggagatgtggacagcgtgacagtgggcgcagaagaaaatcctgagagcagaaatggagtgaaggacagcagcttctttgccaaccctgtggagatcagccccccctactgcagccagggccggcagcccacagccagcagtgacctgaggatggagaccacccccagcaaggccctgcggagccggctgcaggaggagggccacagcgaccggggcagcagcggctctgtgtctgaatatgagatccagattgaaggagaccacgagcagggcgacctgctggtgcgggagagccagatcacagaggtgaaggtgaagatggagaagagtgaccggcccagctgcagcgacagcagcagcctgggagatgatggctaccacacagagatggtggatggagagcaggtggtggccgtgaatgtgggcagctatggctctgtgctgcagcacgcctacagctacagccaggccgccagccagcccaccaacgtgtctgaggccttcggcagcctgagcaacagcagccccagccgctccatgctgagctgcttccggggcggccgggcccggcagaagagggccctgtctgtgcacctgcacagcgacctgcagggcctggtgcagggcagtgacagcgaggccatgatgaacaaccctggctatgagagcagcccccgggagaggtctgcccggggccactggtacccctacaatgaaagactcatctgcatctactgcggcaagagcttcaaccagaagggcagcctggacagacacatgaggctgcacatgggcatcaccccatttgtgtgcaagttctgtgggaagaagtacaccaggaaggaccagctggagtaccacatccggggccacacagatgacaagcccttccgctgtgagatctgtgggaagtgcttccccttccagggcaccctgaaccagcacctgaggaagaaccaccctggggtggccgaggtgcgcagcagaattgagagccctgagaggacagatgtgtatgtggagcagaagctggagaatgatgccagcgccagcgagatgggcctggacagcaggatggagatccacacagtgtctgatgccccagactag

SEQ ID NO: 176358 - DNA, 1503 bp, synthetic construct
  misc_feature 1..1503: note = Description of Artificial Sequence: Synthetic coding sequence
  source 1..1503: mol_type = other DNA
atggacagcagcagcttcatccagtttgatgtgcctgagtacagcagcacagtgctgagccagctgaatgagctgcggctgcagggcaagctgtgtgacatcatcgtgcacatccagggccagcccttccgggcccacaaggctgtgctggccgccagcagcccctacttccgggaccacagcgccctgagcaccatgagcggcctgagcatcagcgtcatcaagaaccccaacgtgtttgagcagctgctgtccttctgctacacaggccgcatgagcctgcagctgaaggatgtggtgtccttcctgacagctgccagcttcctgcagatgcagtgtgtgattgacaagtgcacccagatcctggagagcatccacagcaagatctctgtgggagatgtggacagcgtgacagtgggcgcagaagaaaatcctgagagcagaaatggagtgaaggacagcagcttctttgccaaccctgtggagatcagccccccctactgcagccagggccggcagcccacagccagcagtgacctgaggatggagaccacccccagcaaggccctgcggagccggctgcaggaggagggccacagcgaccggggcagcagcggctctgtgtctgaatatgagatccagattgaaggagaccacgagcagggcgacctgctggtgcgggagagccagatcacagaggtgaaggtgaagatggagaagagtgaccggcccagctgcagcgacagcagcagcctgggagatgatggctaccacacagagatggtggatggagagcaggtggtggccgtgaatgtgggcagctatggctctgtgctgcagcacgcctacagctacagccaggccgccagccagcccaccaacgtgtctgaggccttcggcagcctgagcaacagcagccccagccgctccatgctgagctgcttccggggcggccgggcccggcagaagagggccctgtctgtgcacctgcacagcgacctgcagggcctggtgcagggcagtgacagcgaggccatgatgaacaaccctggctatgagagcagcccccgggagaggtctgcccggggccactggtacccctacaatgaaagactcatctgcatctactgcggcaagagcttcaaccagaagggcagcctggacagacacatgaggctgcacatgggcatcaccccatttgtgtgcaagttctgtgggaagaagtacaccaggaaggaccagctggagtaccacatccggggccacacagatgacaagcccttccgctgtgagatctgtgggaagtgcttccccttccagggcaccctgaaccagcacctgaggaagaaccaccctggggtggccgaggtgcgcagcagaattgagagccctgagaggacagatgtgtatgtggagcagaagctggagaatgatgccagcgccagcgagatgggcctggacagcaggatggagatccacacagtgtctgatgccccagactag

SEQ ID NO: 176359 - DNA, 3591 bp, synthetic construct
  misc_feature 1..3591: note = Description of Artificial Sequence: Synthetic coding sequence
  source 1..3591: mol_type = other DNA
atgatgacagtgatgagcctgagccgggacctgaaggatgacttccacagcgacacagtgctgagcatcctgaatgagcagaggatccggggcatcctgtgtgatgtgaccatcatcgtggaggacaccaagttcaaggcccacagcaatgtgctggccgccagcagcctgtacttcaagaacatcttctggagccacaccatctgcatcagcagccacgtgctggagctggatgacctgaaggccgaggtgttcacagagatcctgaactacatctacagcagcacagtggtggtgaagaggcaggagaccgtgacagacctggccgctgctgggaagaagctgggcatctccttcctggaggacctgacagacaggaacttcagcaacagccctggcccctacgtgttctgcatcacagagaagggcgtggtgaaggaggagaagaatgagaagagacatgaggagcccgccatcaccaacggcccccgcatcaccaatgccttcagcatcatcgagacagagaacagcaacaacatgttcagccccctggacctgcgggccagcttcaagaaggtgtctgacagcatgaggacagccagcctgtgcctggagaggacagatgtgtgccatgaagctgagcctgtgaggaccctggccgagcacagctatgctgtgtcctctgtggccgaggcctaccgcagccagcctgtgcgggagcatgatggcagcagccctggcaacacaggcaaggagaactgtgaggccctggccgccaagcccaagacctgcaggaagcccaagaccttcagcatcccccaggacagcgacagcgccacagagaacatccccccacctcctgtgagcaacctggaggtgaaccaggagaggagcccccagcctgctgctgtgctgaccaggagcaagagccccaacaatgaaggagatgtgcacttcagccgggaggatgagaaccagagcagtgatgtgcccggccccccagctgctgaggtgccccccctggtgtacaactgcagctgctgcagcaaggcctttgacagcagcaccctgctgagcgcccacatgcagctgcacaagcccacccaggagcccctggtgtgcaagtactgcaacaagcagttcaccaccctgaaccggctggacagacatgagcagatctgcatgaggagcagccacatgcccatccctgggggcaaccagcgcttcctggagaactaccccaccatcggccagaatggaggcagcttcaccggccctgagcccctgctgtctgagaacagaattggagagttcagcagcacaggcagcaccctgcctgacacagaccacatggtgaagtttgtgaatggccagatgctgtacagctgtgtggtgtgcaagaggagctatgtgaccctgagcagcctgcggagacatgccaacgtgcacagctggaggaggacctacccctgccactactgcaacaaggtgtttgccctggccgagtaccgcaccaggcatgagatctggcacactggagagcggcgctaccagtgcatcttctgcctggagaccttcatgacctactacatcctgaagaaccaccagaagagcttccacgccatcgaccaccggctgagcatcagcaagaagacagccaacggcggcctgaagcccagcgtgtacccctacaagctgtaccgcctgctgcccatgaagtgcaagagggccccctacaagagctacagaaacagcagctatgaaaatgcccgggagaacagccagatgaatgaaagtgcccctggcacctacgtggtgcagaacccccacagcagcgagctgcccaccctgaacttccaggacacagtgaacaccctgaccaacagccctgccatccccctggagaccagcgcctgccaggacatccccaccagcgccaacgtgcagaatgctgagggcaccaagtggggcgaggaggccctgaagatggacctggacaacaacttctacagcacagaggtgtctgtgagcagcacagaaaatgctgtgtccagtgacctgcgggctggagatgtgcctgtgctgagcctgagcaacagcagtgaaaatgctgccagcgtcatctcctacagcggcagcgcccccagcgtcatcgtgcacagcagccagttcagcagcgtcatcatgcacagcaatgccatcgccgccatgaccagcagcaaccaccgggccttcagtgaccctgctgtgtcccagagcctgaaggatgacagcaagccagagccagacaaggtgggccgctttgccagccggcccaagagcatcaaggagaagaagaagaccaccagccacaccagaggagagatccctgaggagagcaactacgtggccgaccccggcggcagcctgagcaagaccaccaacattgctgaggagaccagcaagattgagacctacatcgccaagccagccctgcccggcaccagcaccaacagcaatgtggcccccctgtgccagatcaccgtgaagattggaaatgaggccatcgtgaagaggcacatcctgggcagcaagctgttctacaagagaggaagaagacccaagtaccagatgcaggaggagcccctgccccagggcaatgaccctgagcccagcggggacagccccctgggcctgtgccagagcgagtgcatggagatgtctgaggtgtttgatgatgccagtgaccaggacagcacagacaagccctggaggccctactacaactacaagcccaagaagaagagccggcagctgaagaagatgaggaaggtgaactggaggaaggagcacggcaacagaagccccagccacaagtgcaagtacccagctgagctggactgtgctgtgggcaaggccccccaggacaagccctttgaggaggaggagaccaaggagatgcccaagctgcagtgtgagctgtgtgatggagacaaggctgtgggcgccggcaaccagggccggccccaccgccacctgaccagccggccctatgcctgtgagctgtgtgccaagcagttccagagccccagcaccctgaagatgcacatgcgctgccacactggagagaagccctaccagtgcaagacctgtggccgctgcttctctgtgcagggcaacctgcagaagcatgagcgcatccacctgggcctgaaggagtttgtgtgccagtactgcaacaaggccttcaccctgaatgagaccctgaagatccacgagcgcatccacactggagagaagcgctaccactgccagttctgcttccagcgcttcctgtacctgagcaccaagagaaatcatgagcagaggcacatccgggagcacaacgggaagggctacgcctgcttccagtgccccaagatctgcaagacagctgctgccctgggcatgcaccagaagaagcacctgttcaagagccccagccagcaggagaagattggagatgtgtgccacgagaacagcaaccccctggagaaccagcacttcatcggctctgaagataatgaccagaaggacaacatccagacaggagtggagaatgtggtgctgtag

SEQ ID NO: 176360 - DNA, 3588 bp, synthetic construct
  misc_feature 1..3588: note = Description of Artificial Sequence: Synthetic coding sequence
  source 1..3588: mol_type = other DNA
atgacagtgatgagcctgagccgggacctgaaggatgacttccacagcgacacagtgctgagcatcctgaatgagcagaggatccggggcatcctgtgtgatgtgaccatcatcgtggaggacaccaagttcaaggcccacagcaatgtgctggccgccagcagcctgtacttcaagaacatcttctggagccacaccatctgcatcagcagccacgtgctggagctggatgacctgaaggccgaggtgttcacagagatcctgaactacatctacagcagcacagtggtggtgaagaggcaggagaccgtgacagacctggccgccgccggcaagaagctgggcatctccttcctggaggacctgacagacaggaacttcagcaacagccctggcccctacgtgttctgcatcacagagaagggcgtggtgaaggaggagaagaatgagaagagacatgaggagcccgccatcaccaacggcccccgcatcaccaatgccttcagcatcattgaaacagagaacagcaacaacatgttcagccccctggacctgcgggccagcttcaagaaggtgtctgacagcatgaggacagccagcctgtgcctggagaggacagatgtgtgccacgaggccgagcctgtgaggaccctggccgagcacagctatgctgtgtcctctgtggccgaggcctaccgcagccagcctgtgcgggagcatgatggcagcagccctggcaacacaggcaaggagaactgtgaggccctggccgccaagcccaagacctgcaggaagcccaagaccttcagcatcccccaggacagcgacagcgccacagagaacatccccccacctcctgtgagcaacctggaggtgaaccaggagaggagcccccagcctgctgctgtgctgaccaggagcaagagccccaacaatgaaggagatgtgcacttcagcagagaagatgagaaccagagcagtgatgtgcccggccccccagctgctgaggtgccccccctggtgtacaactgcagctgctgcagcaaggcctttgacagcagcaccctgctgagcgcccacatgcagctgcacaagcccacccaggagcccctggtgtgcaagtactgcaacaagcagttcaccaccctgaaccggctggacagacatgagcagatctgcatgaggagcagccacatgcccatccctgggggcaaccagcgcttcctggagaactaccccaccatcggccagaatggaggcagcttcaccggccctgagcccctgctgtctgaaaatcgcatcggggagttcagcagcacaggcagcaccctgcctgacacagaccacatggtgaagtttgtgaatggccagatgctgtacagctgtgtggtgtgcaagaggagctatgtgaccctgagcagcctgcggagacatgccaacgtgcacagctggaggaggacctacccctgccactactgcaacaaggtgtttgccctggccgagtaccgcaccaggcatgagatctggcacactggagagcggcgctaccagtgcatcttctgcctggagaccttcatgacctactacatcctgaagaaccaccagaagagcttccacgccatcgaccaccggctgagcatcagcaagaagacagccaatggaggcctgaagcccagcgtgtacccctacaagctgtaccgcctgctgcccatgaagtgcaagagggccccctacaagagctacagaaacagcagctatgaaaatgcccgggagaacagccagatgaatgaaagtgcccctggcacctacgtggtgcagaacccccacagcagcgagctgcccaccctgaacttccaggacacagtgaacaccctgaccaacagccctgccatccccctggagaccagcgcctgccaggacatccccaccagcgccaacgtgcagaatgctgagggcaccaagtggggcgaggaggccctgaagatggacctggacaacaacttctacagcacagaggtgtctgtgagcagcacagaaaatgctgtgtccagtgacctgcgggctggagatgtgcctgtgctgagcctgagcaacagcagtgaaaatgctgccagcgtcatctcctacagcggcagcgcccccagcgtgattgtgcacagcagccagttcagcagcgtcatcatgcacagcaatgccatcgccgccatgaccagcagcaaccaccgggccttcagtgaccctgctgtgtcccagagcctgaaggatgacagcaagccagagccagacaaggtgggccgctttgccagccggcccaagagcatcaaggagaagaagaagaccaccagccacaccagaggagagatccctgaggagagcaactacgtggccgaccccggcggcagcctgagcaagaccaccaacattgctgaggagaccagcaagattgagacctacatcgccaagccagccctgcccggcaccagcaccaacagcaatgtggcccccctgtgccagatcaccgtgaagattggaaatgaggccatcgtgaagaggcacatcctgggcagcaagctgttctacaagaggggccggcggcccaagtaccagatgcaggaggagcccctgccccagggcaatgaccctgagcccagcggggacagccccctgggcctgtgccagagcgagtgcatggagatgtctgaggtgtttgatgatgccagtgaccaggacagcacagacaagccctggaggccctactacaactacaagcccaagaagaagagccggcagctgaagaagatgaggaaggtgaactggaggaaggagcacggcaacagaagccccagccacaagtgcaagtacccagctgagctggactgtgctgtgggcaaggccccccaggacaagccctttgaggaggaggagaccaaggagatgcccaagctgcagtgtgagctgtgtgatggagacaaggctgtgggcgccggcaaccagggccggccccaccgccacctgaccagccggccctatgcctgtgagctgtgtgccaagcagttccagagccccagcaccctgaagatgcacatgcgctgccacactggagagaagccctaccagtgcaagacctgtggccgctgcttctctgtgcagggcaacctgcagaagcatgagcgcatccacctgggcctgaaggagtttgtgtgccagtactgcaacaaggccttcaccctgaatgagaccctgaagatccacgagcgcatccacactggagagaagcgctaccactgccagttctgcttccagcgcttcctgtacctgagcaccaagaggaaccacgagcagaggcacatccgggagcacaacgggaagggctacgcctgcttccagtgccccaagatctgcaagacagctgctgccctgggcatgcaccagaagaagcacctgttcaagagccccagccagcaggagaagattggagatgtgtgccacgagaacagcaaccccctggagaaccagcacttcatcggcagcgaggacaatgaccagaaggacaacatccagacaggagtggagaatgtggtgctgtag

SEQ ID NO: 176361 - DNA, 105 bp, synthetic construct
  misc_feature 1..105: note = Description of Artificial Sequence: Synthetic coding sequence
  source 1..105: mol_type = other DNA
atgacagtgatgagcctgagccgggacctgaaggatgacttccacagcgacacagtgctgagcatcctgaatgagcagaggatccggggcatcctgtgtgactag

SEQ ID NO: 176362 - DNA, 285 bp, synthetic construct
  misc_feature 1..285: note = Description of Artificial Sequence: Synthetic coding sequence
  source 1..285: mol_type = other DNA
atgacagtgatgagcctgagccgggacctgaaggatgacttccacagcgacacagtgctgagcatcctgaatgagcagaggatccggggcatcctgtgtgatgtgaccatcatcgtggaggacaccaagttcaaggcccacagcaatgtgctggccgccagcagcctgtacttcaagaacatcttctggagccacaccatctgcatcagcagccacgtgctggagctggatgacctgaaggccgaggtgttcacagagatcctgaactacatctacagcagctag

SEQ ID NO: 176363 - DNA, 357 bp, synthetic construct
  misc_feature 1..357: note = Description of Artificial Sequence: Synthetic coding sequence
  source 1..357: mol_type = other DNA
atgacagtgatgagcctgagccgggacctgaaggatgacttccacagcgacacagtgctgagcatcctgaatgagcagaggatccggggcatcctgtgtgatgtgaccatcatcgtggaggacaccaagttcaaggcccacagcaatgtgctggccgccagcagcctgtacttcaagaacatcttctggagccacaccatctgcatcagcagccacgtgctggagctggatgacctgaaggccgaggtgttcacagagatcctgaactacatctacagcagcacagtggtggtgaagaggcaggagaccgtgacagacctggccgccgccggcaagaagctgggcatctccttctag

SEQ ID NO: 176364 - DNA, 336 bp, synthetic construct
  misc_feature 1..336: note = Description of Artificial Sequence: Synthetic coding sequence
  source 1..336: mol_type = other DNA
atgacagtgatgagcctgagccgggacctgaaggatgacttccacagcgacacagtgctgagcatcctgaatgagcagaggatccggggcatcctgtgtgatgtgaccatcatcgtggaggacaccaagttcaaggcccacagcaatgtgctggccgccagcagcctgtacttcaagaacatcttctggagccacaccatctgcatcagcagccacgtgctggagctggatgacctgaaggccgaggtgttcacagagatcctgaactacatctacagcagcacagtggtggtgaagaggcaggagaccgtgacagacctggccgccgccggctag

SEQ ID NO: 176365 - DNA, 453 bp, synthetic construct
  misc_feature 1..453: note = Description of Artificial Sequence: Synthetic coding sequence
  source 1..453: mol_type = other DNA
atgacagtgatgagcctgagccgggacctgaaggatgacttccacagcgacacagtgctgagcatcctgaatgagcagaggatccggggcatcctgtgtgatgtgaccatcatcgtggaggacaccaagttcaaggcccacagcaatgtgctggccgccagcagcctgtacttcaagaacatcttctggagccacaccatctgcatcagcagccacgtgctggagctggatgacctgaaggccgaggtgttcacagagatcctgaactacatctacagcagcacagtggtggtgaagaggcaggagaccgtgacagacctggccgccgccggcaagaagctgggcatctccttcctggaggacctgacagacaggaacttcagcaacagccctggcccctacgtgttctgcatcacagagaagggcgtggtgaaggaggagaagaatgaatag

SEQ ID NO: 176366 - DNA, 2316 bp, synthetic construct
  misc_feature 1..2316: note = Description of Artificial Sequence: Synthetic coding sequence
  source 1..2316: mol_type = other DNA
atgacagtgatgagcctgagccgggacctgaaggatgacttccacagcgacacagtgctgagcatcctgaatgagcagaggatccggggcatcctgtgtgatgtgaccatcatcgtggaggacaccaagttcaaggcccacagcaatgtgctggccgccagcagcctgtacttcaagaacatcttctggagccacaccatctgcatcagcagccacgtgctggagctggatgacctgaaggccgaggtgttcacagagatcctgaactacatctacagcagcacagtggtggtgaagaggcaggagaccgtgacagacctggccgccgccggcaagaagctgggcatctccttcctggaggacctgacagacaggaacttcagcaacagccctggcccctacgtgttctgcatcacagagaagggcgtggtgaaggaggagaagaatgagaagagacatgaggagcccgccatcaccaacggcccccgcatcaccaatgccttcagcatcattgaaacagagaacagcaacaacatgttcagccccctggacctgcgggccagcttcaagaaggtgtctgacagcatgaggacagccagcctgtgcctggagaggacagatgtgtgccacgaggccgagcctgtgaggaccctggccgagcacagctatgctgtgtcctctgtggccgaggcctaccgcagccagcctgtgcgggagcatgatggcagcagccctggcaacacaggcaaggagaactgtgaggccctggccgccaagcccaagacctgcaggaagcccaagaccttcagcatcccccaggacagcgacagcgccacagagaacatccccccacctcctgtgagcaacctggaggtgaaccaggagaggagcccccagcctgctgctgtgctgaccaggagcaagagccccaacaatgaaggagatgtgcacttcagcagagaagatgagaaccagagcagtgatgtgcccggccccccagctgctgaggtgccccccctggtgtacaactgcagctgctgcagcaaggcctttgacagcagcaccctgctgagcgcccacatgcagctgcacaagcccacccaggagcccctggtgtgcaagtactgcaacaagcagttcaccaccctgaaccggctggacagacatgagcagatctgcatgaggagcagccacatgcccatccctgggggcaaccagcgcttcctggagaactaccccaccatcggccagaatggaggcagcttcaccggccctgagcccctgctgtctgaaaatcgcatcggggagttcagcagcacaggcagcaccctgcctgacacagaccacatggtgaagtttgtgaatggccagatgctgtacagctgtgtggtgtgcaagaggagctatgtgaccctgagcagcctgcggagacatgccaacgtgcacagctggaggaggacctacccctgccactactgcaacaaggtgtttgccctggccgagtaccgcaccaggcatgagatctggcacactggagagcggcgctaccagtgcatcttctgcctggagaccttcatgacctactacatcctgaagaaccaccagaagagcttccacgccatcgaccaccggctgagcatcagcaagaagacagccaatggaggcctgaagcccagcgtgtacccctacaagctgtaccgcctgctgcccatgaagtgcaagagggccccctacaagagctacagaaacagcagctatgaaaatgcccgggagaacagccagatgaatgaaagtgcccctggcacctacgtggtgcagaacccccacagcagcgagctgcccaccctgaacttccaggacacagtgaacaccctgaccaacagccctgccatccccctggagaccagcgcctgccaggacatccccaccagcgccaacgtgcagaatgctgagggcaccaagtggggcgaggaggccctgaagatggacctggacaacaacttctacagcacagaggtgtctgtgagcagcacagaaaatgctgtgtccagtgacctgcgggctggagatgtgcctgtgctgagcctgagcaacagcagtgaaaatgctgccagcgtcatctcctacagcggcagcgcccccagcgtgattgtgcacagcagccagttcagcagcgtcatcatgcacagcaatgccatcgccgccatgaccagcagcaaccaccgggccttcagtgaccctgctgtgtcccagagcctgaaggatgacagcaagccagagccagacaaggtgggccgctttgccagccggccctag

SEQ ID NO: 176367 - DNA, 441 bp, synthetic construct
  misc_feature 1..441: note = Description of Artificial Sequence: Synthetic coding sequence
  source 1..441: mol_type = other DNA
atgacagtgatgagcctgagccgggacctgaaggatgacttccacagcgacacagtgctgagcatcctgaatgagcagaggatccggggcatcctgtgtgatgtgaccatcatcgtggaggacaccaagttcaaggcccacagcaatgtgctggccgccagcagcctgtacttcaagaacatcttctggagccacaccatctgcatcagcagccacgtgctggagctggatgacctgaaggccgaggtgttcacagagatcctgaactacatctacagcagcacagtggtggtgaagaggcaggagaccgtgacagacctggccgccgccggcaagaagctgggcatctccttcctggaggacctgacagacaggaacttcagcaacagccctggcccctacgtgttctgcatcacagagaagggcgtggtgaaggagtag

SEQ ID NO: 176368 - DNA, 633 bp, synthetic construct
  misc_feature 1..633: note = Description of Artificial Sequence: Synthetic coding sequence
  source 1..633: mol_type = other DNA
atgacagtgatgagcctgagccgggacctgaaggatgacttccacagcgacacagtgctgagcatcctgaatgagcagaggatccggggcatcctgtgtgatgtgaccatcatcgtggaggacaccaagttcaaggcccacagcaatgtgctggccgccagcagcctgtacttcaagaacatcttctggagccacaccatctgcatcagcagccacgtgctggagctggatgacctgaaggccgaggtgttcacagagatcctgaactacatctacagcagcacagtggtggtgaagaggcaggagaccgtgacagacctggccgccgccggcaagaagctgggcatctccttcctggaggacctgacagacaggaacttcagcaacagccctggcccctacgtgttctgcatcacagagaagggcgtggtgaaggaggagaagaatgagaagagacatgaggagcccgccatcaccaacggcccccgcatcaccaatgccttcagcatcattgaaacagagaacagcaacaacatgttcagccccctggacctgcgggccagcttcaagaaggtgtctgacagcatgaggacagccagcctgtgcctggagaggacagatgtgtgccactag

SEQ ID NO: 176369 - DNA, 327 bp, synthetic construct
  misc_feature 1..327: note = Description of Artificial Sequence: Synthetic coding sequence
  source 1..327: mol_type = other DNA
atgacagtgatgagcctgagccgggacctgaaggatgacttccacagcgacacagtgctgagcatcctgaatgagcagaggatccggggcatcctgtgtgatgtgaccatcatcgtggaggacaccaagttcaaggcccacagcaatgtgctggccgccagcagcctgtacttcaagaacatcttctggagccacaccatctgcatcagcagccacgtgctggagctggatgacctgaaggccgaggtgttcacagagatcctgaactacatctacagcagcacagtggtggtgaagaggcaggagaccgtgacagacctggcctag

SEQ ID NO: 176370 - DNA, 213 bp, synthetic construct
  misc_feature 1..213: note = Description of Artificial Sequence: Synthetic coding sequence
  source 1..213: mol_type = other DNA
atgacagtgatgagcctgagccgggacctgaaggatgacttccacagcgacacagtgctgagcatcctgaatgagcagaggatccggggcatcctgtgtgatgtgaccatcatcgtggaggacaccaagttcaaggcccacagcaatgtgctggccgccagcagcctgtacttcaagaacatcttctggagccacaccatctgcatctcctag

SEQ ID NO: 176371 - DNA, 3588 bp, synthetic construct; identical to SEQ ID NO: 176360
  misc_feature 1..3588: note = Description of Artificial Sequence: Synthetic coding sequence
  source 1..3588: mol_type = other DNA

SEQ ID NO: 176372 - DNA, 3042 bp, synthetic construct
  misc_feature 1..3042: note = Description of Artificial Sequence: Synthetic coding sequence
  source 1..3042: mol_type = other DNA
atgcctcctcctgctgaggtgacagaccccagccacgccccagctgtgctgcggcagctgaatgagcagaggctgcggggcctcttctgtgatgtgaccctgattgctggggacaccaagtttcctgcccacaggtctgtgctggccgccagcagccccttcttccgggaggccctgctgaccagcgcccccctgcccctgcccccagccactggaggagctgcccccaacccagccaccaccacagctgccagcagcagcagcagcagcagcagcagcagcagcagcagcagcagcagcgccagcagcagcagcagcagcagcagcagcagccccccaccagccagccccccagccagcagccccccccgggtgctggagctgcccggggtgcctgctgctgccttcagtgatgtgctgaacttcatctacagcgcccggctggccctgcccggcggcggcggagatggagctgctgtggccgagattggagccctgggccggcggctgggcatcagccggctgcagggcctgggggagggcggagatgcctgggtgccccccaccccagcccccatggccaccagccagcctgaggaggacagctttggacctggccccaggcctgctggggagtgggagggggacagagctgaggcccaggccccagacctgcagtgcagcctgccccggcggcccctgccctgcccccagtgtgggaagagcttcatccaccccaagaggctgcagacccatgaggcccagtgcagaagaggagccagcacccggggcagcacaggcctgggcgctgggggcgccggccctgggggccctgctggggtggatgccagcgccctgcccccacctgtgggcttccggggcggccctgagcacgtggtgaaggtggtgggcggccacgtgctgtatgtgtgtgccgcctgtgagaggagctatgtgaccctgagcagcctgaagaggcacagcaatgtgcacagctggaggaggaagtacccctgccgctactgtgagaaggtgtttgccctggccgagtaccgcaccaagcatgaggtgtggcacactggagagcggcgctaccagtgcatcttctgctgggagacctttgtgacctactacaacctgaagacccaccagagggccttccacggcatcagccctggcctgctggccagcgagaagacccccaacggcggctacaagcccaagctgaacaccctgaagctgtaccgcctgctgcccatgagagctgccaagaggccctacaagacctacagccagggcgcccctgaggcccccctgagccccaccctgaacaccccagcccctgtggccatgcctgccagccccccacctggccccccaccagcccctgagcccggccccccacccagcgtcatcacctttgcccacccagcccccagcgtcatcgtgcacggcggcagcagcagcggcggcggcggcagcggcacagccagcactggaggcagccaggccgccagcgtcatcacctacacagccccaccccggccccccaagaagcgggagtacccacctcctcctcctgagcctgctgccacccccaccagccctgccacagctgtgtccccagccacagctgctggccctgccatggccaccaccacagaggaggccaagggcaggaacccccgggccggccgcaccctgacctacacagccaagcctgtgggcggcatcggcggcggcggcggcccccccaccggggccggccggggccccagccagctgcaggcccccccacccctgtgccagatcaccgtgcgcatcggggaggaggccatcgtgaagaggcgcatcagcgagacagacctgcggcctggagagctgtctggagaggagatggaggagagcgaggaggatgaggaggaggaggatgaggaggaggaggaggaggatgaggaggagagcaaggccggcggggaggaccagctgtggaggccctactacagctacaagcccaagaggaaggccggggctgctggaggagcctctgtgggcggcagcggcctgccccggggcagaagaccaccccgctggaggcagaagctggagcggcgctcctgggaggagaccccagctgctgagagccctgctggccgggccaggacagagcggcggcaccgctgtggggactgtgcccagaccttcaccaccctgaggaagctgaggaagcaccaggaggcccacggcggcggcagccacagcagcagagctggaagaagacccagcacccgcttcacctgcccccactgtgccaaggtgtgcaagacagctgctgccctgagcagacatggccagagacatgctgctgagaggcctgggggcacccccacccctgtgattgcctacagcaagggcagcgctggcaccaggcctggagatgtgaaggaggaggccccccaggagatgcaggtgagcagcagcagcggggaggccggcggcggcagcacagctgctgaggaggccagcgagacagccagcctgcaggaccccatcatctctggaggagaggagccccctgtggtggccagcggcggcagctatgtgtacccacctgtgcaggagttccccctggccctgattggaggcggccgggagcccggcggcggccggggcaagagcggcagcgagggccctgtgggcgctggggagggggacaggatggagggcatcggggccgccaaggtgaccttctacccagagccctaccccctggtgtatggcccccagctgctggccgcctacccctacaacttcagcaacctggccgccctgcctgtggccctgaacatggtgctgcctgatgagaagggggccggggccctgcccttcctgcccggggtgtttggctatgctgtgaacccccaggccgcccccccagccccacccaccccacctccacccaccctgcccccacccatcccccccaagggggagggggagcgggccggcgtggagaggacccagaagggagatgtgggctag

SEQ ID NO: 176373 - DNA, 3042 bp, synthetic construct; identical to SEQ ID NO: 176372
  misc_feature 1..3042: note = Description of Artificial Sequence: Synthetic coding sequence
  source 1..3042: mol_type = other DNA

SEQ ID NO: 176374 - DNA, 708 bp, synthetic construct
  misc_feature 1..708: note = Description of Artificial Sequence: Synthetic coding sequence
  source 1..708: mol_type = other DNA
atggagctgcccaactacagccggcagctgctgcagcagctgtacaccctgtgcaaggagcagcagttctgtgactgcaccatcagcatcggcaccatctacttccgggcccacaagctggtgctggccgccgccagcctgctcttcaagaccctgctggacaacacagacaccatcagcattgatgcctctgtggtgtccccagaggagtttgccctgctgctggagatgatgtacaccgggaagctgcctgtgggcaagcacaacttcagcaagatcatcagcctggccgacagcctgcagatgtttgatgtggccgtgtcctgcaagaacctgctgaccagcctgctggccgccaccccaggcggccctgtgaaggccgagacagaggaggccgcccacagcgtgtcccaggagatgtctgtgaacagccccacagcccaggagagccagagaaatgctgagaccccagctgagacccccaccacagctgaggcctgcagccccagccctgctgtgcagaccttcagcgaggccaagaagaccagcacagagcccggctgtgagaggaagcactaccagctgaacttcctgctggagaatgaaggagtcttcagtgatgccctgatggtgacccaggatgtgctgaagaagctggagatgtgcagcaactgctgcgtgcctgtggaggccgtgcccatcttctag

SEQ ID NO: 176375 - DNA, 3384 bp, synthetic construct
  misc_feature 1..3384: note = Description of Artificial Sequence: Synthetic coding sequence
  source 1..3384: mol_type = other DNA
atggagctgcccaactacagccggcagctgctgcagcagctgtacaccctgtgcaaggagcagcagttctgtgactgcaccatcagcatcggcaccatctacttccgggcccacaagctggtgctggccgccgccagcctgctcttcaagaccctgctggacaacacagacaccatcagcattgatgcctctgtggtgtccccagaggagtttgccctgctgctggagatgatgtacaccgggaagctgcctgtgggcaagcacaacttcagcaagatcatcagcctggccgacagcctgcagatgtttgatgtggccgtgtcctgcaagaacctgctgaccagcctggtgaactgcagcgtgcagggccaggtggtgagagatgtgtctgcccccagcagcgagaccttcaggaaggagcctgagaagccccaggtggagatcctgagcagcgagggcgctggggagccccacagcagccctgagctggccgccaccccaggcggccctgtgaaggccgagacagaggaggccgcccacagcgtgtcccaggagatgtctgtgaacagccccacagcccaggagagccagagaaatgctgagaccccagctgagacccccaccacagctgaggcctgcagccccagccctgctgtgcagaccttcagcgaggccaagaagaccagcacagagcccggctgtgagaggaagcactaccagctgaacttcctgctggagaatgaaggagtcttcagtgatgccctgatggtgacccaggatgtgctgaagaagctggagatgtgcagcgagatcaagggcccccagaaggaggtgatcctgaactgctgtgagggccgcacccccaaggagaccatcgagaacctgctgcacaggatgacagaggagaagaccctgacagctgagggcctggtgaagctgctgcaggccgtgaagaccaccttccccaacctgggcctgctgctggagaagctgcagaagagcgccaccctgcccagcaccaccgtgcagcccagcccagatgattatggaacagagctgctgcggcgctaccacgagaacctgtctgagatcttcacagacaaccagatcctgctgaagatgatcagccacatgaccagcctggcccctggagagcgggaggtgatggagaagctggtgaagagggacagcggcagcggcggcttcaacagcctcatctctgctgtgctggagaagcagaccctgagcgccacagccatctggcagctgctgctggtggtgcaggagaccaagacctgccccctggacctgctgatggaggagatcagaagagagcccggggctgatgccttcttccgggctgtgaccaccccagagcacgccaccctggagaccatcctgcggcacaaccagctgatcctggaggccatccagcagaagattgagtacaagctgttcaccagcgaggaggagcacctggccgagaccgtgaaggagatcctgagcatccccagcgagacagccagccctgaggccagcctgcgggctgtgctgagccgggccatggagaagtctgtgcctgccatcgagatctgccacctgctgtgcagcgtgcacaagagcttccctggcctgcagcctgtgatgcaggagctggcctacatcggcgtgctgaccaaggaggatggagagaaggagacctggaaggtgagcaacaagttccacctggaggccaacaacaaggaggatgagaaggccgccaaggaggacagccagcctggagagcagaatgaccagggcgagaccggcagcctgcccggccagcaggagaaggaggccagcgccagcccagaccctgccaagaagagcttcatctgcaaggcctgtgacaagagcttccacttctactgccgcctgaaggtgcacatgaagcgctgccgggtggccaagagcaagcaggtgcagtgcaaggagtgcagcgagaccaaggacagcaagaaggagctggacaagcaccagctggaggcccatggagctggaggagagccagatgcccccaagaagaagaagaagaggctgcctgtgacctgtgacctgtgtggccgggagtttgcccacgccagcggcatgcagtaccacaagctgacagagcactttgatgagaagcccttcagctgtgaggagtgtggggccaagtttgctgccaacagcaccctgaagaaccacctgcggctgcacactggagaccggcccttcatgtgcaagcactgcctgatgaccttcacccaggccagcgccctggcctaccacaccaagaagaagcacagcgagggcaagatgtatgcctgccagtactgtgatgctgtgtttgcccagagcattgagctgagcagacatgtgaggacccacactggagacaagccctacgtgtgccgggactgtgggaagggcttccggcaggccaacggcctgagcatccacctgcacaccttccacaacatcgaggacccctatgactgcaagaagtgcaggatgtccttccccaccctgcaggaccacaggaagcacatccacgaggtgcacagcaaggagtaccacccctgccccacctgtgggaagatcttcagcgcccccagcatgctggagcggcacgtggtgacccacgtgggcggcaagcccttcagctgtggcatctgcaacaaggcctaccagcagctgagcggcctgtggtaccacaacagaacccaccacccagatgtgtttgctgcccagaaccacaggagcagcaagttcagcagcctgcagtgcagcagctgtgacaagaccttccccaacaccatcgagcacaagaagcacatcaaggccgagcacgccgacatgaagttccatgaatgtgaccagtgcaaggagctgttccccaccccagccctgctgcaggtgcacgtgaagtgccagcacagcggcagccagcccttccgctgcctgtactgtgccgccaccttccgcttccctggggccctgcagcaccacgtgaccacagagcacttcaagcagagcgagaccaccttcccctgtgagctgtgtggggagctgttcaccagccaggcccagctggacagccacctggagagcgagcaccccaaggtgatgagcacagagacccaggccgccgccagccagatggcccaggtgatccagaccccagagcctgtggcccccacagagcaggtgatcaccctggaggagacccagctggccggcagccaggtgtttgtgaccctgcctgacagccaggccagccaggccagcagcgagctggtggccgtgacagtggaggacctgctggatggcaccgtgaccctcatctgtggggaggccaagtag

SEQ ID NO: 176376 - DNA, 3720 bp, synthetic construct
  misc_feature 1..3720: note = Description of Artificial Sequence: Synthetic coding sequence
  source 1..3720: mol_type = other DNA
atggagctgcccaactacagccggcagctgctgcagcagctgtacaccctgtgcaaggagcagcagttctgtgactgcaccatcagcatcggcaccatctacttccgggcccacaagctggtgctggccgccgccagcctgctcttcaagaccctgctggacaacacagacaccatcagcattgatgcctctgtggtgtccccagaggagtttgccctgctgctggagatgatgtacaccgggaagctgcctgtgggcaagcacaacttcagcaagatcatcagcctggccgacagcctgcagatgtttgatgtggccgtgtcctgcaagaacctgctgaccagcctggtgaactgcagcgtgcagggccaggtggtgagagatgtgtctgcccccagcagcgagaccttcaggaaggagcctgagaagccccaggtggagatcctgagcagcgagggcgctggggagccccacagcagccctgagctggccgccaccccaggcggccctgtgaaggccgagacagaggaggccgcccacagcgtgtcccaggagatgtctgtgaacagccccacagcccaggagagccagagaaatgctgagaccccagctgagacccccaccacagctgaggcctgcagccccagccctgctgtgcagaccttcagcgaggccaagaagaccagcacagagcccggctgtgagaggaagcactaccagctgaacttcctgctggagaatgaaggagtcttcagtgatgccctgatggtgacccaggatgtgctgaagaagctggagatgtgcagcgagatcaagggcccccagaaggagatgattgtgaagtgctttgaaggagagggcggccacagcgccttccagaggatcctgggcaaggtgcgggaggagagcctggatgtgcagacagtggtgtccctgctgcggctgtaccagtacagcaacccagctgtgaagacagccctgctggacaggaagccagaagatgtggacacagtgcagcccaagggcagcacagaggagggcaagaccctgtctgtgctgctgctggagcacaaggaggacctgatccagtgtgtgacccagctgcggcccatcatggagagcctggagacagccaaggaggagttcctgaccggcacagagaagagggtcatcctgaactgctgtgagggccgcacccccaaggagaccatcgagaacctgctgcacaggatgacagaggagaagaccctgacagctgagggcctggtgaagctgctgcaggccgtgaagaccaccttccccaacctgggcctgctgctggagaagctgcagaagagcgccaccctgcccagcaccaccgtgcagcccagcccagatgattatggaacagagctgctgcggcgctaccacgagaacctgtctgagatcttcacagacaaccagatcctgctgaagatgatcagccacatgaccagcctggcccctggagagcgggaggtgatggagaagctggtgaagagggacagcggcagcggcggcttcaacagcctcatctctgctgtgctggagaagcagaccctgagcgccacagccatctggcagctgctgctggtggtgcaggagaccaagacctgccccctggacctgctgatggaggagatcagaagagagcccggggctgatgccttcttccgggctgtgaccaccccagagcacgccaccctggagaccatcctgcggcacaaccagctgatcctggaggccatccagcagaagattgagtacaagctgttcaccagcgaggaggagcacctggccgagaccgtgaaggagatcctgagcatccccagcgagacagccagccctgaggccagcctgcgggctgtgctgagccgggccatggagaagtctgtgcctgccatcgagatctgccacctgctgtgcagcgtgcacaagagcttccctggcctgcagcctgtgatgcaggagctggcctacatcggcgtgctgaccaaggaggatggagagaaggagacctggaaggtgagcaacaagttccacctggaggccaacaacaaggaggatgagaaggccgccaaggaggacagccagcctggagagcagaatgaccagggcgagaccggcagcctgcccggccagcaggagaaggaggccagcgccagcccagaccctgccaagaagagcttcatctgcaaggcctgtgacaagagcttccacttctactgccgcctgaaggtgcacatgaagcgctgccgggtggccaagagcaagcaggtgcagtgcaaggagtgcagcgagaccaaggacagcaagaaggagctggacaagcaccagctggaggcccatggagctggaggagagccagatgcccccaagaagaagaagaagaggctgcctgtgacctgtgacctgtgtggccgggagtttgcccacgccagcggcatgcagtaccacaagctgacagagcactttgatgagaagcccttcagctgtgaggagtgtggggccaagtttgctgccaacagcaccctgaagaaccacctgcggctgcacactggagaccggcccttcatgtgcaagcactgcctgatgaccttcacccaggccagcgccctggcctaccacaccaagaagaagcacagcgagggcaagatgtatgcctgccagtactgtgatgctgtgtttgcccagagcattgagctgagcagacatgtgaggacccacactggagacaagccctacgtgtgccgggactgtgggaagggcttccggcaggccaacggcctgagcatccacctgcacaccttccacaacatcgaggacccctatgactgcaagaagtgcaggatgtccttccccaccctgcaggaccacaggaagcacatccacgaggtgcacagcaaggagtaccacccctgccccacctgtgggaagatcttcagcgcccccagcatgctggagcggcacgtggtgacccacgtgggcggcaagcccttcagctgtggcatctgcaacaaggcctaccagcagctgagcggcctgtggtaccacaacagaacccaccacccagatgtgtttgctgcccagaaccacaggagcagcaagttcagcagcctgcagtgcagcagctgtgacaagaccttccccaacaccatcgagcacaagaagcacatcaaggccgagcacgccgacatgaagttccatgaatgtgaccagtgcaaggagctgttccccaccccagccctgctgcaggtgcacgtgaagtgccagcacagcggcagccagcccttccgctgcctgtactgtgccgccaccttccgcttccctggggccctgcagcaccacgtgaccacagagcacttcaagcagagcgagaccaccttcccctgtgagctgtgtggggagctgttcaccagccaggcccagctggacagccacctggagagcgagcaccccaaggtgatgagcacagagacccaggccgccgccagccagatggcccaggtgatccagaccccagagcctgtggcccccacagagcaggtgatcaccctggaggagacccagctggccggcagccaggtgtttgtgaccctgcctgacagccaggccagccaggccagcagcgagctggtggccgtgacagtggaggacctgctggatggcaccgtgaccctcatctgtggggaggccaagtag

SEQ ID NO: 176377 - DNA, 1362 bp, synthetic construct
  misc_feature 1..1362: note = Description of Artificial Sequence: Synthetic coding sequence
  source 1..1362: mol_type = other DNA
atggagctgcccaactacagccggcagctgctgcagcagctgtacaccctgtgcaaggagcagcagttctgtgactgcaccatcagcatcggcaccatctacttccgggcccacaagctggtgctggccgccgccagcctgctcttcaagaccctgctggacaacacagacaccatcagcattgatgcctctgtggtgtccccagaggagtttgccctgctgctggagatgatgtacaccgggaagctgcctgtgggcaagcacaacttcagcaagatcatcagcctggccgacagcctgcagatgtttgatgtggccgtgtcctgcaagaacctgctgaccagcctggtgaactgcagcgtgcagggccaggtggtgagagatgtgtctgcccccagcagcgagaccttcaggaaggagcctgagaagccccaggtggagatcctgagcagcgagggcgctggggagccccacagcagccctgagctggccgccaccccaggcggccctgtgaaggccgagacagaggaggccgcccacagcgtgtcccaggagatgtctgtgaacagccccacagcccaggagagccagagaaatgctgagaccccagctgagacccccaccacagctgaggcctgcagccccagccctgctgtgcagaccttcagcgaggccaagaagaccagcacagagcccggctgtgagaggaagcactaccagctgaacttcctgctggagaatgaaggagtcttcagtgatgccctgatggtgacccaggatgtgctgaagaagctggagatgtgcagcgagatcaagggcccccagaaggagatgattgtgaagtgctttgaaggagagggcggccacagcgccttccagaggatcctgggcaaggtgcgggaggagagcctggatgtgcagacagtggtgtccctgctgcggctgtaccagtacagcaacccagctgtgaagacagccctgctggacaggaagccagaagatgtggacacagtgcagcccaagggcagcacagaggagggcaagaccctgtctgtgctgctgctggagcacaaggaggacctgatccagtgtgtgacccagctgcggcccatcatggagagcctggagacagccaaggaggagttcctgaccggcacagagaagagggtcatcctgaactgctgtgagggccgcacccccaaggagaccatcgagaacctgctgcacaggatgacagaggagaagaccctgacagctgagggcctggtgaagctgctgcaggccgtgaagaccaccttccccaacctgggcctgctgctggagaagctgcagaagagcgccaccctgcccagcaccacctag

SEQ ID NO: 176378 - DNA, 3720 bp, synthetic construct; identical to SEQ ID NO: 176376
  misc_feature 1..3720: note = Description of Artificial Sequence: Synthetic coding sequence
  source 1..3720: mol_type = other DNA

SEQ ID NO: 176379 - DNA, 1269 bp, synthetic construct
  misc_feature 1..1269: note = Description of Artificial Sequence: Synthetic coding sequence
  source 1..1269: mol_type = other DNA
atggagttccctgagcacggcggccgcctgctgggccgcctgcggcagcagcgggagctgggcttcctgtgtgactgcaccgtgctggtgggagatgcccgcttccctgcccacagagctgtgctggccgcctgcagcgtgtacttccacctgttctacagagacaggcctgctggcagccgggacacagtgcggctgaatggagacatcgtgacagccccagccttcggccgcctgctggacttcatgtatgagggccgcctggacctgcggagcctgcctgtggaggatgtgctggccgccgccagctacctgcacatgtatgacatcgtgaaggtgtgcaagggccgcctgcaggagaaggacaggagcctggaccccggcaacccagcccctggagctgagcccgcccagcccccctgcccctggcctgtgtggacagctgacctgtgcccagctgccaggaaggccaagctgccccccttcggcgtgaaggccgccctgcccccccgggccagcggccccccaccctgccaggtgcctgaggagagtgaccaggccctggacctgagcctgaagagcggcccccggcaggagcgggtgcaccccccctgtgtgctgcagacccccctgtgcagccagaggcagcccggggcccagcccctggtgaaggatgagcgggacagcctgtctgagcaggaggagagcagcagcagccgcagcccccacagcccccccaagcccccacctgtgcctgctgccaagggcctggtggtgggcctgcagcccctgcccctgtctggagagggcagccgggagctggagctgggcgccggccgcctggcctctgaagatgagctgggccctgggggccccctgtgcatctgccccctgtgcagcaagctgttccccagcagccacgtgctgcagctgcacctgagcgcccacttccgggagcgggacagcacccgggcccggctgagcccagatggagtggcccccacctgccccctgtgtgggaagaccttcagctgcacctacaccctgaagagacatgagaggacccacagcggggagaagccctacacctgtgtgcagtgtgggaagagcttccagtacagccacaacctgagccgccacacagtggtgcacacccgggagaagccccacgcctgccgctggtgtgaaagacgcttcacccagagcggggacctgtaccgccacgtgaggaagttccactgcggcctggtgaagagcctgctggtgtag

SEQ ID NO: 176380 - DNA, 1269 bp, synthetic construct; identical to SEQ ID NO: 176379
  misc_feature 1..1269: note = Description of Artificial Sequence: Synthetic coding sequence
  source 1..1269: mol_type = other DNA

SEQ ID NO: 176381 - DNA, 1815 bp, synthetic construct
  misc_feature 1..1815: note = Description of Artificial Sequence: Synthetic coding sequence
  source 1..1815: mol_type = other DNA
atggccagcacctgggccatccaggcccacatggaccaggatgagcccctggaggtgaagattgaggaggagaagtacaccacccggcaggactgggacctgaggaagaacaacacccacagccgggaggtgttccggcagtacttccggcagttctgctaccaggagaccagcggcccccgggaggccctgagccggctgcgggagctgtgccaccagtggctgcggcctgagacccacaccaaggagcagatcctggagctgctggtgctggagcagttcctgaccatcctgcctgaggagctgcaggcctgggtgcaggagcagcaccctgagagcggggaggaggtggtgacagtgctggaggacctggagcgggagctggatgagcctggagagcaggtgtctgtgcacactggagagcaggagatgttcctgcaggagaccgtgcggctgaggaaggagggggagcccagcatgagcctgcagagcatgaaggcccagcccaagtatgagagccctgagctggagagccagcaggagcaggtgctggatgtggagactggaaatgaatatggcaacctgaagcaggaggtgtctgaggagatggagccccacggcaagaccagcagcaagtttgaaaatgacatgagcaagagcgcccgctgtggggagacccgggagcctgaggagatcacagaggagcccagcgcctgcagccgggaggacaagcagcccacctgtgatgaaaatggagtgtccctgacagaaaattctgaccacacagagcaccagaggatctgccctggagaggagagctatggctgtgatgactgtgggaaggccttcagccagcacagccacctgattgagcaccagaggatccacactggagaccggccctacaagtgtgaggagtgtgggaaggccttccggggccgcacagtgctgatccgccacaagatcatccacactggagagaagccctacaagtgcaatgaatgtgggaaggccttcggccgctggagcgccctgaaccagcaccagaggctgcacactggagagaagcactaccactgcaatgactgtgggaaggccttcagccagaaggccggcctcttccaccacatcaagatccacacccgggacaagccctaccagtgcacccagtgcaacaagagcttcagcagaagaagcatcctgacccagcaccagggcgtgcacactggagccaagccctatgaatgtaatgaatgtgggaaggcctttgtgtacaacagcagcctggtgagccaccaggagatccaccacaaggagaagtgctaccagtgcaaggaatgtgggaagagcttcagccagagcggcctcatccagcaccagaggatccacactggagagaagccctacaagtgtgatgtgtgtgagaaggccttcatccagaggaccagcctgacagagcaccagaggatccacactggagagcggccctacaagtgtgacaagtgtgggaaggccttcacccagaggtctgtgctgacagagcaccagaggatccacactggagagcggccctacaagtgtgatgaatgtggaaatgccttccggggcatcaccagcctcatccagcaccagaggatccacactggagagaagccctaccagtgtgatgaatgtgggaaggccttccggcagaggaagaagaccagctacaaggagatcctgctgaagaaccacagcgagccccaggccggcgtgaacctgctgctgagcagcctcatccctgagtggcagagctgcttcagaagagacctgtag

SEQ ID NO: 176382 - DNA, 1815 bp, synthetic construct; identical to SEQ ID NO: 176381
  misc_feature 1..1815: note = Description of Artificial Sequence: Synthetic coding sequence
  source 1..1815: mol_type = other DNA

SEQ ID NO: 176383 - DNA, 1476 bp, synthetic construct
  misc_feature 1..1476: note = Description of Artificial Sequence: Synthetic coding sequence
  source 1..1476: mol_type = other DNA
atggccatccccaagcacagcctgagccctgtgccctgggaggaggacagcttcctgcaggtgaaggtggaggaggaggaggaggccagcctgagccagggcggggagagcagccatgaccacatcgcccacagcgaggccgcccggctgcgcttccgccacttccgctatgaggaggccagcggcccccatgaggccctggcccacctgcgggccctgtgctgccagtggctgcagcctgaggcccacagcaaggagcagatcctggagctgctggtgctggagcagttcctgggcgccctgcccccagagatccaggcctgggtgggcgcccagagccccaagagcggggaggaggccgctgtgctggtggaggacctgacccaggtgctggacaagaggggctgggaccccggggctgagcccacagaggccagctgcaagcagagcgacctgggggagagcgagcccagcaatgtgacagagaccctgatgggcggcgtgtccctgggccctgcctttgtgaaggcctgtgagcctgagggcagcagcgagaggagcggcctgagcggggagatctggaccaagtctgtgacccagcagatccacttcaagaagaccagcggcccctacaaggatgtgcccacagaccagaggggccgggagagcggggccagcaggaacagcagcagcgcctggcccaacctgaccagccaggagaagccacccagcgaggacaagtttgacctggtggatgcctacggcacagagcccccctacacctacagcggcaagaggagcagcaaatgtcgggagtgcaggaagatgttccagagcgccagcgccctggaggcccaccagaagacccacagcaggaagaccccctatgcctgcagtgaatgtgggaaggccttcagccgcagcacccacctggcccagcaccaggtggtgcacactggagccaagccccatgagtgcaaggaatgtgggaaggccttcagccgggtgacccacctgacccagcaccagaggatccacactggagagaagccctacaagtgtggggagtgtgggaagaccttcagccgcagcacccacctgacccagcaccagagggtgcacactggagagcggccctatgaatgtgatgcctgtgggaaggccttcagccagagcacccacctgacccagcaccagaggatccacactggagagaagccctacaagtgtgatgcctgtggccgggccttcagtgactgcagcgccctgatccgccacctgcgcatccacagcggggagaagccctaccagtgcaaggtgtgccccaaggcctttgcccagagcagcagcctcatcgagcaccagaggatccacactggagagaagccctacaagtgcagcgactgtgggaaggccttcagccgcagcagcgccctgatggtgcacctgcgcatccacatcaccgtgctgcagtag

SEQ ID NO: 176384 - DNA, 1302 bp, synthetic construct
  misc_feature 1..1302: note = Description of Artificial Sequence: Synthetic coding sequence
  source 1..1302: mol_type = other DNA
atggccctggacctgcggaccatcttccagtgtgagcccagcgagaacaacctgggctctgaaaattctgccttccagcagagccagggccctgctgtgcagcgggaggagggcatcagcgagttcagcaggatggtgctgaacagcttccaggacagcaacaacagctatgcccggcaggagctgcagaggctgtaccgcatcttccacagctggctgcagcctgagaagcacagcaaggatgagatcatcagcctgctggtgctggagcagttcatgattggaggccactgcaatgacaaggcctctgtgaaggagaagtggaagagcagcggcaagaacctggagcgcttcatcgaggacctgacagatgacagcatcaaccccccagccctggtgcacgtgcacatgcagggccaggaggccctcttcagcgaggacatgcccctgagagatgtgattgtgcacctgaccaagcaggtgaatgcccagaccacccgggaggccaacatgggcacccccagccagaccagccaggacaccagcctggagaccggccagggctatgaagatgagcaggacggctggaacagcagcagcaagaccaccagggtgaatgaaaacatcaccaaccagggcaaccagatcgtgtccctcatcatcatccaggaggagaatggccccaggcctgaggagggcggcgtgtccagtgacaacccctacaacagcaagagagctgagctggtgacagcccggagccaggagggcagcatcaatggcatcaccttccagggcgtgcccatggtgatgggcgccggctgcatcagccagcctgagcagagcagccctgagagcgccctgacccaccagagcaatgaaggcaacagcacctgtgaggtgcaccagaagggcagccacggcgtgcagaagagctacaagtgtgaggagtgccccaaggtgttcaagtacctgtgccacctgctggcccaccagaggaggcacagaaatgaaagaccatttgtgtgcccagagtgccagaagggcttcttccagatcagtgacctgcgggtgcaccagatcatccacacaggcaagaagcccttcacctgcagcatgtgcaagaagagcttcagccacaagaccaacctgcggagccatgagcgcatccacactggagagaagccctacacctgccccttctgcaagaccagctaccggcagagcagcacctaccaccgccacatgaggacccatgagaagatcaccctgcccagcgtgcccagcaccccagaggccagctag

SEQ ID NO: 176385 - DNA, 2433 bp, synthetic construct
  misc_feature 1..2433: note = Description of Artificial Sequence: Synthetic coding sequence
  source 1..2433: mol_type = other DNA
atgcccaaccagggcgaggactgctacttcttcttctacagcacctgcaccaagggggacagctgccccttccgccactgtgaggccgccatcggaaatgaaacagtgtgcaccctgtggcaggagggccgctgcttccggcaggtgtgccgcttccgccacatggagattgacaagaagaggtctgagatcccctgctactgggagaaccagcccaccggctgccagaagctgaactgtgccttccaccacaacagaggccgctacgtggatggcctcttcctgccccccagcaagacagtgctgcccaccgtgcctgagagccctgaggaggaggtgaaggccagccagctgtctgtgcagcagaacaagctgtctgtgcagagcaaccccagcccccagctgcggtctgtgatgaaggtggagagcagtgaaaatgtgcccagccccacccacccccctgtggtgatcaatgctgctgatgatgatgaagatgatgatgaccagttcagcgaggagggagatgagaccaagacccccaccctgcagcccaccccagaggtgcacaacggcctgcgggtgacctctgtgaggaagccagctgtgaacatcaagcagggcgagtgcctgaactttggcatcaagaccctggaggagatcaagagcaagaagatgaaggagaagagcaagaagcagggcgagggcagcagtggagtgagcagcctgctgctgcaccctgagcctgtgcccggccctgagaaggaaaatgtgaggacagtggtgaggacagtgaccctgagcaccaagcagggcgaggagcccctggtgcggctgagcctgacagagcggctgggcaagaggaagttctctgctggaggagacagcgacccccccctgaagaggagcctggcccagaggctgggcaagaaggtggaggcccctgagaccaacatcgacaagacccccaagaaggcccaggtgtccaagagcctgaaggagcggctgggcatgtctgctgaccctgacaatgaagatgccacagacaaggtgaacaaggtgggggagatccacgtgaagaccctggaggagatcctgctggagcgggccagccagaagagaggagagctgcagaccaagctgaagacagagggccccagcaagacagatgacagcaccagcggggcccggagcagcagcaccatccgcatcaagaccttcagcgaggtgctggccgagaagaagcaccggcagcaggaggccgagcggcagaagagcaagaaggacaccacctgcatcaagctgaagattgacagcgagatcaagaagacagtggtgctgccccccatcgtggccagccggggccagagcgaggagcctgctgggaagaccaagtccatgcaggaggtgcacatcaagaccctggaggagatcaagctggagaaggccctgcgggtgcagcagagcagcgagagcagcaccagcagccccagccagcacgaggccacccctggggcccggcggctgctgcgcatcaccaagaggacaggcatgaaggaggagaagaacctgcaggagggcaatgaggtggacagccagagcagcatcagaacagaggccaaggaggccagcggggagaccactggagtggacatcaccaagatccaggtgaagagatgtgagaccatgagggagaagcacatgcagaagcagcaggagcgggagaagtctgtgctgacccccctgcggggagatgtggccagctgcaacacccaggtggccgagaagcctgtgctgacagctgtgcccggcatcaccaggcacctgaccaagaggctgcccaccaagagcagccagaaggtggaggtggagaccagcggcattggagacagcctgctgaatgtgaagtgtgccgcccagaccctggagaagaggggcaaggccaagcccaaggtgaatgtgaagcccagcgtggtgaaggtggtgagcagccccaagctggcccccaagaggaaggctgtggagatgcatgctgctgtgattgctgctgtgaagcccctgagcagcagctctgtgctgcaggagcccccagccaagaaggctgctgtggccgtggtgcccctggtgtctgaggacaagtctgtgacagtgcctgaggccgagaacccccgggacagcctggtgctgccccccacccagagcagcagtgacagcagccccccagaggtgtctggccccagcagcagccagatgtccatgaagacccggcggctgagcagcgccagcacaggcaagccacccctgtctgtggaggatgactttgagaagctgatctgggagatcagcggcggcaagctggaggccgagattgacctggaccccgggaaggatgaagatgacctgctgctggagctgtctgagatgattgacagctag

SEQ ID NO: 176386 - DNA, 2433 bp, synthetic construct; identical to SEQ ID NO: 176385
  misc_feature 1..2433: note = Description of Artificial Sequence: Synthetic coding sequence
  source 1..2433: mol_type = other DNA

SEQ ID NO: 176387 - DNA, 2433 bp, synthetic construct; identical to SEQ ID NO: 176385
  misc_feature 1..2433: note = Description of Artificial Sequence: Synthetic coding sequence
  source 1..2433: mol_type = other DNA

SEQ ID NO: 176388 - DNA, 2433 bp, synthetic construct; identical to SEQ ID NO: 176385
  misc_feature 1..2433: note = Description of Artificial Sequence: Synthetic coding sequence
  source 1..2433: mol_type = other DNA

SEQ ID NO: 176389 - DNA, 153 bp, synthetic construct
  misc_feature 1..153: note = Description of Artificial Sequence: Synthetic coding sequence
  source 1..153: mol_type = other DNA
atgcccaaccagggcgaggactgctacttcttcttctacagcacctgcaccaagggggacagctgccccttccgccactgtgaggccgccatcggaaatgaaacagtgtgcaccctgtggcaggagggccgctgcttccggcaggtgtgctag

SEQ ID NO: 176390 - DNA, 1548 bp, synthetic construct
  misc_feature 1..1548: note = Description of Artificial Sequence: Synthetic coding sequence
  source 1..1548: mol_type = other DNA
atgcccaaccagggcgaggactgctacttcttcttctacagcacctgcaccaagggggacagctgccccttccgccactgtgaggccgccatcggaaatgaaacagtgtgcaccctgtggcaggagggccgctgcttccggcaggtgtgccgcttccgccacatggagattgacaagaagaggtctgagatcccctgctactgggagaaccagcccaccggctgccagaagctgaactgtgccttccaccacaacagaggccgctacgtggatggcctcttcctgccccccagcaagacagtgctgcccaccgtgcctgagagccctgaggaggaggtgaaggccagccagctgtctgtgcagcagaacaagctgtctgtgcagagcaaccccagcccccagctgcggtctgtgatgaaggtggagagcagtgaaaatgtgcccagccccacccacccccctgtggtgatcaatgctgctgatgatgatgaagatgatgatgaccagttcagcgaggagggagatgagaccaagacccccaccctgcagcccaccccagaggtgcacaacggcctgcgggtgacctctgtgaggaagccagctgtgaacatcaagcagggcgagtgcctgaactttggcatcaagaccctggaggagatcaagagcaagaagatgaaggagaagagcaagaagcagggcgagggcagcagtggagtgagcagcctgctgctgcaccctgagcctgtgcccggccctgagaaggaaaatgtgaggacagtggtgaggacagtgaccctgagcaccaagcagggcgaggagcccctggtgcggctgagcctgacagagcggctgggcaagaggaagttctctgctggaggagacagcgacccccccctgaagaggagcctggcccagaggctgggcaagaaggtggaggcccctgagaccaacatcgacaagacccccaagaaggcccaggtgtccaagagcctgaaggagcggctgggcatgtctgctgaccctgacaatgaagatgccacagacaaggtgaacaaggtgggggagatccacgtgaagaccctggaggagatcctgctggagcgggccagccagaagagaggagagctgcagaccaagctgaagacagagggccccagcaagacagatgacagcaccagcggggcccggagcagcagcaccatccgcatcaagaccttcagcgaggtgctggccgagaagaagcaccggcagcaggaggccgagcggcagaagagcaagaaggacaccacctgcatcaagctgaagattgacagcgagatcaagaagacagtggtgctgccccccatcgtggccagccggggccagagcgaggagcctgctgggaagaccaagtccatgcaggaggtgcacatcaagaccctggaggagatcaagctggagaaggccctgcgggtgcagcagagcagcgagagcagcaccagcagccccagccagcacgaggccacccctggggcccggcggctgctgcgcatcaccaagaggacatag

SEQ ID NO: 176391 - DNA, 2271 bp, synthetic construct
  misc_feature 1..2271: note = Description of Artificial Sequence: Synthetic coding sequence
  source 1..2271: mol_type = other DNA
atggagattgacaagaagaggtctgagatcccctgctactgggagaaccagcccaccggctgccagaagctgaactgtgccttccaccacaacagaggccgctacgtggatggcctcttcctgccccccagcaagacagtgctgcccaccgtgcctgagagccctgaggaggaggtgaaggccagccagctgtctgtgcagcagaacaagctgtctgtgcagagcaaccccagcccccagctgcggtctgtgatgaaggtggagagcagtgaaaatgtgcccagccccacccacccccctgtggtgatcaatgctgctgatgatgatgaagatgatgatgaccagttcagcgaggagggagatgagaccaagacccccaccctgcagcccaccccagaggtgcacaacggcctgcgggtgacctctgtgaggaagccagctgtgaacatcaagcagggcgagtgcctgaactttggcatcaagaccctggaggagatcaagagcaagaagatgaaggagaagagcaagaagcagggcgagggcagcagtggagtgagcagcctgctgctgcaccctgagcctgtgcccggccctgagaaggaaaatgtgaggacagtggtgaggacagtgaccctgagcaccaagcagggcgaggagcccctggtgcggctgagcctgacagagcggctgggcaagaggaagttctctgctggaggagacagcgacccccccctgaagaggagcctggcccagaggctgggcaagaaggtggaggcccctgagaccaacatcgacaagacccccaagaaggcccaggtgtccaagagcctgaaggagcggctgggcatgtctgctgaccctgacaatgaagatgccacagacaaggtgaacaaggtgggggagatccacgtgaagaccctggaggagatcctgctggagcgggccagccagaagagaggagagctgcagaccaagctgaagacagagggccccagcaagacagatgacagcaccagcggggcccggagcagcagcaccatccgcatcaagaccttcagcgaggtgctggccgagaagaagcaccggcagcaggaggccgagcggcagaagagcaagaaggacaccacctgcatcaagctgaagattgacagcgagatcaagaagacagtggtgctgccccccatcgtggccagccggggccagagcgaggagcctgctgggaagaccaagtccatgcaggaggtgcacatcaagaccctggaggagatcaagctggagaaggccctgcgggtgcagcagagcagcgagagcagcaccagcagccccagccagcacgaggccacccctggggcccggcggctgctgcgcatcaccaagaggacaggcatgaaggaggagaagaacctgcaggagggcaatgaggtggacagccagagcagcatcagaacagaggccaaggaggccagcggggagaccactggagtggacatcaccaagatccaggtgaagagatgtgagaccatgagggagaagcacatgcagaagcagcaggagcgggagaagtctgtgctgacccccctgcggggagatgtggccagctgcaacacccaggtggccgagaagcctgtgctgacagctgtgcccggcatcaccaggcacctgaccaagaggctgcccaccaagagcagccagaaggtggaggtggagaccagcggcattggagacagcctgctgaatgtgaagtgtgccgcccagaccctggagaagaggggcaaggccaagcccaaggtgaatgtgaagcccagcgtggtgaaggtggtgagcagccccaagctggcccccaagaggaaggctgtggagatgcatgctgctgtgattgctgctgtgaagcccctgagcagcagctctgtgctgcaggagcccccagccaagaaggctgctgtggccgtggtgcccctggtgtctgaggacaagtctgtgacagtgcctgaggccgagaacccccgggacagcctggtgctgccccccacccagagcagcagtgacagcagccccccagaggtgtctggccccagcagcagccagatgtccatgaagacccggcggctgagcagcgccagcacaggcaagccacccctgtctgtggaggatgactttgagaagctgatctgggagatcagcggcggcaagctggaggccgagattgacctggaccccgggaaggatgaagatgacctgctgctggagctgtctgagatgattgacagctag

SEQ ID NO: 176392 - DNA, 2433 bp, synthetic construct; identical to SEQ ID NO: 176385
  misc_feature 1..2433: note = Description of Artificial Sequence: Synthetic coding sequence
  source 1..2433: mol_type = other DNA

SEQ ID NO: 176393 - DNA, 1584 bp, synthetic construct
  misc_feature 1..1584: note = Description of Artificial Sequence: Synthetic coding sequence
  source 1..1584: mol_type = other DNA
atggagcaccccagcaagatggagttcttccagaagctgggctatgaccgggaggatgtgctgcgggtgctgggcaagctgggggagggcgccctggtgaatgatgtgctgcaggagctgatcagaacaggcagcaggcctggggccctggagcaccctgctgccccccggctggtgccccggggcagctgtggggtgcctgattctgcccagaggggccctggaacagccctggaggaggacttccgcaccctggccagcagcctgcggcccatcgtgattgatggcagcaatgtggccatgagccacggcaacaaggagaccttcagctgccggggcatcaagctggccgtggactggttccgggaccggggccacacctacatcaaggtgtttgtgcccagctggaggaaggacccccccagggctgacacccccatccgggagcagcacgtgctggccgagctggagcggcaggccgtgctggtgtacacccccagcaggaaggtgcacggcaagaggctggtgtgctatgatgaccgctacatcgtgaaggtggcctatgagcaggatggagtcatcgtgtccaatgacaactacagagacctgcagagcgagaaccctgagtggaagtggttcatcgagcagaggctgctgatgttctcctttgtgaatgaccgcttcatgcccccagatgaccccctgggccgccacggccccagcctgagcaacttcctgagcaggaagcccaagcccccagagcccagctggcagcactgcccctacggcaagaagtgcacctacggcatcaagtgcaagttctaccaccctgagcggccccaccacgcccagctggccgtggctgatgagctgcgggccaagacaggagcccggcctggagctggagctgaggagcagaggcctccccgggcccctgggggcagcgctggggcccgggccgccccccgggagccctttgcccacagcctgcccccagcccggggcagcccagacctggccgccctgcggggcagcttcagccggctggccttcagtgatgacctgggccccctgggcccccccctgcctgtgcctgcctgcagcctgaccccccggctgggcggccctgactgggtgtctgctgggggccgggtgcccggccccctgagcctgcccagccctgagagccagttcagccctggggacctgcccccacctcctggcctgcagctgcagcccagaggagagcaccggccccgggacctgcatggagacctgctgagcccccggcggcccccagatgacccctgggcccggccccccaggagtgaccgcttccctggccgctctgtgtgggccgagcccgcctggggagatggagccaccggcggcctgtctgtgtatgccacagaagatgatgaaggagatgcccgggcccgggccagaattgccctgtacagcgtcttcccccgggaccaggtggacagagtgatggccgccttccctgagctgagtgacctggcccggctcatcctgctggtgcagcgctgccagagcgctggggcccccctgggcaagccctag

SEQ ID NO: 176394 - DNA, 1584 bp, synthetic construct; identical to SEQ ID NO: 176393
  misc_feature 1..1584: note = Description of Artificial Sequence: Synthetic coding sequence
  source 1..1584: mol_type = other DNA

SEQ ID NO: 176395 - DNA, 966 bp, synthetic construct
  misc_feature 1..966: note = Description of Artificial Sequence: Synthetic coding sequence
  source 1..966: mol_type = other DNA
atggagcaccccagcaagatggagttcttccagaagctgggctatgaccgggaggatgtgctgcgggtgctgggcaagctgggggagggcgccctggtgaatgatgtgctgcaggagctgatcagaacaggcagcaggcctggggccctggagcaccctgctgccccccggctggtgccccggggcagctgtggggtgcctgattctgcccagaggggccctggaacagccctggaggaggacttccgcaccctggccagcagcctgcggcccatcgtgattgatggcagcaatgtggccatgagccacggcaacaaggagaccttcagctgccggggcatcaagctggccgtggactggttccgggaccggggccacacctacatcaaggtgtttgtgcccagctggaggaaggacccccccagggctgacacccccatccgggagcagcacgtgctggccgagctggagcggcaggccgtgctggtgtacacccccagcaggaaggtgcacggcaagaggctggtgtgctatgatgaccgctacatcgtgaaggtggcctatgagcaggatggagtcatcgtgtccaatgacaactacagagacctgcagagcgagaaccctgagtggaagtggttcatcgagcagaggctgctgatgttctcctttgtgaatgaccgcttcatgcccccagatgaccccctgggccgccacggccccagcctgagcaacttcctgagcaggaagcccaagcccccagagcccagctggcagcactgcccctacggcaagaagtgcacctacggcatcaagtgcaagttctaccaccctgagcggccccaccacgcccagctggccgtggctgatgagctgcgggccaagacaggagcccggctgggcgtgcggggccggcccccagccagcgcccggcctgctgccccagctgctggccgcaccccaccctag

SEQ ID NO: 176396 - DNA, 966 bp, synthetic construct
  misc_feature 1..966: note = Description of Artificial Sequence: Synthetic coding sequence
  source 1..966: mol_type = other DNA
atggagcaccccagcaagatggagttcttccagaagctgggctatgaccgggaggatgtgctgcgggtgctgggcaagctgggggagggcgccctggtgaatgatgtgctgcaggagctgatcagaacaggcagcaggcctggggccctggagcaccctgctgccccccggctggtgccccggggcagctgtggggtgcctgattctgcccagaggggccctggaacagccctggaggaggacttccgcaccctggccagcagcctgcggcccatcgtgattgatggcagcaatgtggccatgagccacggcaacaaggagaccttcagctgccggggcatcaagctggccgtggactggttccgggaccggggccacacctacatcaaggtgtttgtgcccagctggaggaaggacccccccagggctgacacccccatccgggagcagcacgtgctggccgagctggagcggcaggccgtgctggtgtacacccccagcaggaaggtgcacggcaagaggctggtgtgctatgatgaccgctacatcgtgaaggtggcctatgagcaggatggagtcatcgtgtccaatgacaactacagagacctgcagagcgagaaccctgagtggaagtggttcatcgagcagaggctgctgatgttctcctttgtgaatgaccgcttcatgcccccagatgaccccctgggccgccacggccccagcctgagcaacttcctgagcaggaagcccaagcccccagagcccagctggcagcactgcccctacggcaagaagtgcacctacggcatcaagtgcaagttctaccaccctgagcggccccaccacgcccagctggccgtggctgatgagctgcgggccaagacaggagcccggcctgtgctgcccggccggcccccagccagcgcccggcctgctgccccagctgctggccgcaccccaccctag

SEQ ID NO: 176397 - DNA, 2211 bp, synthetic construct
  misc_feature 1..2211: note = Description of Artificial Sequence: Synthetic coding sequence
  source 1..2211: mol_type = other DNA
atggagattggaacagagatcagcaggaagatccgcagcgccatcaagggcaagctgcaggagctgggcgcctacgtggatgaggagctgcctgactacatcatggtgatggtggccaacaagaagagccaggaccagatgacagaggacctgagcctcttcctgggcaacaacaccatccgcttcaccgtgtggctgcatggagtgctggacaagctgcggtctgtgaccacagagcccagcagcctgaagagcagtgacaccaacatctttgacagcaatgtgcccagcaacaagagcaacttcagcagaggagatgagaggagacatgaggccgctgtgccccccctggccatccccagcgcccggcctgagaagagggacagccgggtgtccaccagcagccaggagagcaagaccaccaacgtgcggcagacctatgatgatggagctgccacccggctgatgagcacagtgaagcccctgcgggagcccgcccccagtgaagatgtgattgacatcaagccagagccagatgacctgattgatgaggacctgaactttgtgcaggagaaccccctgagccagaagaagcccaccgtgaccctgacctacggcagcagccggcccagcattgagatctacagacctccagccagcagaaatgctgacagcggcgtgcacctgaaccggctgcagttccagcagcagcagaacagcatccatgctgccaagcagctggacatgcagagctcctgggtgtatgaaacaggccgcctgtgtgagcctgaggtgctgaacagcctggaggagacctacagccccttcttcaggaacaacagcgagaagatgtccatggaggatgagaacttcaggaagaggaagctgcctgtggtgtcctctgtggtgaaggtgaagaagttcaaccatgatggagaggaggaggaggaggatgatgattatggcagcaggacaggcagcatcagcagctctgtgtctgtgcctgccaagccagagcggcggcccagcctgccccccagcaagcaggccaacaagaacctgatcctgaaggccatcagcgaggcccaggagagcgtgaccaagaccaccaactacagcacagtgccccagaagcagaccctgcctgtggcccccaggaccaggaccagccaggaggagctgctggccgaggtggtgcagggccagagcaggaccccccgcatcagcccccccatcaaggaggaggagaccaagggggacagcgtggagaagaaccagggcacccagcagaggcagctgctgagccggctgcagattgatcctgtgatggccgagaccctgcagatgagccaggactactatgacatggagagcatggtgcacgccgacaccaggagcttcatcctgaagaagcccaagctgtctgaggaggtggtggtggcccccaaccaggagagcggcatgaagacagctgacagcctgcgggtgctgagcggccacctgatgcagacccgggacctggtgcagcctgacaagccagccagccccaagttcatcgtgaccctggatggagtgcccagccccccaggctacatgtctgaccaggaggaggacatgtgctttgagggcatgaagcctgtgaaccagacagctgccagcaacaagggcctgcggggcctgctgcacccccagcagctgcacctgctgagccggcagctggaggaccccaacggcagcttcagcaatgctgagatgtctgagctgtctgtggcccagaagccagagaagctgctggagcgctgcaagtactggccagcctgcaagaatggagatgaatgtgcctaccaccaccccatcagcccctgcaaggccttccccaactgcaagtttgctgagaagtgcctgtttgtgcaccccaactgcaagtatgatgccaagtgcaccaagccagactgccccttcacccacgtgtcccggcgcatccctgtgctgagccccaagccagctgtggcccccccagccccacccagcagcagccagctgtgccgctacttccctgcctgcaagaagatggagtgccccttctaccaccccaagcactgccgcttcaacacccagtgcaccaggccagactgcaccttctaccaccccaccatcaacgtgccccccaggcatgccctgaagtggatccggccccagaccagcgagtag

SEQ ID NO: 176398 - DNA, 1740 bp, synthetic construct
  misc_feature 1..1740: note = Description of Artificial Sequence: Synthetic coding sequence
  source 1..1740: mol_type = other DNA
atggagattggaacagagatcagcaggaagatccgcagcgccatcaagggcaagctgcaggagctgggcgcctacgtggatgaggagctgcctgactacatcatggtgatggtggccaacaagaagagccaggaccagatgacagaggacctgagcctcttcctgggcaacaacaccatccgcttcaccgtgtggctgcatggagtgctggacaagctgcggtctgtgaccacagagcccagcagcctgaagagcagtgacaccaacatctttgacagcaatgtgcccagcaacaagagcaacttcagcagaggagatgagaggagacatgaggccgctgtgccccccctggccatccccagcgcccggcctgagaagagggacagccgggtgtccaccagcagccaggagagcaagaccaccaacgtgcggcagacctatgatgatggagctgccacccggctgatgagcacagtgaagcccctgcgggagcccgcccccagtgaagatgtgattgacatcaagccagagccagatgacctgattgatgaggacctgaactttgtgcaggagaaccccctgagccagaagaagcccaccgtgaccctgacctacggcagcagccggcccagcattgagatctacagacctccagccagcagaaatgctgacagcggcgtgcacctgaaccggctgcagttccagcagcagcagaacagcatccatgctgccaagcagctggacatgcagagctcctgggtgtatgaaacaggccgcctgtgtgagcctgaggtgctgaacagcctggaggagacctacagccccttcttcaggaacaacagcgagaagatgtccatggaggatgagaacttcaggaagaggaagctgcctgtggtgtcctctgtggtgaaggtgaagaagttcaaccatgatggagaggaggaggaggaggatgatgattatggcagcaggacaggcagcatcagcagctctgtgtctgtgcctgccaagccagagcggcggcccagcctgccccccagcaagcaggccaacaagaacctgatcctgaaggccatcagcgaggcccaggagagcgtgaccaagaccaccaactacagcacagtgccccagaagcagaccctgcctgtggcccccaggaccaggaccagccaggaggagctgctggccgaggtggtgcagggccagagcaggaccccccgcatcagcccccccatcaaggaggaggagaccaagggggacagcgtggagaagaaccaggccgagatgtctgagctgtctgtggcccagaagccagagaagctgctggagcgctgcaagtactggccagcctgcaagaatggagatgaatgtgcctaccaccaccccatcagcccctgcaaggccttccccaactgcaagtttgctgagaagtgcctgtttgtgcaccccaactgcaagtatgatgccaagtgcaccaagccagactgccccttcacccacgtgtcccggcgcatccctgtgctgagccccaagcctgtggcccccccagccccacccagcagcagccagctgtgccgctacttccctgcctgcaagaagatggagtgccccttctaccaccccaagcactgccgcttcaacacccagtgcaccaggccagactgcaccttctaccaccccaccatcaacgtgcccccaagacatgccctgaagtggatccggccccagaccagcgagtag

SEQ ID NO: 176399 - DNA, 921 bp, synthetic construct
  misc_feature 1..921: note = Description of Artificial Sequence: Synthetic coding sequence
  source 1..921: mol_type = other DNA
atgaggatgagcagcaagttccccagcccccccctgcccatcttcctgcccccagagcctgtggacctgggcagcatcaccagcagcagctgcagcctgaatgagctggacaacatcagccacctgctgaggaagatctctgctgacatcaatgagatcaagggcatgaaggccgccatcctgactgtggaggccaacctgtttgacctgaatgtgcgggtgtccaagaatgaggccaagatcagcagcctggaggtgaagatgaatgagtacagcaccacctatgagtgcaaccggcagtttgaggaccaggaggaggacacagagagccagagcaggaccacagatgtgaagatcatcggcttcctgagaaatgtggagaagggcacccagcagaggcagctgctgagccggctgcagattgatcctgtgatggccgagaccctgcagatgagccaggccgagatgtctgagctgtctgtggcccagaagccagagaagctgctggagcgctgcaagtactggccagcctgcaagaatggagatgaatgtgcctaccaccaccccatcagcccctgcaaggccttccccaactgcaagtttgctgagaagtgcctgtttgtgcaccccaactgcaagtatgatgccaagtgcaccaagccagactgccccttcacccacgtgagccgccgcatccctgtgctgagccccaagcctgtggcccccccagccccacccagcagcagccagctgtgccgctacttccctgcctgcaagaagatggagtgccccttctaccaccccaagcactgccgcttcaacacccagtgcaccaggccagactgcaccttctaccaccccaccatcaacgtgccccccaggcatgccctgaagtggatccggccccagaccagcgagtag

SEQ ID NO: 176400 - DNA, 1716 bp, synthetic construct
  misc_feature 1..1716: note = Description of Artificial Sequence: Synthetic coding sequence
  source 1..1716: mol_type = other DNA
atggtgatggtggccaacaagaagagccaggaccagatgacagaggacctgagcctcttcctgggcaacaacaccatccgcttcaccgtgtggctgcatggagtgctggacaagctgcggtctgtgaccacagagcccagcagcctgaagagcagtgacaccaacatctttgacagcaatgtgcccagcaacaagagcaacttcagcagaggagatgagaggagacatgaggccgctgtgccccccctggccatccccagcgcccggcctgagaagagggacagccgggtgtccaccagcagccaggagagcaagaccaccaacgtgcggcagacctatgatgatggagctgccacccggctgatgagcacagtgaagcccctgcgggagcccgcccccagtgaagatgtgattgacatcaagccagagccagatgacctgattgatgaggacctgaactttgtgcaggagaaccccctgagccagaagaagcccaccgtgaccctgacctacggcagcagccggcccagcattgagatctacagacctccagccagcagaaatgctgacagcggcgtgcacctgaaccggctgcagttccagcagcagcagaacagcatccatgctgccaagcagctggacatgcagagctcctgggtgtatgaaacaggccgcctgtgtgagcctgaggtgctgaacagcctggaggagacctacagccccttcttcaggaacaacagcgagaagatgtccatggaggatgagaacttcaggaagaggaagctgcctgtggtgtcctctgtggtgaaggtgaagaagttcaaccatgatggagaggaggaggaggaggatgatgattatggcagcaggacaggcagcatcagcagctctgtgtctgtgcctgccaagccagagcggcggcccagcctgccccccagcaagcaggccaacaagaacctgatcctgaaggccatcagcgaggcccaggagagcgtgaccaagaccaccaactacagcacagtgccccagaagcagaccctgcctgtggcccccaggaccaggaccagccaggaggagctgctggccgaggtggtgcagggccagagcaggaccccccgcatcagcccccccatcaaggaggaggagaccaagggggacagcgtggagaagaaccagggcacccagcagaggcagctgctgagccggctgcagattgatcctgtgatggccgagaccctgcagatgagccaggccgagatgtctgagctgtctgtggcccagaagccagagaagctgctggagcgctgcaagtactggccagcctgcaagaatggagatgaatgtgcctaccaccaccccatcagcccctgcaaggccttccccaactgcaagtttgctgagaagtgcctgtttgtgcaccccaactgcaagtatgatgccaagtgcaccaagccagactgccccttcacccacgtgagccgccgcatccctgtgctgagccccaagccagctgtggcccccccagccccacccagcagcagccagctgtgccgctacttccctgcctgcaagaagatggagtgccccttctaccaccccaagcactgccgcttcaacacccagtgcaccaggccagactgcaccttctaccaccccaccatcaacgtgcccccaagacatgccctgaagtggatccggccccagaccagcgagtag

SEQ ID NO: 176401 - DNA, 2022 bp, synthetic construct
  misc_feature 1..2022: note = Description of Artificial Sequence: Synthetic coding sequence
  source 1..2022: mol_type = other DNA
atggagattggaacagagatcagcaggaagatccgcagcgccatcaagggcaagctgcaggagctgggcgcctacattgatgaggagctgcctgactacatcatggtgatggtggccaacaagaagagccaggaccagatgacagaggacctgagcctcttcctgggcaacaacaccatccgcttcaccgtgtggctgcatggagtgctggacaagctgcggtctgtgaccacagagcccagcagcctgaagagcagtgacaccaacatctttgacagcaatgtgcccagcaacaagagcaacttcagcagaggagatgagaggagacatgaggccgctgtgccccccctggccatccccagcgcccggcctgagaagagggacagccgggtgtccaccagcagccaggagagcaagaccaccaacgtgcggcagacctatgatgatggagctgccacccggctgatgagcacagtgaagcccctgcgggagcccgcccccagtgaagatgtgattgacatcaagccagagccagatgacctgattgatgaggacctgaactttgtgcaggagaaccccctgagccagaagaagcccaccgtgaccctgacctacggcagcagccggcccagcattgagatctacagacctccagccagcagaaatgctgacagcggcgtgcacctgaaccggctgcagttccagcagcagcagaacagcatccatgctgccaagcagctggacatgcagagctcctgggtgtatgaaacaggccgcctgtgtgagcctgaggtgctgaacagcctggaggagacctacagccccttcttcaggaacaacagcgagaagatgtccatggaggatgagaacttcaggaagaggaagctgcctgtggtgtcctctgtggtgaaggtgaagaagttcaaccatgatggagaggaggaggaggaggatgatgattatggcagcaggacaggcagcatcagcagctctgtgtctgtgcctgccaagccagagcggcggcccagcctgccccccagcaagcaggccaacaagaacctgatcctgaaggccatcagcgaggcccaggagagcgtgaccaagaccaccaactacagcacagtgccccagaagcagaccctgcctgtggcccccaggaccaggaccagccaggaggagctgctggccgaggtggtgcagggccagagcaggaccccccgcatcagcccccccatcaaggaggaggagaccaagggggacagcgtggagaagaaccagggcacccagcagaggcagctgctgagccggctgcagattgatcctgtgatggccgagaccctgcagatgagccaggactactatgacatggagagcatggtgcacgccgacaccaggagcttcatcctgaagaagcccaagctgtctgaggaggtggtggtggcccccaaccaggagagcggcatgaagacagctgacagcctgcgggtgctgagcggccacctgatgcagacccgggacctggtgcagcctgacaagccagccagccccaagttcatcgtgaccctggatggagtgcccagccccccaggctacatgtctgaccaggaggaggacatgtgctttgagggcatgaagcctgtgaaccagacagctgccagcaacaagggcctgcggggcctgctgcacccccagcagctgcacctgctgagccggcagctggaggaccccaactgcaagtatgatgccaagtgcaccaagccagactgccccttcacccacgtgagccgccgcatccctgtgctgagccccaagccagctgtggcccccccagccccacccagcagcagccagctgtgccgctacttccctgcctgcaagaagatggagtgccccttctaccaccccaagcactgccgcttcaacacccagtgcaccaggccagactgcaccttctaccaccccaccatcaacgtgcccccaagacatgccctgaagtggatccggccccagaccagcgagtag

SEQ ID NO: 176402 - DNA, 1716 bp, synthetic construct; identical to SEQ ID NO: 176400
  misc_feature 1..1716: note = Description of Artificial Sequence: Synthetic coding sequence
  source 1..1716: mol_type = other DNA

SEQ ID NO: 176403 - DNA, 1758 bp, synthetic construct
  misc_feature 1..1758: note = Description of Artificial Sequence: Synthetic coding sequence
  source 1..1758: mol_type = other DNA
atggagattggaacagagatcagcaggaagatccgcagcgccatcaagggcaagctgcaggagctgggcgcctacgtggatgaggagctgcctgactacatcatggtgatggtggccaacaagaagagccaggaccagatgacagaggacctgagcctcttcctgggcaacaacaccatccgcttcaccgtgtggctgcatggagtgctggacaagctgcggtctgtgaccacagagcccagcagcctgaagagcagtgacaccaacatctttgacagcaatgtgccccccctggccatccccagcgcccggcctgagaagagggacagccgggtgtccaccagcagccaggagagcaagaccaccaacgtgcggcagacctatgatgatggagctgccacccggctgatgagcacagtgaagcccctgcgggagcccgcccccagtgaagatgtgattgacatcaagccagagccagatgacctgattgatgaggacctgaactttgtgcaggagaaccccctgagccagaagaagcccaccgtgaccctgacctacggcagcagccggcccagcattgagatctaccggcccccagccagcagaaatgctgacagcggcgtgcacctgaaccggctgcagttccagcagcagcagaacagcatccacgccgccaagcagctggacatgcagagctcctgggtgtatgagaccggccgcctgtgtgagcctgaggtgctgaacagcctggaggagacctacagccccttcttcaggaacaacagcgagaagatgtccatggaggatgagaacttcaggaagaggaagctgcctgtggtgtcctctgtggtgaaggtgaagaagttcaaccatgatggagaggaggaggaggaggatgatgattatggcagcaggacaggcagcatcagcagctctgtgtctgtgcctgccaagccagagcggcggcccagcctgccccccagcaagcaggccaacaagaacctgatcctgaaggccatcagcgaggcccaggagagcgtgaccaagaccaccaactacagcacagtgccccagaagcagaccctgcctgtggcccccaggaccaggaccagccaggaggagctgctggccgaggtggtgcagggccagagcaggaccccccgcatcagcccccccatcaaggaggaggagaccaagggggacagcgtggagaagaaccagggcacccagcagaggcagctgctgagccggctgcagattgatcctgtgatggccgagaccctgcagatgagccaggccgagatgtctgagctgtctgtggcccagaagccagagaagctgctggagcgctgcaagtactggccagcctgcaagaatggagatgaatgtgcctaccaccaccccatcagcccctgcaaggccttccccaactgcaagtttgctgagaagtgcctgtttgtgcaccccaactgcaagtatgatgccaagtgcaccaagccagactgccccttcacccacgtgtcccggcgcatccctgtgctgagccccaagcctgtggcccccccagccccacccagcagcagccagctgtgccgctacttccctgcctgcaagaagatggagtgccccttctaccaccccaagcactgccgcttcaacacccagtgcaccaggccagactgcaccttctaccaccccaccatcaacgtgcccccaagacatgccctgaagtggatccggccccagaccagcgagtag

SEQ ID NO: 176404 - DNA, 2136 bp, synthetic construct
  misc_feature 1..2136: note = Description of Artificial Sequence: Synthetic coding sequence
  source 1..2136: mol_type = other DNA
atggagattggaacagagatcagcaggaagatccgcagcgccatcaagggcaagctgcaggagctgggcgcctacgtggatgaggagctgcctgactacatcatggtgatggtggccaacaagaagagccaggaccagatgacagaggacctgagcctcttcctgggcaacaacaccatccgcttcaccgtgtggctgcatggagtgctggacaagctgcggtctgtgaccacagagcccagcagcctgaagagcagtgacaccaacatctttgacagcaatgtgcccagcaacaagagcaacttcagcagaggagatgagaggagacatgaggccgctgtgccccccctggccatccccagcgcccggcctgagaagagggacagccgggtgtccaccagcagccaggagagcaagaccaccaacgtgcggcagacctatgatgatggagctgccacccggctgatgagcacagtgaagcccctgcgggagcccgcccccagtgaagatgtgattgacatcaagccagagccagatgacctgattgatgaggacctgaactttgtgcaggagaaccccctgagccagaagaagcccaccgtgaccctgacctacggcagcagccggcccagcattgagatctacagacctccagccagcagaaatgctgacagcggcgtgcacctgaaccggctgcagttccagcagcagcagaacagcatccatgctgccaagcagctggacatgcagagctcctgggtgtatgaaacaggccgcctgtgtgagcctgaggtgctgaacagcctggaggagacctacagccccttcttcaggaacaacagcgagaagatgtccatggaggatgagaacttcaggaagaggaagctgcctgtggtgtcctctgtggtgaaggtgaagaagttcaaccatgatggagaggaggaggaggaggatgatgattatggcagcaggacaggcagcatcagcagctctgtgtctgtgcctgccaagccagagcggcggcccagcctgccccccagcaagcaggccaacaagaacctgatcctgaaggccatcagcgaggcccaggagagcgtgaccaagaccaccaactacagcacagtgccccagaagcagaccctgcctgtggcccccaggaccaggaccagccaggaggagctgctggccgaggtggtgcagggccagagcaggaccccccgcatcagcccccccatcaaggaggaggagaccaagggggacagcgtggagaagaaccaggactactatgacatggagagcatggtgcatgctgacaccaggagcttcatcctgaagaagcccaagctgtctgaggaggtggtggtggcccccaaccaggagagcggcatgaagacagctgacagcctgcgggtgctgagcggccacctgatgcagacccgggacctggtgcagcctgacaagccagccagccccaagttcatcgtgaccctggatggagtgcccagccccccaggctacatgtctgaccaggaggaggacatgtgctttgagggcatgaagcctgtgaaccagacagctgccagcaacaagggcctgcggggcctgctgcacccccagcagctgcacctgctgagccggcagctggaggaccccaacggcagcttcagcaatgctgagatgtctgagctgtctgtggcccagaagccagagaagctgctggagcgctgcaagtactggccagcctgcaagaatggagatgaatgtgcctaccaccaccccatcagcccctgcaaggccttccccaactgcaagtttgctgagaagtgcctgtttgtgcaccccaactgcaagtatgatgccaagtgcaccaagccagactgccccttcacccacgtgagccgccgcatccctgtgctgagccccaagccagctgtggcccccccagccccacccagcagcagccagctgtgccgctacttccctgcctgcaagaagatggagtgccccttctaccaccccaagcactgccgcttcaacacccagtgcaccaggccagactgcaccttctaccaccccaccatcaacgtgcccccaagacatgccctgaagtggatccggccccagaccagcgagtag

SEQ ID NO: 176405 - DNA, 2136 bp, synthetic construct
  misc_feature 1..2136: note = Description of Artificial Sequence: Synthetic coding sequence
  source 1..2136: mol_type = other DNA
atggagattggaacagagatcagcaggaagatccgcagcgccatcaagggcaagctgcaggagctgggcgcctacattgatgaggagctgcctgactacatcatggtgatggtggccaacaagaagagccaggaccagatgacagaggacctgagcctcttcctgggcaacaacaccatccgcttcaccgtgtggctgcatggagtgctggacaagctgcggtctgtgaccacagagcccagcagcctgaagagcagtgacaccaacatctttgacagcaatgtgcccagcaacaagagcaacttcagcagaggagatgagaggagacatgaggccgctgtgccccccctggccatccccagcgcccggcctgagaagagggacagccgggtgtccaccagcagccaggagagcaagaccaccaacgtgcggcagacctatgatgatggagctgccacccggctgatgagcacagtgaagcccctgcgggagcccgcccccagtgaagatgtgattgacatcaagccagagccagatgacctgattgatgaggacctgaactttgtgcaggagaaccccctgagccagaagaagcccaccgtgaccctgacctacggcagcagccggcccagcattgagatctacagacctccagccagcagaaatgctgacagcggcgtgcacctgaaccggctgcagttccagcagcagcagaacagcatccatgctgccaagcagctggacatgcagagctcctgggtgtatgaaacaggccgcctgtgtgagcctgaggtgctgaacagcctggaggagacctacagccccttcttcaggaacaacagcgagaagatgtccatggaggatgagaacttcaggaagaggaagctgcctgtggtgtcctctgtggtgaaggtgaagaagttcaaccatgatggagaggaggaggaggaggatgatgattatggcagcaggacaggcagcatcagcagctctgtgtctgtgcctgccaagccagagcggcggcccagcctgccccccagcaagcaggccaacaagaacctgatcctgaaggccatcagcgaggcccaggagagcgtgaccaagaccaccaactacagcacagtgccccagaagcagaccctgcctgtggcccccaggaccaggaccagccaggaggagctgctggccgaggtggtgcagggccagagcaggaccccccgcatcagcccccccatcaaggaggaggagaccaagggggacagcgtggagaagaaccaggactactatgacatggagagcatggtgcatgctgacaccaggagcttcatcctgaagaagcccaagctgtctgaggaggtggtggtggcccccaaccaggagagcggcatgaagacagctgacagcctgcgggtgctgagcggccacctgatgcagacccgggacctggtgcagcctgacaagccagccagccccaagttcatcgtgaccctggatggagtgcccagccccccaggctacatgtctgaccaggaggaggacatgtgctttgagggcatgaagcctgtgaaccagacagctgccagcaacaagggcctgcggggcctgctgcacccccagcagctgcacctgctgagccggcagctggaggaccccaacggcagcttcagcaatgctgagatgtctgagctgtctgtggcccagaagccagagaagctgctggagcgctgcaagtactggccagcctgcaagaatggagatgaatgtgcctaccaccaccccatcagcccctgcaaggccttccccaactgcaagtttgctgagaagtgcctgtttgtgcaccccaactgcaagtatgatgccaagtgcaccaagccagactgccccttcacccacgtgagccgccgcatccctgtgctgagccccaagccagctgtggcccccccagccccacccagcagcagccagctgtgccgctacttccctgcctgcaagaagatggagtgccccttctaccaccccaagcactgccgcttcaacacccagtgcaccaggccagactgcaccttctaccaccccaccatcaacgtgcccccaagacatgccctgaagtggatccggccccagaccagcgagtag

SEQ ID NO: 176406 - DNA, 849 bp, synthetic construct
  misc_feature 1..849: note = Description of Artificial Sequence: Synthetic coding sequence
  source 1..849: mol_type = other DNA
atgaggatgagcagcaagttccccagcccccccctgcccatcttcctgcccccagagcctgtggacctgggcagcatcaccagcagcagctgcagcctgaatgagctggacaacatcagccacctgctgaggaagatctctgctgacatcaatgagatcaagggcatgaaggccgccatcctgactgtggaggccaacctgtttgacctgaatgtgcgggtgtccaagaatgaggccaagatcagcagcctggaggtgaagatgaatgagtacagcaccacctatgagtgcaaccggcagtttgaggaccaggaggaggacacagagagccagagcaggaccacagatgtgaagatcatcggcttcctgagaaatgtggagaaggccgagatgtctgagctgtctgtggcccagaagccagagaagctgctggagcgctgcaagtactggccagcctgcaagaatggagatgaatgtgcctaccaccaccccatcagcccctgcaaggccttccccaactgcaagtttgctgagaagtgcctgtttgtgcaccccaactgcaagtatgatgccaagtgcaccaagccagactgccccttcacccacgtgtcccggcgcatccctgtgctgagccccaagccagctgtggcccccccagccccacccagcagcagccagctgtgccgctacttccctgcctgcaagaagatggagtgccccttctaccaccccaagcactgccgcttcaacacccagtgcaccaggccagactgcaccttctaccaccccaccatcaacgtgccccccaggcatgccctgaagtggatccggccccagaccagcgagtag

SEQ ID NO: 176407 - DNA, 219 bp, synthetic construct
  misc_feature 1..219: note = Description of Artificial Sequence: Synthetic coding sequence
  source 1..219: mol_type = other DNA
atggtgatggtggccaacaagaagagccaggaccagatgacagaggacctgagcctcttcctgggcaacaacaccatccgcttcaccgtgtggctgcatggagtgctggacaagctgcggtctgtgaccacagagcccagcagcctgaagagcagtgacaccaacatctttgacagcaatgtgcccagcaacaagagcaacttcagcagaggagactag

SEQ ID NO: 176408 - DNA, 285 bp, synthetic construct
  misc_feature 1..285: note = Description of Artificial Sequence: Synthetic coding sequence
  source 1..285: mol_type = other DNA
atggtgatggtggccaacaagaagagccaggaccagatgacagaggacctgagcctcttcctgggcaacaacaccatccgcttcaccgtgtggctgcatggagtgctggacaagctgcggtctgtgaccacagagcccagcagcctgaagagcagtgacaccaacatctttgacagcaatgtgcccagcaacaagagcaacttcagcagaggagatgagaggagacatgaggccgctgtgccccccctggccatccccagcgcccggcctgagaagagggactag

SEQ ID NO: 176409 - DNA, 648 bp, synthetic construct
  misc_feature 1..648: note = Description of Artificial Sequence: Synthetic coding sequence
  source 1..648: mol_type = other DNA
atggtgatggtggccaacaagaagagccaggaccagatgacagaggacctgagcctcttcctgggcaacaacaccatccgcttcaccgtgtggctgcatggagtgctggacaagctgcggtctgtgaccacagagcccagcagcctgaagagcagtgacaccaacatctttgacagcaatgtgcccagcaacaagagcaacttcagcagaggagatgagaggagacatgaggccgctgtgccccccctggccatccccagcgcccggcctgagaagagggacagccgggtgtccaccagcagccaggagagcaagaccaccaacgtgcggcagacctatgatgatggagctgccacccggctgatgagcacagtgaagcccctgcgggagcccgcccccagtgaagatgtgattgacatcaagccagagccagatgacctgattgatgaggacctgaactttgtgcaggagaaccccctgagccagaagaagcccaccgtgaccctgacctacggcagcagccggcccagcattgagatctacagacctccagccagcagaaatgctgacagcggcgtgcacctgaaccggctgcagttccagcagcagcagaacagcatccatgctgccaagcagctggacatgtag

SEQ ID NO: 176410 - DNA, 1956 bp, synthetic construct
  misc_feature 1..1956: note = Description of Artificial Sequence: Synthetic coding sequence
  source 1..1956: mol_type = other DNA
tgaagtgacaccaacatctttgacagcaatgtgcccagcaacaagagcaacttcagcagaggagatgagaggagacatgaggccgctgtgccccccctggccatccccagcgcccggcctgagaagagggacagccgggtgtccaccagcagccaggagagcaagaccaccaacgtgcggcagacctatgatgatggagctgccacccggctgatgagcacagtgaagcccctgcgggagcccgcccccagtgaagatgtgattgacatcaagccagagccagatgacctgattgatgaggacctgaactttgtgcaggagaaccccctgagccagaagaagcccaccgtgaccctgacctacggcagcagccggcccagcattgagatctacagacctccagccagcagaaatgctgacagcggcgtgcacctgaaccggctgcagttccagcagcagcagaacagcatccatgctgccaagcagctggacatgcagagctcctgggtgtatgaaacaggccgcctgtgtgagcctgaggtgctgaacagcctggaggagacctacagccccttcttcaggaacaacagcgagaagatgtccatggaggatgagaacttcaggaagaggaagctgcctgtggtgtcctctgtggtgaaggtgaagaagttcaaccatgatggagaggaggaggaggaggatgatgattatggcagcaggacaggcagcatcagcagctctgtgtctgtgcctgccaagccagagcggcggcccagcctgccccccagcaagcaggccaacaagaacctgatcctgaaggccatcagcgaggcccaggagagcgtgaccaagaccaccaactacagcacagtgccccagaagcagaccctgcctgtggcccccaggaccaggaccagccaggaggagctgctggccgaggtggtgcagggccagagcaggaccccccgcatcagcccccccatcaaggaggaggagaccaagggggacagcgtggagaagaaccagggcacccagcagaggcagctgctgagccggctgcagattgatcctgtgatggccgagaccctgcagatgagccaggactactatgacatggagagcatggtgcacgccgacaccaggagcttcatcctgaagaagcccaagctgtctgaggaggtggtggtggcccccaaccaggagagcggcatgaagacagctgacagcctgcgggtgctgagcggccacctgatgcagacccgggacctggtgcagcctgacaagccagccagccccaagttcatcgtgaccctggatggagtgcccagccccccaggctacatgtctgaccaggaggaggacatgtgctttgagggcatgaagcctgtgaaccagacagctgccagcaacaagggcctgcggggcctgctgcacccccagcagctgcacctgctgagccggcagctggaggaccccaacggcagcttcagcaatgctgagatgtctgagctgtctgtggcccagaagccagagaagctgctggagcgctgcaagtactggccagcctgcaagaatggagatgaatgtgcctaccaccaccccatcagcccctgcaaggccttccccaactgcaagtttgctgagaagtgcctgtttgtgcaccccaactgcaagtatgatgccaagtgcaccaagccagactgccccttcacccacgtgtcccggcgcatccctgtgctgagccccaagcctgtggcccccccagccccacccagcagcagccagctgtgccgctacttccctgcctgcaagaagatggagtgccccttctaccaccccaagcactgccgcttcaacacccagtgcaccaggccagactgcaccttctaccaccccaccatcaacgtgcccccaagacatgccctgaagtggatccggccccagaccagcgagtag

SEQ ID NO: 176411 - DNA, 402 bp, synthetic construct
  misc_feature 1..402: note = Description of Artificial Sequence: Synthetic coding sequence
  source 1..402: mol_type = other DNA
atggtgatggtggccaacaagaagagccaggaccagatgacagaggacctgagcctcttcctgggcaacaacaccatccgcttcaccgtgtggctgcatggagtgctggacaagctgcggtctgtgaccacagagcccagcagcctgaagagcagtgacaccaacatctttgacagcaatgtgcccagcaacaagagcaacttcagcagaggagatgagaggagacatgaggccgctgtgccccccctggccatccccagcgcccggcctgagaagagggacagccgggtgtccaccagcagccaggagagcaagaccaccaacgtgcggcagacctatgatgatggagctgccacccggctgatgagcacagtgaagcccctgcgggagcccgccccctag

SEQ ID NO: 176412 - DNA, 2193 bp, synthetic construct
  misc_feature 1..2193: note = Description of Artificial Sequence: Synthetic coding sequence
  source 1..2193: mol_type = other DNA
atggagattggaacagagatcagcaggaagatccgcagcgccatcaagggcaagctgcaggagctgggcgcctacgtggatgaggagctgcctgactacatcatggtgatggtggccaacaagaagagccaggaccagatgacagaggacctgagcctcttcctgggcaacaacaccatccgcttcaccgtgtggctgcatggagtgctggacaagctgcggtctgtgaccacagagcccagcagcctgaagagcagtgacaccaacatctttgacagcaatgtgcccagcaacaagagcaacttcagcagaggagatgagaggagacatgaggccgctgtgccccccctggccatccccagcgcccggcctgagaagagggacagccgggtgtccaccagcagccaggagagcaagaccaccaacgtgcggcagacctatgatgatggagctgccacccggctgatgagcacagtgaagcccctgcgggagcccgcccccagtgaagatgtgattgacatcaagccagagccagatgacctgattgatgaggacctgaactttgtgcaggagaaccccctgagccagaagaagcccaccgtgaccctgacctacggcagcagccggcccagcattgagatctacagacctccagccagcagaaatgctgacagcggcgtgcacctgaaccggctgcagttccagcagcagcagaacagcatccatgctgccaagcagctggacatgcagagctcctgggtgtatgaaacaggccgcctgtgtgagcctgaggtgctgaacagcctggaggagacctacagccccttcttcaggaacaacagcgagaagatgtccatggaggatgagaacttcaggaagaggaagctgcctgtggtgtcctctgtggtgaaggtgaagaagttcaaccatgatggagaggaggaggaggaggatgatgattatggcagcaggacaggcagcatcagcagctctgtgtctgtgcctgccaagccagagcggcggcccagcctgccccccagcaagcaggccaacaagaacctgatcctgaaggccatcagcgaggcccaggagagcgtgaccaagaccaccaactacagcacagtgccccagaagcagaccctgcctgtggcccccaggaccaggaccagccaggaggagctgctggccgaggtggtgcagggccagagcaggaccccccgcatcagcccccccatcaaggaggaggagaccaagggggacagcgtggagaagaaccagggcacccagcagaggcagctgctgagccggctgcagattgatcctgtgatggccgagaccctgcagatgagccaggactactatgacatggagagcatggtgcacgccgacaccaggagcttcatcctgaagaagcccaagctgtctgaggaggtggtggtggcccccaaccaggagagcggcatgaagacagctgacagcctgcgggtgctgagcggccacctgatgcagacccgggacctggtgcagcctgacaagccagccagccccaagttcatcgtgaccctggatggagtgcccagccccccaggctacatgtctgaccaggaggaggacatgtgctttgagggcatgaagcctgtgaaccagacagctgccagcaacaagggcctgcggggcctgctgcacccccagcagctgcacctgctgagccggcagctggaggaccccaatgctgagatgtctgagctgtctgtggcccagaagccagagaagctgctggagcgctgcaagtactggccagcctgcaagaatggagatgaatgtgcctaccaccaccccatcagcccctgcaaggccttccccaactgcaagtttgctgagaagtgcctgtttgtgcaccccaactgcaagtatgatgccaagtgcaccaagccagactgccccttcacccacgtgagccgccgcatccctgtgctgagccccaagcctgtggcccccccagccccacccagcagcagccagctgtgccgctacttccctgcctgcaagaagatggagtgccccttctaccaccccaagcactgccgcttcaacacccagtgcaccaggccagactgcaccttctaccaccccaccatcaacgtgccccccaggcatgccctgaagtggatccggccccagaccagcgagtag

SEQ ID NO: 176413 - DNA, 2709 bp, synthetic construct
  misc_feature 1..2709: note = Description of Artificial Sequence: Synthetic coding sequence
  source 1..2709: mol_type = other DNA
atggctgaccctgaggtgtgctgcttcatcaccaagatcctgtgtgcccatggaggccgcatggccctggatgccctgctgcaggagatcgccctgtctgagccccagctgtgtgaggtgctgcaggtggccggccctgacagatttgtggtgctggagaccggcggggaggccggcatcaccaggtctgtggtggccaccacccgggcccgggtgtgcaggaggaagtactgccagaggccctgtgacaacctgcacctgtgcaagctgaacctgctgggccgctgcaactacagccagagcgagaggaacctgtgcaagtacagccatgaggtgctgtctgaggagaacttcaaggtgctgaagaaccacgagctgagcggcctgaacaaggaggagctggccgtgctgctgctgcagagcgaccccttcttcatgcctgagatctgcaagagctacaagggggagggccggcagcagatctgcaaccagcagcccccctgcagccggctgcacatctgtgaccacttcacccggggcaactgccgcttccccaactgcctgcggagccacaacctgatggacaggaaggtgctggccatcatgagggagcacggcctgaacccagatgtggtgcagaacatccaggacatctgcaacagcaagcacatgcagaagaaccccccaggcccccgggcccccagcagccacagaagaaacatggcctaccgggcccggagcaagagccgggaccgcttcttccagggcagccaggagttcctggccagcgccagcgccagcgctgagaggagctgcacccccagcccagaccagatcagccaccgggccagcctggaggatgcccctgtggatgacctgaccaggaagttcacctacctgggcagccaggaccgggcccggccccccagcggcagcagcaaggccacagacctgggcggcaccagccaggccggcaccagccagcgcttcctggagaatggcagccaggaggacctgctgcacggcaaccctggcagcacctacctggccagcaacagcaccagcgcccccaactggaagagcctgacctcctggaccaatgaccagggcgcccggaggaagacagtgttcagccccaccctgcctgctgcccggagcagcctgggcagcctgcagaccccagaggccgtgaccaccaggaaaggaacaggcctgctgagcagtgactaccgcatcatcaacgggaagagcggcacccaggacatccagcccggccccctcttcaacaacaatgctgatggagtggccacagacatcaccagcaccaggagcctgaactacaagagcaccagcagcggccaccgggagatcagcagcccccgcatccaggatgctggccctgccagcagagatgtgcaggccaccggcagaattgctgatgatgctgacccccgggtggccctggtgaatgacagcctgagtgatgtgaccagcaccaccagcagccgggtggatgaccatgattctgaggagatctgcctggaccacctgtgcaagggctgccccctgaatggcagctgcagcaaggtgcacttccacctgccctaccgctggcagatgctgattggcaagacctggacagactttgagcacatggagaccatcgagaagggctactgcaaccctggcatccacctgtgcagcgtgggcagctacaccatcaacttccgggtgatgagctgtgacagcttccccatccggcggctgagcacccccagctctgtgaccaagccagccaacagcgtcttcaccaccaagtggatctggtactggaagaatgaaagtggcacctggatccagtatggagaggagaaggacaagaggaagaacagcaatgtggacagcagctacctggagagcctgtaccagagctgcccccggggcgtggtgcccttccaggccggcagcagaaattatgagctgtccttccagggcatgatccagaccaacatcgccagcaagacccagaaggatgtgatcagaagacccacctttgtgccccagtggtacgtgcagcagatgaagaggggccctgaccaccagcctgccaagaccagctctgtgtccctgacagccaccttccggccccaggaggacttctgcttcctgagcagcaagaagtacaagctgtctgagatccaccacctgcacccagaatatgtgcgggtgtctgagcacttcaaggcctccatgaagaacttcaagattgagaagatcaagaagattgaaaattctgagctgctggacaagttcacctggaagaagagccagatgaaggaggagggcaagctgctcttctacgccaccagccgggcctacgtggagagcatctgcagcaacaactttgacagcttcctgcacgagacccatgagaacaagtatggcaagggcatctactttgccaaggatgccatctacagccacaagaactgcccctatgatgccaagaatgtggtgatgtttgtggcccaggtgctggtgggcaagttcacagagggcaacatcacctacaccagccccccaccccagtttgacagctgtgtggacaccaggagcaaccccagcgtgtttgtgatcttccagaaggaccaggtgtacccccagtatgtgattgagtacacagaggacaaggcctgtgtgatctcctag

SEQ ID NO: 176414 - DNA, 2100 bp, synthetic construct
  misc_feature 1..2100: note = Description of Artificial Sequence: Synthetic coding sequence
  source 1..2100: mol_type = other DNA
atggctgaccctgaggtgtgctgcttcatcaccaagatcctgtgtgcccatggaggccgcatggccctggatgccctgctgcaggagatcgccctgtctgagccccagctgtgtgaggtgctgcaggtggccggccctgacagatttgtggtgctggagaccggcggggaggccggcatcaccaggtctgtggtggccaccacccgggcccgggtgtgcaggaggaagtactgccagaggccctgtgacaacctgcacctgtgcaagctgaacctgctgggccgctgcaactacagccagagcgagaggaacctgtgcaagtacagccatgaggtgctgtctgaggagaacttcaaggtgctgaagaaccacgagctgagcggcctgaacaaggaggagctggccgtgctgctgctgcagagcgaccccttcttcatgcctgagatctgcaagagctacaagggggagggccggcagcagatctgcaaccagcagcccccctgcagccggctgcacatctgtgaccacttcacccggggcaactgccgcttccccaactgcctgcggagccacaacctgatggacaggaaggtgctggccatcatgagggagcacggcctgaacccagatgtggtgcagaacatccaggacatctgcaacagcaagcacatgcagaagaaccccccaggcccccgggcccccagcagccacagaagaaacatggcctaccgggcccggagcaagagccgggaccgcttcttccagggcagccaggagttcctggccagcgccagcgccagcgctgagaggagctgcacccccagcccagaccagatcagccaccgggccagcctggaggatgcccctgtggatgacctgaccaggaagttcacctacctgggcagccaggaccgggcccggccccccagcggcagcagcaaggccacagacctgggcggcaccagccaggccggcaccagccagcgcttcctggagaatggcagccaggaggacctgctgcacggcaaccctggcagcacctacctggccagcaacagcaccagcgcccccaactggaagagcctgacctcctggaccaatgaccagggcgcccggaggaagacagtgttcagccccaccctgcctgctgcccggagcagcctgggcagcctgcagaccccagaggccgtgaccaccaggaaaggaacaggcctgctgagcagtgactaccgcatcatcaacgggaagagcggcacccaggacatccagcccggccccctcttcaacaacaatgctgatggagtggccacagacatcaccagcaccaggagcctgaactacaagagcaccagcagcggccaccgggagatcagcagcccccgcatccaggatgctggccctgccagcagagatgtgcaggccaccggcagaattgctgatgatgctgacccccgggtggccctggtgaatgacagcctgagtgatgtgaccagcaccaccagcagccgggtggatgaccatgattctgaggagatctgcctggaccacctgtgcaagggctgccccctgaatggcagctgcagcaaggtgcacttccacctgccctaccgctggcagatgctgattggcaagacctggacagactttgagcacatggagaccatcgagaagggctactgcaaccctggcatccacctgtgcagcgtgggcagctacaccatcaacttccgggtgatgagctgtgacagcttccccatccggcggctgagcacccccagctctgtgaccaagccagccaacagcgtcttcaccaccaagtggatctggtactggaagaatgaaagtggcacctggatccagtatggagaggagaaggacaagaggaagaacagcaatgtggacagcagctacctggagagcctgtaccagagctgcccccggggcgtggtgcccttccaggccggcagcagaaattatgagctgtccttccagggcatgatccagaccaacatcgccagcaagacccagaaggatgtgatcagaagacccacctttgtgccccagtggtacgtgcagcagatgaagaggggccctgagtag

SEQ ID NO: 176415 - DNA, 1521 bp, synthetic construct
  misc_feature 1..1521: note = Description of Artificial Sequence: Synthetic coding sequence
  source 1..1521: mol_type = other DNA
atggcctaccgggcccggagcaagagccgggaccgcttcttccagggcagccaggagttcctggccagcgccagcgccagcgctgagaggagctgcacccccagcccagaccagatcagccaccgggccagcctggaggatgcccctgtggatgacctgaccaggaagttcacctacctgggcagccaggaccgggcccggccccccagcggcagcagcaaggccacagacctgggcggcaccagccaggccggcaccagccagcgcttcctggagaatggcagccaggaggacctgctgcacggcaaccctggcagcacctacctggccagcaacagcaccagcgcccccaactggaagagcctgacctcctggaccaatgaccagggcgcccggaggaagacagtgttcagccccaccctgcctgctgcccggagcagcctgggcagcctgcagaccccagaggccgtgaccaccaggaaaggaacaggcctgctgagcagtgactaccgcatcatcaacgggaagagcggcacccaggacatccagcccggccccctcttcaacaacaatgctgatggagtggccacagacatcaccagcaccaggagcctgaactacaagagcaccagcagcggccaccgggagatcagcagcccccgcatccaggatgctggccctgccagcagagatgtgcaggccaccggcagaattgctgatgatgctgacccccgggtggccctggtgaatgacagcctgagtgatgtgaccagcaccaccagcagccgggtggatgaccatgattctgaggagatctgcctggaccacctgtgcaagggctgccccctgaatggcagctgcagcaaggtgcacttccacctgccctaccgctggcagatgctgattggcaagacctggacagactttgagcacatggagaccatcgagaagggctactgcaaccctggcatccacctgtgcagcgtgggcagctacaccatcaacttccgggtgatgagctgtgacagcttccccatccggcggctgagcacccccagctctgtgaccaagccagccaacagcgtcttcaccaccaagtggatctggtactggaagaatgaaagtggcacctggatccagtatggagaggagaaggacaagaggaagaacagcaatgtggacagcagctacctggagagcctgtaccagagctgcccccggggcgtggtgcccttccaggccggcagcagaaattatgagctgtccttccagggcatgatccagaccaacatcgccagcaagacccagaaggatgtgatcagaagacccacctttgtgccccagtggtacgtgcaggaggagcgggcccgggtgtctgtgctgaagcagctgtttgctgaccgctgcctgcgctgcagctgccccggcctcatcaagagcctggtgaacctggagcccgtcttcctgaagagcagctgcctgcactacagcgctgtgtccatctgcatcattgatgaatag

SEQ ID NO: 176416 - DNA, 654 bp, synthetic construct
  misc_feature 1..654: note = Description of Artificial Sequence: Synthetic coding sequence
  source 1..654: mol_type = other DNA
atgtctgggggcctggcccccagcaagagcacagtgtatgtgagcaacctgcccttcagcctgaccaacaatgacctgtaccgcatcttcagcaaatatggcaaggtggtgaaggtgaccatcatgaaggacaaggacaccaggaagagcaaaggagtggccttcatcctcttcctggacaaggacagcgcccagaactgcacccgggccatcaacaacaagcagctgtttggccgggtcatcaaggccagcatcgccatcgacaatggccgggctgctgagttcatcagaagaagaaactactttgacaagagcaagtgctatgaatgtggggagagcggccacctgtcctatgcctgccccaagaacatgctgggggagcgggagccccccaagaagaaggagaagaagaagaagaagaaggcccctgagcctgaggaggagattgaggaggtggaggagagtgaagatgaaggagaggaccctgccctggacagcctgagccaggccatcgccttccagcaggccaagattgaggaggagcagaagaagtggaagcccagcagtggagtgcccagcaccagtgatgacagcagaagaccccgcatcaagaagagcacctacttcagtgatgaggaggagctgagtgactag

SEQ ID NO: 176417 - DNA, 501 bp, synthetic construct
  misc_feature 1..501: note = Description of Artificial Sequence: Synthetic coding sequence
  source 1..501: mol_type = other DNA
atggccatgagccaggagagcctgaccttcaaggatgtgtttgtggacttcaccctggaggagtggcagcagctggacagcgcccagaagaacctgtacagagatgtgatgctggagaactacagccacctggtgtctgtgggctacctggtggccaagccagatgtgatcttccggctgggccctggagaggagagctggatggctgatggcggcacccctgtgaggacctgtgccgaggtgtggcaggtggatgagcagattgaccactacaaggagagccaggacaagctgccctggcaggccgccttcatcggcaaggagaccctgaaggatgagagcggccaggagagcaggacctgcaggaagagcatctacctgagcacagaatttgattctgtgcggcagaggctgcccaagtactacagctgggagaaggccttcaagaccagcttcaagctgtcctggagcaagtggaagctgtgcaagaaggagaggtag

SEQ ID NO: 176418 - DNA, 516 bp, synthetic construct
  misc_feature 1..516: note = Description of Artificial Sequence: Synthetic coding sequence
  source 1..516: mol_type = other DNA
atggccatgagccaggagagcctgaccttcaaggatgtgtttgtggacttcaccctggaggagtggcagcagctggacagcgcccagaagaacctgtacagagatgtgatgctggagaactacagccacctggtgtctgtgggctacctggtggccaagccagatgtgatcttccggctgggccctggagaggagagctggatggctgatggcggcacccctgtgaggacctgtgctggagaagatagacctgaggtgtggcaggtggatgagcagattgaccactacaaggagagccaggacaagctgccctggcaggccgccttcatcggcaaggagaccctgaaggatgaaagtggccaggagagcaggacctgcaggaagagcatctacctgagcacagaatttgacagcgtgcggcagaggctgcccaagtactacagctgggagaaggccttcaagaccagcttcaagctgtcctggagcaagtggaagctgtgcaagaaggagaggtag

SEQ ID NO: 176419 - DNA, 297 bp, synthetic construct
  misc_feature 1..297: note = Description of Artificial Sequence: Synthetic coding sequence
  source 1..297: mol_type = other DNA
atggccatgagccaggagagcctgaccttcaaggatgtgtttgtggacttcaccctggaggagtggcagcagctggacagcgcccagaagaacctgtacagagatgtgatgctggagaactacagccacctggtgtctgtgggctacctggtggccaagccagatgtgatcttccggctgggccctggagaggagagctggatggctgatggcggcacccctgtgaggacctgtgctggagaagatagaccagatgtgtccatctttgccagctgcatcctgaagtgctgctactag

SEQ ID NO: 176420 - DNA, 297 bp, synthetic construct; identical to SEQ ID NO: 176419
  misc_feature 1..297: note = Description of Artificial Sequence: Synthetic coding sequence
  source 1..297: mol_type = other DNA

SEQ ID NO: 176421 - DNA, 516 bp, synthetic construct
  misc_feature 1..516: note = Description of Artificial Sequence: Synthetic coding sequence
  source 1..516: mol_type = other DNA
gtggccatgagccaggagagcctgaccttcaaggatgtgtttgtggacttcaccctggaggagtggcagcagctggacagcgcccagaagaacctgtacagagatgtgatgctggagaactacagccacctggtgtctgtgggctacctggtggccaagccagatgtgatcttccggctgggccctggagaggagagctggatggctgatggcggcacccctgtgaggacctgtgctggagaagatagacctgaggtgtggcaggtggatgagcagattgaccactacaaggagagccaggacaagctgccctggcaggccgccttcatcggcaaggagaccctgaaggatgaaagtggccaggagagcaggacctgcaggaagagcatctacctgagcacagaatttgacagcgtgcggcagaggctgcccaagtactacagctgggagaaggccttcaagaccagcttcaagctgtcctggagcaagtggaagctgtgcaagaaggagaggtag

SEQ ID NO: 176422 - DNA, 297 bp, synthetic construct; identical to SEQ ID NO: 176419
  misc_feature 1..297: note = Description of Artificial Sequence: Synthetic coding sequence
  source 1..297: mol_type = other DNA

SEQ ID NO: 176423 - DNA, 864 bp, synthetic construct
  misc_feature 1..864: note = Description of Artificial Sequence: Synthetic coding sequence
  source 1..864: mol_type = other DNA
atgatgaaccgcttcaggaagtggctgtacaagcccaagagaagtgacccccagctgctggcccgcttctactatgcagatgaggagctgaaccaggtggccgctgagctggacagcctggatggcaggaaggacccccagcgctgcaccctgctggtgtcccagttccgcagctgccaggacaacgtgctgaacatcatcaaccagatcatggatgagtgcatcccccaggaccgggccccccgggacttctgtgtgaagtttcctgaggagatcagacatgacaacctggccggccagctgtggtttggagctgagtgcctggccgccggcagcatcatcatgaaccgggagctggagagcatggccatgaggcccctggccaaggagctgaccaggagcctggaggatgtgcggggggccctgcgggaccaggccctgcgggacctgaacacctacacagagaagatgagggaggccctgcggcactttgatgtgctgtttgctgagtttgagctgtcctatgtgtctgccatggtgcctgtgaagagcccccgggagtactacgtgcagcaggaggtgattgtgctcttctgtgaaacagtggagcgggccctggactttggctacctgacccaggacatgattgatgattatgagcccgccctgatgttcagcatcccccggctggccatcgtgtgccccctgctgcctgcccaccccaggaccagggctggggccacagcccacgtggcctgcaggatggtggccggcagcagcagcggggccctgacccacccccctgtgtccaagcagggcgtcatcagcgccctgctgcggcccctgcctgagctgcccccatag

SEQ ID NO: 176424 - DNA, 519 bp, synthetic construct
  misc_feature 1..519: note = Description of Artificial Sequence: Synthetic coding sequence
  source 1..519: mol_type = other DNA
atgatgaaccgcttcaggaagtggctgtacaagcccaaggacaacgtgctgaacatcatcaaccagatcatggatgagtgcatcccccaggaccgggccccccgggacttctgtgtgaagtttcctgaggagatcagacatgacaacctggccggccagctgtggtttggagcagaatgtctggccgccggcagcatcatcatgaaccgggagctggagagcatggccatgaggcccctggccaaggagctgaccaggagcctggaggatgtgcggggggccctgcgggaccaggccctgcgggacctgaacacctacacagagaagatgagggaggccctgcggcactttgatgtgctgtttgctgagtttgagctgtcctatgtgtctgccatggtgcctgtgaagagcccccgggagtactacgtgcagcaggaggtgattgtgctcttctgtgagaccgtggagagaaatggcaagggcgtgctgaagttcatgtggaactgcaatggcccctag

SEQ ID NO: 176425 - DNA, 492 bp, synthetic construct
  misc_feature 1..492: note = Description of Artificial Sequence: Synthetic coding sequence
  source 1..492: mol_type = other DNA
atggatgagtgcatcccccaggaccgggccccccgggacttctgtgtgaagtttcctgaggagatcagacatgacaacctggccggccagctgtggtttggagctgagtgcctggccgccggcagcatcatcatgaaccgggagctggagagcatggccatgaggcccctggccaaggagctgaccaggagcctggaggatgtgcggggggccctgcgggaccaggccctgcgggacctgaacacctacacagagaagatgagggaggccctgcggcactttgatgtgctgtttgctgagtttgagctgtcctatgtgtctgccatggtgcctgtgaagagcccccgggagtactacgtgcagcaggaggtgattgtgctcttctgtgaaacagtggagcgggccctggactttggctacctgacccaggacatgattgatgattatgagcccgccctgatgttcagcatcccccggctggccatcgtgtag

SEQ ID NO: 176426 - DNA, 11112 bp, synthetic construct
  misc_feature 1..11112: note = Description of Artificial Sequence: Synthetic coding sequence
  source 1..11112: mol_type = other DNA
atggagggctgtgacagccctgtggtgtctgggaaggacaatggctgcggcatcccccagcaccagcagtggacagagctgaacagcacccacctgcctgacaagcccagctccatggagcagagcactggagagagccacggccccctggacagcctgcgggcccccttcaatgaaaggctggccgagagcacagccagcgctggcccccccagcgagcccgccagcaaggaggtgacctgcaatgaatgttctgccagctttgccagcctgcagacctacatggagcaccactgccccagcgcccggcccccaccacccctgcgggaggagagcgccagtgacaccggggaggagggagatgaggagagtgatgtggagaacctggccggggagatcgtgtaccagccagatggcagcgcctacatcgtggagagcctgagccagctgacccagggcggcggggcctgtggcagcggcagcggcagcggccccctgcccagcctcttcctgaacagcctgcctggagctgggggcaagcagggcgaccccagctgtgccgcccctgtgtacccccagatcatcaacaccttccacatcgccagcagctttgggaagtggtttgagggccctgaccaggccttccccaacaccagcgccctggccggcctgagccctgtgctgcacagcttccgggtgtttgatgtgcgccacaagagcaacaaggactacctgaacagtgatggcagcgccaagagcagctgtgtgtccaaggatgtgcccaacaacgtggacctgagcaagtttgatggctttgtgctgtatggcaagaggaagcccatcctgatgtgcttcctgtgcaagctgagctttggctacgtgcgcagctttgtgacccatgctgtgcatgaccacaggatgaccctgtctgaagatgagaggaagatcctgagcaacaagaacatcagcgccatcatccagggcatcggcaaggacaaggagcccctggtgtccttcctggagcccaagaacaagaacttccagcaccccctggtgtccacagccaacctgattggccctggccacagcttctacggcaagttcagcggcatccgcatggagggggaggaggccctgcctgctggcagcgctgctggccctgagcagccccaggccggcctgctgacccccagcaccctgctgaacctgggcggcctgaccagctctgtgctgaagacccccatcacctctgtgcccctgggccccctggccagcagccccaccaagagcagcgagggcaaggacagcggggctgctgagggggagaagcaggaggtgggagatggagactgcttcagcgagaaggtggagcctgctgaggaggaggccgaggaggaggaggaggaggaggaggccgaggaggaggaggaggaggaggaggaggaggaggaggaggaggaggatgagggctgcaagggcctcttccccagcgagctggatgaggagctggaggaccggccccatgaggagcctggagctgctgctggcagcagcagcaagaaggacctggccctgagcaaccagagcatcagcaacagccccctgatgcccaacgtgctgcagaccctgagccggggcacagccagcaccagcagcaacagcgccagcagctttgtggtgtttgatggagccaacagaagaaaccggctgtccttcaacagcgagggcgtgcgggccaacgtggccgagggcggccggcggctggactttgctgatgagagcgccaacaaggacaatgccacagcccctgagcccaatgaaagcacagaaggagatgatggcggctttgtgccccaccaccagcacgccggcagcctgtgtgagctgggcgtgggagaatgtcccagcggcagcggcgtggagtgccccaagtgtgacacagtgctgggcagcagccgcagcctgggcggccacatgaccatgatgcacagcaggaacagctgcaagaccctgaagtgccccaagtgcaactggcactacaagtaccagcagaccctggaggcccacatgaaggagaagcaccctgagcccggcggcagctgtgtgtactgcaagagcggccagccccacccccggctggcccggggggagagctacacctgtggctacaagcccttccgctgtgaggtgtgcaactacagcaccaccaccaagggcaacctgagcatccacatgcagagcgacaagcacctgaacaacatgcagaacctgcagaatggaggaggagagcaggtgttcagccacacagctggagctgctgctgctgctgtggccgctgctgctgctgctgccaacatcagcagcagctgtggggcccccagccccaccaagcccaagaccaagcccacctggaggtgtgaggtgtgtgactatgagaccaacgtggccaggaacctgcgcatccacatgaccagcgagaagcacatgcacaacatgatgctgctgcagcagaacatgacccagatccagcacaacagacacctgggcctgggcagcctgcccagccctgctgaggccgagctgtaccagtactacctggcccagaacatgaacctgcccaacctgaagatggattctgctgccagtgatgcccagttcatgatgagcggcttccagctggaccctgctggccccatggccgccatgaccccagccctggtgggcggggagatccccctggacatgaggctgggcggcggccagctggtgtctgaggagctgatgaacctgggggagagcttcatccagaccaatgaccccagcctgaagctgttccagtgtgctgtgtgcaacaagttcaccacagacaacctggacatgctgggcctgcacatgaatgtggagaggagcctgtctgaagatgagtggaaggctgtgatgggagacagctaccagtgcaagctgtgccgctacaacacccagctgaaggccaacttccagctgcactgcaagacagacaagcacgtgcagaagtaccagctggtggcccacatcaaggagggcggcaaggccaatgagtggaggctgaagtgtgtggccatcggcaaccctgtgcacctgaagtgcaatgcctgtgactactacaccaacagcctggagaagctgcggctgcacacagtgaacagcagacatgaggccagcctgaagctgtacaagcacctgcagcagcatgaaagtggagtggagggggagagctgctactaccactgtgtgctgtgcaactacagcaccaaggccaagctgaacctgatccagcacgtgcgctccatgaagcaccagaggtctgagagcctgaggaagctgcagaggctgcagaagggcctgcctgaagaagatgaggacctgggccagatcttcaccatccgccgctgccccagcacagatcctgaggaggccattgaagatgtggagggccccagcgagacagctgctgaccctgaggagctggccaaggaccaggagggcggggccagcagcagccaggccgagaaggagctgacagacagccctgccaccagcaagaggatctccttccctggcagcagcgagagccccctgagcagcaagaggcccaagacagctgaggagatcaagccagagcagatgtaccagtgcccctactgcaagtacagcaatgctgatgtgaaccggctgcgggtgcacgccatgacccagcacagcgtgcagcccatgctgcgctgccccctgtgccaggacatgctgaacaacaagatccacctgcagctgcacctgacccacctgcacagcgtggccccagactgtgtggagaagctgatcatgacagtgaccaccccagagatggtgatgcccagctccatgttcctgcctgctgctgtgcctgacagagatggcaacagcaacctggaggaggccggcaagcagcctgagaccagcgaggacctgggcaagaacatcctgcccagcgccagcacagagcagagcggggacctgaagcccagccctgctgaccccggctctgtgcgggaggacagcggcttcatctgctggaagaagggctgcaaccaggtgttcaagaccagcgctgccctgcagacccacttcaatgaggtgcacgccaagaggccccagctgcctgtgtctgacagacatgtgtacaagtaccgctgcaaccagtgcagcctggccttcaagaccatcgagaagctgcagctgcacagccagtaccacgtgatccgggccgccaccatgtgctgcctgtgccagaggagcttccgcaccttccaggccctgaagaagcacctggagaccagccacctggagctgtctgaggccgacatccagcagctgtatggaggcctgctggccaacggggacctgctggccatgggagaccccaccctggccgaggaccacaccatcatcgtggaggaggacaaggaggaggagagtgacctggaggacaagcagagccccaccggcagtgacagcggctctgtgcaggaggacagcggcagcgagcccaagagggccctgcccttcaggaagggccccaacttcaccatggagaagttcctggaccccagccggccctacaagtgcaccgtgtgcaaggagagcttcacccagaagaacatcctgctggtgcactacaacagcgtgagccacctgcacaagctgaagagggccctgcaggagagcgccaccggccagcctgagcccaccagcagcccagacaacaagcccttcaagtgcaacacctgcaatgtggcctacagccagagcagcaccctggagatccacatgaggtctgtgctgcaccagaccaaggcccgggccgccaagctggaggccgccagcggcagcagcaatggaactggaaacagcagcagcatcagcctgagcagcagcacccccagccctgtgtccaccagcggcagcaacaccttcaccaccagcaaccccagcagcgctggcatcgcccccagcagcaacctgctgagccaggtgcccacagaatctgtgggcatgccacccctgggcaaccccatcggggccaacatcgccagccccagcgagcccaaggaggccaacaggaagaagctggccgacatgattgccagccggcagcagcagcagcagcagcagcagcagcagcagcagcagcagcagcagcagcagcaggcccagaccctggcccaggcccaggcccaggtgcaggcccacctgcagcaggagctgcagcagcaggccgccctgatccagagccagctgttcaaccccaccctgctgccccacttccccatgaccacagagaccctgctgcagctgcagcagcagcagcacctgctcttccccttctacatccccagcgctgagttccagctgaaccctgaggtgtccctgcctgtgaccagcggggccctgaccctgactggaactggacctggcctgctggaggacctgaaggcccaggtgcaggtgccccagcagagccaccagcagatcctgccccagcagcagcagaaccagctgagcatcgcccagagccacagcgccctgctgcagcccagccagcaccctgagaagaagaacaagctggtgatcaaggagaaggagaaggagagccagcgggagcgggacagcgctgagggcggggagggcaacacaggccccaaggagaccctgcctgatgccctgaaggccaaggagaagaaggagctggcccctgggggcggcagcgagcccagcatgctgcccccacgcatcgccagtgatgcccggggaaatgccaccaaggccctgctggagaactttggatttgagctggtgatccagtacaatgaaaacaagcagaaggtgcagaagaagaatggcaagacagaccagggcgagaacctggagaagctggagtgtgacagctgtgggaagctgttcagcaacatcctgatcctgaagagccaccaggagcacgtgcaccagaactacttccccttcaagcagctggagagatttgccaagcagtacagagaccactatgacaagctgtaccccctgcggccccagaccccagagcccccacctcctcctcctcctcctcctcctccacccctgcctgctgccccaccccagcctgccagcaccccagccatcccagccagcgccccacccatcaccagccccaccatcgccccagcccagcccagcgtgcccctgacccagctgtccatgcccatggagctgcccatcttcagccccctgatgatgcagaccatgcccctgcagaccctgcctgcccagctgcccccccagctgggccctgtggagcccctgcctgctgacctggcccagctgtaccagcaccagctgaaccccaccctgctgcagcagcagaacaagaggcccaggacccgcatcacagatgaccagctgcgggtgctgcggcagtactttgacatcaacaacagccccagcgaggagcagatcaaggagatggctgacaagagcggcctgccccagaaggtgatcaagcactggttcaggaacaccctcttcaaggagcggcagaggaacaaggacagcccctacaacttcagcaacccccccatcaccagcctggaggagctgaagattgacagccggccccccagccctgagccccccaagcaggagtactggggcagcaagaggagcagcaggacccgcttcacagactaccagctgcgggtgctgcaggacttctttgatgccaatgcctaccccaaggatgatgaatttgagcagctgagcaacctgctgaacctgcccaccagggtcatcgtggtgtggttccagaatgcccggcagaaggccaggaagaactatgagaaccagggcgagggcaaggatggagagcggcgggagctgaccaatgaccgctacatccgcaccagcaacctgaactaccagtgcaagaagtgcagcctggtgttccagaggatctttgacctgatcaagcaccagaagaagctgtgctacaaggatgaagatgaggagggccaggatgacagccagaatgaagacagcatggatgccatggagatcctgacccccaccagcagcagctgcagcacccccatgcccagccaggcctacagcgccccagcccccagcgccaacaacacagccagcagcgccttcctgcagctgacagctgaggccgaggagctggccaccttcaacagcaagacagaagctggagatgagaagcccaagctggccgaggcccccagcgcccagcccaaccagacccaggagaagcagggccagcccaagccagagctgcagcagcaggagcagcctgagcagaagaccaacaccccccagcagaagctgccccagctggtgtccctgcccagcctgccccagcccccaccccaggcccccccaccccagtgccccctgccccagagcagccccagccccagccagctgagccacctgcccctgaagcccctgcacaccagcaccccccagcagctggccaacctgcccccccagctgatcccctaccagtgtgaccagtgcaagctggccttccccagctttgagcactggcaggagcaccagcagctgcacttcctgagcgcccagaaccagttcatccacccccagttcctggacaggagcctggacatgcccttcatgctgtttgaccccagcaaccccctgctggccagccagctgctgagcggggccatcccccagatcccagccagcagcgccaccagccccagcacccccaccagcaccatgaacaccctgaagaggaagctggaggagaaggccagcgccagccctggagaaaatgattctggaactggaggagaggagccccagagggacaagaggctgcggaccaccatcaccccagagcagctggagatcctgtaccagaagtacctgctggacagcaaccccaccaggaagatgctggaccacatcgcccacgaggtgggcctgaagaagagggtggtgcaggtgtggttccagaacacccgggcccgggagaggaagggccagttccgggctgtgggccctgcccaggcccaccggcgctgccccttctgccgggccctcttcaaggccaagacagccctggaggcccacatccgcagccgccactggcatgaggccaagagagctggctacaacctgaccctgagcgccatgctgctggactgtgatggcggcctgcagatgaagggggacatctttgatggcaccagcttcagccacctgccccccagcagcagtgatggccagggcgtgcccctgagccctgtgtccaagaccatggagctgagccccaggaccctgctgagccccagcagcatcaaggtggagggcattgaagattttgagagccccagcatgagctctgtgaacctgaactttgaccagaccaagctggacaatgatgactgcagctctgtgaacacagccatcacagacaccaccactggagatgagggcaatgctgacaatgattctgccactggaattgccacagagaccaagagcagcagcgccccaaatgaaggcctgaccaaggccgccatgatggccatgtctgaatatgaagatcggctgagcagcggcctggtgtccccagcccccagcttctacagcaaggagtatgacaatgaaggaacagtggactacagcgagaccagcagcctggccgacccctgcagccccagccctggggccagcggcagcgctgggaagagcggggacagcggggaccggcccggccagaagcgcttccgcacccagatgaccaacctgcagctgaaggtgctgaagagctgcttcaatgactaccgcacccccaccatgctggagtgtgaggtgctgggcaatgacatcggcctgcccaagagggtggtgcaggtgtggttccagaatgcccgggccaaggagaagaagagcaagctgtccatggccaagcacttcggcatcaaccagaccagctatgagggccccaagacagaatgtaccctgtgtggcatcaagtacagcgcccggctgtctgtgcgggaccacatcttcagccagcagcacatcagcaaggtgaaggacaccatcggcagccagctggacaaggagaaggagtactttgatcctgccaccgtgcggcagctgatggcccagcaggagctggaccgcatcaagaaggccaatgaggtgctgggcctggccgcccagcagcagggcatgtttgacaacacccccctgcaggccctgaacctgcccacagcctacccagccctgcagggcatcccccctgtgctgctgcccggcctgaacagccccagcctgcccggcttcacccccagcaacacagccctgaccagccccaagcccaacctgatgggcctgcccagcaccaccgtgcccagccctggcctgcccaccagcggcctgcccaacaagcccagcagcgccagcctgagcagccccaccccagcccaggccaccatggccatgggcccccagcagcccccccagcagcagcagcagcagcagcagccccaggtgcagcagcccccacctcctcctgctgcccagcccccacccaccccccagctgcccctgcagcagcagcagcagaggaaggacaaggacagcgagaaggtgaaggagaaggagaaggcccacaagggcaagggggagcccctgcctgtgcccaagaaggagaagggggaggcccccacagccacagctgccaccatcagcgcccccctgcccaccatggagtatgctgtggaccctgcccagctgcaggccctgcaggccgccctgaccagtgaccccacagccctgctgaccagccagttcctgccctactttgtgcccggcttcagcccctactatgccccccagatccctggggccctgcagagcggctacctgcagcccatgtatggcatggagggcctcttcccctacagccctgccctgagccaggccctgatgggcctgagccctggcagcctgctgcagcagtaccagcagtaccagcagagcctgcaggaggccatccagcagcagcagcagaggcagctgcagcagcagcagcagcagaaggtgcagcagcagcagcccaaggccagccagacccctgtgcccccaggggcccccagcccagacaaggaccctgccaaggagagccccaagccagaggagcagaagaacaccccccgggaggtgagccccctgctgcccaagctgcctgaggagcctgaggccgagagcaagtctgctgacagcctgtatgaccccttcatcgtgcccaaggtgcagtacaagctggtgtgcaggaagtgccaggccggcttcagtgatgaggaggccgcccggagccacctgaagagcctgtgcttcttcggccagagcgtggtgaacctgcaggagatggtgctgcacgtgcccaccggcggcggcggcggcggcagcggcggcggcggcggcggcggcggcggcggcggcggcggcggcagctaccactgcctggcctgtgagagcgccctgtgtggggaggaggccctgagccagcacctggagagcgccctgcacaagcacaggaccatcaccagggctgccagaaatgccaaggagcaccccagcctgctgccccacagcgcctgcttcccagaccccagcacagccagcaccagccagagcgctgcccacagcaatgacagccccccacctccttctgctgctgcccccagcagcgccagcccccacgccagcaggaagtcctggccccaggtggtgtcccgggccagcgctgccaagcccccatccttcccccccctgagcagcagcagcacagtgaccagcagcagctgcagcaccagcggcgtgcagcccagcatgcccacagatgactacagcgaggagagtgacacagacctgagccagaagagtgatggccctgccagccctgtggagggccccaaggaccccagctgccccaaggacagcggcctgacctctgtgggcacagacaccttccggctgtag

SEQ ID NO: 176427 - DNA, 8370 bp, synthetic construct
  misc_feature 1..8370: note = Description of Artificial Sequence: Synthetic coding sequence
  source 1..8370: mol_type = other DNA
atgaggctgggcggcggccagctggtgtctgaggagctgatgaacctgggggagagcttcatccagaccaatgaccccagcctgaagctgttccagtgtgctgtgtgcaacaagttcaccacagacaacctggacatgctgggcctgcacatgaatgtggagaggagcctgtctgaagatgagtggaaggctgtgatgggagacagctaccagtgcaagctgtgccgctacaacacccagctgaaggccaacttccagctgcactgcaagacagacaagcacgtgcagaagtaccagctggtggcccacatcaaggagggcggcaaggccaatgagtggaggctgaagtgtgtggccatcggcaaccctgtgcacctgaagtgcaatgcctgtgactactacaccaacagcctggagaagctgcggctgcacacagtgaacagcagacatgaggccagcctgaagctgtacaagcacctgcagcagcatgaaagtggagtggagggggagagctgctactaccactgtgtgctgtgcaactacagcaccaaggccaagctgaacctgatccagcacgtgcgctccatgaagcaccagaggtctgagagcctgaggaagctgcagaggctgcagaagggcctgcctgaagaagatgaggacctgggccagatcttcaccatccgccgctgccccagcacagatcctgaggaggccattgaagatgtggagggccccagcgagacagctgctgaccctgaggagctggccaaggaccaggagggcggggccagcagcagccaggccgagaaggagctgacagacagccctgccaccagcaagaggatctccttccctggcagcagcgagagccccctgagcagcaagaggcccaagacagctgaggagatcaagccagagcagatgtaccagtgcccctactgcaagtacagcaatgctgatgtgaaccggctgcgggtgcacgccatgacccagcacagcgtgcagcccatgctgcgctgccccctgtgccaggacatgctgaacaacaagatccacctgcagctgcacctgacccacctgcacagcgtggccccagactgtgtggagaagctgatcatgacagtgaccaccccagagatggtgatgcccagctccatgttcctgcctgctgctgtgcctgacagagatggcaacagcaacctggaggaggccggcaagcagcctgagaccagcgaggacctgggcaagaacatcctgcccagcgccagcacagagcagagcggggacctgaagcccagccctgctgaccccggctctgtgcgggaggacagcggcttcatctgctggaagaagggctgcaaccaggtgttcaagaccagcgctgccctgcagacccacttcaatgaggtgcacgccaagaggccccagctgcctgtgtctgacagacatgtgtacaagtaccgctgcaaccagtgcagcctggccttcaagaccatcgagaagctgcagctgcacagccagtaccacgtgatccgggccgccaccatgtgctgcctgtgccagaggagcttccgcaccttccaggccctgaagaagcacctggagaccagccacctggagctgtctgaggccgacatccagcagctgtatggaggcctgctggccaacggggacctgctggccatgggagaccccaccctggccgaggaccacaccatcatcgtggaggaggacaaggaggaggagagtgacctggaggacaagcagagccccaccggcagtgacagcggctctgtgcaggaggacagcggcagcgagcccaagagggccctgcccttcaggaagggccccaacttcaccatggagaagttcctggaccccagccggccctacaagtgcaccgtgtgcaaggagagcttcacccagaagaacatcctgctggtgcactacaacagcgtgagccacctgcacaagctgaagagggccctgcaggagagcgccaccggccagcctgagcccaccagcagcccagacaacaagcccttcaagtgcaacacctgcaatgtggcctacagccagagcagcaccctggagatccacatgaggtctgtgctgcaccagaccaaggcccgggccgccaagctggaggccgccagcggcagcagcaatggaactggaaacagcagcagcatcagcctgagcagcagcacccccagccctgtgtccaccagcggcagcaacaccttcaccaccagcaaccccagcagcgctggcatcgcccccagcagcaacctgctgagccaggtgcccacagaatctgtgggcatgccacccctgggcaaccccatcggggccaacatcgccagccccagcgagcccaaggaggccaacaggaagaagctggccgacatgattgccagccggcagcagcagcagcagcagcagcagcagcagcagcagcagcagcagcagcagcagcaggcccagaccctggcccaggcccaggcccaggtgcaggcccacctgcagcaggagctgcagcagcaggccgccctgatccagagccagctgttcaaccccaccctgctgccccacttccccatgaccacagagaccctgctgcagctgcagcagcagcagcacctgctcttccccttctacatccccagcgctgagttccagctgaaccctgaggtgtccctgcctgtgaccagcggggccctgaccctgactggaactggacctggcctgctggaggacctgaaggcccaggtgcaggtgccccagcagagccaccagcagatcctgccccagcagcagcagaaccagctgagcatcgcccagagccacagcgccctgctgcagcccagccagcaccctgagaagaagaacaagctggtgatcaaggagaaggagaaggagagccagcgggagcgggacagcgctgagggcggggagggcaacacaggccccaaggagaccctgcctgatgccctgaaggccaaggagaagaaggagctggcccctgggggcggcagcgagcccagcatgctgcccccacgcatcgccagtgatgcccggggaaatgccaccaaggccctgctggagaactttggatttgagctggtgatccagtacaatgaaaacaagcagaaggtgcagaagaagaatggcaagacagaccagggcgagaacctggagaagctggagtgtgacagctgtgggaagctgttcagcaacatcctgatcctgaagagccaccaggagcacgtgcaccagaactacttccccttcaagcagctggagagatttgccaagcagtacagagaccactatgacaagctgtaccccctgcggccccagaccccagagcccccacctcctcctcctcctcctcctcctccacccctgcctgctgccccaccccagcctgccagcaccccagccatcccagccagcgccccacccatcaccagccccaccatcgccccagcccagcccagcgtgcccctgacccagctgtccatgcccatggagctgcccatcttcagccccctgatgatgcagaccatgcccctgcagaccctgcctgcccagctgcccccccagctgggccctgtggagcccctgcctgctgacctggcccagctgtaccagcaccagctgaaccccaccctgctgcagcagcagaacaagaggcccaggacccgcatcacagatgaccagctgcgggtgctgcggcagtactttgacatcaacaacagccccagcgaggagcagatcaaggagatggctgacaagagcggcctgccccagaaggtgatcaagcactggttcaggaacaccctcttcaaggagcggcagaggaacaaggacagcccctacaacttcagcaacccccccatcaccagcctggaggagctgaagattgacagccggccccccagccctgagccccccaagcaggagtactggggcagcaagaggagcagcaggacccgcttcacagactaccagctgcgggtgctgcaggacttctttgatgccaatgcctaccccaaggatgatgaatttgagcagctgagcaacctgctgaacctgcccaccagggtcatcgtggtgtggttccagaatgcccggcagaaggccaggaagaactatgagaaccagggcgagggcaaggatggagagcggcgggagctgaccaatgaccgctacatccgcaccagcaacctgaactaccagtgcaagaagtgcagcctggtgttccagaggatctttgacctgatcaagcaccagaagaagctgtgctacaaggatgaagatgaggagggccaggatgacagccagaatgaagacagcatggatgccatggagatcctgacccccaccagcagcagctgcagcacccccatgcccagccaggcctacagcgccccagcccccagcgccaacaacacagccagcagcgccttcctgcagctgacagctgaggccgaggagctggccaccttcaacagcaagacagaagctggagatgagaagcccaagctggccgaggcccccagcgcccagcccaaccagacccaggagaagcagggccagcccaagccagagctgcagcagcaggagcagcctgagcagaagaccaacaccccccagcagaagctgccccagctggtgtccctgcccagcctgccccagcccccaccccaggcccccccaccccagtgccccctgccccagagcagccccagccccagccagctgagccacctgcccctgaagcccctgcacaccagcaccccccagcagctggccaacctgcccccccagctgatcccctaccagtgtgaccagtgcaagctggccttccccagctttgagcactggcaggagcaccagcagctgcacttcctgagcgcccagaaccagttcatccacccccagttcctggacaggagcctggacatgcccttcatgctgtttgaccccagcaaccccctgctggccagccagctgctgagcggggccatcccccagatcccagccagcagcgccaccagccccagcacccccaccagcaccatgaacaccctgaagaggaagctggaggagaaggccagcgccagccctggagaaaatgattctggaactggaggagaggagccccagagggacaagaggctgcggaccaccatcaccccagagcagctggagatcctgtaccagaagtacctgctggacagcaaccccaccaggaagatgctggaccacatcgcccacgaggtgggcctgaagaagagggtggtgcaggtgtggttccagaacacccgggcccgggagaggaagggccagttccgggctgtgggccctgcccaggcccaccggcgctgccccttctgccgggccctcttcaaggccaagacagccctggaggcccacatccgcagccgccactggcatgaggccaagagagctggctacaacctgaccctgagcgccatgctgctggactgtgatggcggcctgcagatgaagggggacatctttgatggcaccagcttcagccacctgccccccagcagcagtgatggccagggcgtgcccctgagccctgtgtccaagaccatggagctgagccccaggaccctgctgagccccagcagcatcaaggtggagggcattgaagattttgagagccccagcatgagctctgtgaacctgaactttgaccagaccaagctggacaatgatgactgcagctctgtgaacacagccatcacagacaccaccactggagatgagggcaatgctgacaatgattctgccactggaattgccacagagaccaagagcagcagcgccccaaatgaaggcctgaccaaggccgccatgatggccatgtctgaatatgaagatcggctgagcagcggcctggtgtccccagcccccagcttctacagcaaggagtatgacaatgaaggaacagtggactacagcgagaccagcagcctggccgacccctgcagccccagccctggggccagcggcagcgctgggaagagcggggacagcggggaccggcccggccagaagcgcttccgcacccagatgaccaacctgcagctgaaggtgctgaagagctgcttcaatgactaccgcacccccaccatgctggagtgtgaggtgctgggcaatgacatcggcctgcccaagagggtggtgcaggtgtggttccagaatgcccgggccaaggagaagaagagcaagctgtccatggccaagcacttcggcatcaaccagaccagctatgagggccccaagacagaatgtaccctgtgtggcatcaagtacagcgcccggctgtctgtgcgggaccacatcttcagccagcagcacatcagcaaggtgaaggacaccatcggcagccagctggacaaggagaaggagtactttgatcctgccaccgtgcggcagctgatggcccagcaggagctggaccgcatcaagaaggccaatgaggtgctgggcctggccgcccagcagcagggcatgtttgacaacacccccctgcaggccctgaacctgcccacagcctacccagccctgcagggcatcccccctgtgctgctgcccggcctgaacagccccagcctgcccggcttcacccccagcaacacagccctgaccagccccaagcccaacctgatgggcctgcccagcaccaccgtgcccagccctggcctgcccaccagcggcctgcccaacaagcccagcagcgccagcctgagcagccccaccccagcccaggccaccatggccatgggcccccagcagcccccccagcagcagcagcagcagcagcagccccaggtgcagcagcccccacctcctcctgctgcccagcccccacccaccccccagctgcccctgcagcagcagcagcagaggaaggacaaggacagcgagaaggtgaaggagaaggagaaggcccacaagggcaagggggagcccctgcctgtgcccaagaaggagaagggggaggcccccacagccacagctgccaccatcagcgcccccctgcccaccatggagtatgctgtggaccctgcccagctgcaggccctgcaggccgccctgaccagtgaccccacagccctgctgaccagccagttcctgccctactttgtgcccggcttcagcccctactatgccccccagatccctggggccctgcagagcggctacctgcagcccatgtatggcatggagggcctcttcccctacagccctgccctgagccaggccctgatgggcctgagccctggcagcctgctgcagcagtaccagcagtaccagcagagcctgcaggaggccatccagcagcagcagcagaggcagctgcagcagcagcagcagcagaaggtgcagcagcagcagcccaaggccagccagacccctgtgcccccaggggcccccagcccagacaaggaccctgccaaggagagccccaagccagaggagcagaagaacaccccccgggaggtgagccccctgctgcccaagctgcctgaggagcctgaggccgagagcaagtctgctgacagcctgtatgaccccttcatcgtgcccaaggtgcagtacaagctggtgtgcaggaagtgccaggccggcttcagtgatgaggaggccgcccggagccacctgaagagcctgtgcttcttcggccagagcgtggtgaacctgcaggagatggtgctgcacgtgcccaccggcggcggcggcggcggcagcggcggcggcggcggcggcggcggcggcggcggcggcggcggcagctaccactgcctggcctgtgagagcgccctgtgtggggaggaggccctgagccagcacctggagagcgccctgcacaagcacaggaccatcaccagggctgccagaaatgccaaggagcaccccagcctgctgccccacagcgcctgcttcccagaccccagcacagccagcaccagccagagcgctgcccacagcaatgacagccccccacctccttctgctgctgcccccagcagcgccagcccccacgccagcaggaagtcctggccccaggtggtgtcccgggccagcgctgccaagcccccatccttcccccccctgagcagcagcagcacagtgaccagcagcagctgcagcaccagcggcgtgcagcccagcatgcccacagatgactacagcgaggagagtgacacagacctgagccagaagagtgatggccctgccagccctgtggagggccccaaggaccccagctgccccaaggacagcggcctgacctctgtgggcacagacaccttccggctgtag

SEQ ID NO: 176428 - DNA, 10704 bp, synthetic construct
  misc_feature 1..10704: note = Description of Artificial Sequence: Synthetic coding sequence
  source 1..10704: mol_type = other DNA
atggagacctgtgacagcccccccatcagccggcaggagaatggccagagcaccagcaagctgtgtggcaccacccagctggacaatgaggtgcctgagaaggtggccggcatggagccagaccgggagaacagcagcacagatgacaacctgaagacagatgagaggaagtctgaggccctgctgggcttctctgtggagaatgctgctgccacccaggtgaccagcgccaaggagatcccctgcaatgaatgtgccaccagcttccccagcctgcagaagtacatggagcaccactgccccaatgcccggctgcctgtgctgaaggatgacaatgaaagtgagatcagcgagctggaggacagtgatgtggagaacctgaccggggagatcgtgtaccagccagatggcagcgcctacatcatcgaggacagcaaggagagcggccagaatgcccagacaggagccaacagcaagctgttcagcacagccatgttcctggacagcctggccagcgctggggagaagagtgaccagagcgccagcgcccccatgtccttctacccccagatcatcaacaccttccacatcgccagcagcctgggcaagcccttcaccgctgaccaggccttccccaacaccagcgccctggccggcgtgggccctgtgctgcacagcttccgggtgtatgacctgcggcacaagcgggagaaggactacctgaccagtgatggcagcgccaagaacagctgtgtgtccaaggatgtgcccaacaacgtggacctgagcaagtttgatggctgtgtgtctgatggcaagaggaagcctgtgctgatgtgcttcctgtgcaagctgagctttggctacatccgcagctttgtgacccatgctgtgcatgaccacaggatgaccctgaatgatgaggagcagaagctgctgagcaacaagtgtgtgtctgccatcatccagggcatcggcaaggacaaggagcccctcatctccttcctggagcccaagaagagcacctctgtgtacccccacttcagcaccaccaacctgattggccctgaccccaccttccggggcctgtggagcgccttccacgtggagaatggagacagcctgcctgctggctttgccttcctgaagggcagcgccagcaccagcagcagcgctgagcagcccctgggcatcacccagatgcccaaggccgaggtgaacctgggcggcctgagcagcctggtggtgaacacccccatcacctctgtgtccctgagccacagcagcagcgagagcagcaagatgtctgagagcaaggaccaggagaacaactgtgagcggcccaaggagagcaatgtgctgcaccccaatggagaatgtcctgtgaagtctgagcccacagagcctggagatgaagatgaagaagatgcctacagcaatgagctggatgatgaggaggtgctgggggagctgacagacagcatcggcaacaaggacttccccctgctgaaccagagcatcagccccctgagcagctctgtgctgaagttcatcgagaagggcaccagcagcagcagcgccaccgtgtctgatgacacagagaagaagaagcagacagctgctgtgcgggccagcggctctgtggccagcaactacggcatcagcggcaaggactttgctgatgccagcgccagcaaggacagcgccacagctgcccaccccagcgagatcgcccggggagatgaggacagcagcgccaccccccaccagcacggcttcacccccagcaccccaggcaccccaggccctggaggagatggcagccctggcagcggcatcgagtgccccaagtgtgacacagtgctgggcagcagccgcagcctgggcggccacatgaccatgatgcacagcaggaacagctgcaagaccctgaagtgccccaagtgcaactggcactacaagtaccagcagaccctggaggcccacatgaaggagaagcaccctgagcccggcggcagctgtgtgtactgcaagacaggccagccccacccccggctggcccggggggagagctacacctgtggctacaagcccttccgctgtgaggtgtgcaactacagcaccaccaccaagggcaacctgagcatccacatgcagagcgacaagcacctgaacaacgtgcagaacctgcagaatggaaatggagagcaggtgtttggccacagcgccccagcccccaacaccagcctgagcggctgcggcacccccagccccagcaagcccaagcagaagcccacctggaggtgtgaggtgtgtgactatgagaccaacgtggccaggaacctgcgcatccacatgaccagcgagaagcacatgcacaacatgatgctgctgcagcagaacatgaagcagatccagcacaacctgcacctgggcctggccccagctgaggccgagctgtaccagtactacctggcccagaacatcggcctgaccggcatgaagctggagaacccagctgacccccagctgatgatcaaccccttccagctggaccctgccacagctgctgccctggcccctggcctgggggagctgagcccctacatcagtgaccctgccctgaagctgttccagtgtgctgtgtgcaacaagttcaccagtgacagcctggaggccctgtctgtgcacgtgagcagcgagaggagcctgcctgaggaggagtggagggctgtgattggagacatctaccagtgcaagctgtgcaactacaacacccagctgaaggccaacttccagctgcactgcaagacagacaagcacatgcagaagtaccagctggtggcccacatcaaggagggcggcaagagcaatgagtggaggctgaagtgcatcgccatcggcaaccctgtgcacctgaagtgcaatgcctgtgactactacaccaacagcgtggacaagctgcggctgcacaccaccaaccacagacatgaagctgccctgaagctgtacaagcacctgcagaagcaggagggcgctgtgaaccctgagagctgctactactactgtgctgtgtgtgactacaccaccaaggtgaagctgaacctggtgcagcacgtgcgctctgtgaagcaccagcagacagagggcctgaggaagctgcagctgcaccagcagggcctggcccctgaggaggacaacctgtctgagatcttctttgtgaaggactgccccccaaatgagctggagacagccagcctgggcgcccggacctgtgatgatgacctgacagagcagcacgaggaggccgagggcgccatcaagcccacagctgtggccgaggatgatgagaaggacaccagcgagcgggacaacagcgagggcaagaacagcaacaaggacagcgtgtctgtggccggcggcacccagcccctgctgctggccaaggaggaggatgtggccaccaagaggagcaagcccacagaggacaacaagttctgccacgagcagttctaccagtgcccctactgcaactacaacagccgggaccagagccgcatccagatgcacgtgctgagccagcacagcgtgcagcctgtgatctgctgccccctgtgccaggatgtgctgagcaacaagatgcacctgcagctgcacctgacccacctgcacagcgtgtccccagactgtgtggagaagctgctgatgacagtgcctgtgcctgatgtgatgatgcccaacagcatgctgctgcctgctgctgccagcgagaagtctgagcgggacaccccagctgctgtgacagctgagggcagcggcaagtacagcggggagagccccatggatgacaagtccatggccggcctggaggacagcaaggccaacgtggaggtgaagaatgaggagcagaagcccaccaaggagcccctggaggtgtctgagtggaacaagaacagcagcaaggatgtgaagatcccagacaccctgcaggaccagctgaatgagcagcagaagaggcagcccctgtctgtgtctgacagacatgtgtacaagtaccgctgcaaccactgcagcctggccttcaagaccatgcagaagctgcagatccacagccagtaccacgccatccgggccgccaccatgtgcaacctgtgccagaggagcttccgcaccttccaggccctgaagaagcacctggaggccggccaccctgagctgtctgaggccgagctgcagcagctgtatgccagcctgcctgtgaatggagagctgtgggccgagagcgagaccatgagccaggatgaccacggcctggagcaggagatggagcgggagtatgaggtggaccacgagggcaaggccagccctgtgggcagtgacagcagcagcatcccagatgacatgggcagcgagcccaagaggaccctgcccttcaggaagggccccaacttcaccatggagaagttcctggaccccagccggccctacaagtgcaccgtgtgcaaggagagcttcacccagaagaacatcctgctggtgcactacaacagcgtgagccacctgcacaagctgaagaaggtgctgcaggaggccagcagccctgtgccccaggagaccaacagcaacacagacaacaagccctacaagtgcagcatctgcaatgtggcctacagccagagcagcaccctggagatccacatgaggtctgtgctgcaccagaccaaggcccgggccgccaagctggagcccagcggccacgtggccggcggccacagcattgctgccaacgtgaacagccctggccagggcatgctggacagcatgagcctggccgctgtgaacagcaaggacacccacctggatgccaaggagctgaacaagaagcagaccccagacctgatcagcgcccagcctgcccaccaccccccccagagccctgcccagatccagatgcagctgcagcacgagctgcagcagcaggccgccttcttccagccccagttcctgaacccagccttcctgccccacttccccatgaccccagaggccctgctgcagttccagcagccccagttcctgttccccttctacatccctggaacagagttcagcctgggccctgacctgggcctgcccggcagcgccaccttcggcatgcctggcatgacaggcatggccggcagcctgctggaggacctgaagcagcagatccagacccagcaccacgtgggccagacccagctgcagatcctgcagcagcaggcccagcagtaccaggccacccagccccagctgcagccccagaagcagcagcagcagcccccaccaccccagcagcagcagcagcagcaggccagcaagctgctgaagcaggagcagagcaacatcgtgtctgctgactgccagatcatgaaggatgtgcccagctacaaggaggccgaggacatcagcgagaagccagagaagcccaagcaggagttcatcagcgagggggagggcctgaaggagggcaaggacaccaagaagcagaagagcctggagcccagcatccccccaccaagaattgccagcggggcccggggaaatgctgccaaggccctgctggagaactttggatttgagctggtgatccagtacaatgaaaatcggcagaaggtgcagaagaagggcaagagcggggagggggagaacacagacaagctggagtgtggcacctgtgggaagctgttcagcaatgtgctgatcctgaagagccaccaggagcacgtgcacggccagttcttcccctatgctgccctggagaagtttgcccggcagtaccgggaggcctatgacaagctgtaccccatcagccccagcagccctgagaccccacctcctcctcctcctcctccacccctgcccccagccccaccccagcccagctccatgggccctgtgaagatccccaacacagtgtccacccccctgcaggcccccccacccaccccacctcctcctcctcctcctcctcctcctcctcctcctcctcctcctcctcctcctccttctgccccaccccaggtgcagctgcctgtgtccctggacctgcccctcttccccagcatcatgatgcagcctgtgcagcacccagccctgcccccccagctggccctgcagctgccccagatggatgccctgtctgctgacctgacccagctgtgccagcagcagctgggcctggaccccaacttcctgcggcacagccagttcaagaggcccaggacccgcatcacagatgaccagctgaagatcctgcgggcctactttgacatcaacaacagccccagcgaggagcagatccaggagatggccgagaagagcggcctgagccagaaggtgatcaagcactggttcaggaacaccctcttcaaggagcggcagaggaacaaggacagcccctacaacttcagcaacccccccatcaccgtgctggaggacatcagaattgacccccagcccaccagcctggagcactacaagagtgatgccagcttcagcaagaggagcagcaggacccgcttcacagactaccagctgcgggtgctgcaggacttctttgacaccaatgcctaccccaaggatgatgaaattgagcagctgagcacagtgctgaacctgcccaccagggtgattgtggtgtggttccagaatgcccggcagaaggccaggaagagctatgagaaccaggccgagaccaaggacaatgagaagcgggagctgaccaatgaaagatacatccgcaccagcaacatgcagtaccagtgcaagaagtgcaatgtggtgttcccccgcatctttgacctgatcacccaccagaagaagcagtgctacaaggatgaagatgatgatgcccaggatgagagccagacagaagattccatggatgccacagaccaggtggtgtacaagcactgcaccgtgtctggccagacagatgctgccaagaatgctgctgccccagctgccagcagcggcagcggcaccagcacccccctcatccccagccccaagccagagcctgagaagaccagccccaagccagagtacccagctgagaagcccaagcagagcgaccccagcccccccagccagggcaccaagccagccctgcccctggccagcaccagcagtgaccccccccaggccagcacagcccagccccagccccagccccagccccccaagcagccccagctgattggccggcccccatctgccagccagacccctgtgcccagcagccccctgcagatctccatgaccagcctgcagaacagcctgcccccccagctgctgcagtaccagtgtgaccagtgcaccgtggccttccccaccctggagctgtggcaggagcaccagcacatgcacttcctggccgcccagaaccagttcctgcacagccccttcctggagcggcccatggacatgccctacatgatctttgaccccaacaaccccctgatgacaggccagctgctgggcagcagcctgacccagatgccaccccaggccagcagcagccacaccacagcccccaccaccgtggccgccagcctgaagaggaagctggatgacaaggaggacaacaactgcagcgagaaggagggcggcaacagcggggaggaccagcaccgggacaagaggctgcggaccaccatcaccccagagcagctggagatcctgtatgagaagtacctgctggacagcaaccccaccaggaagatgctggaccacatcgcccgggaggtgggcctgaagaagagggtggtgcaggtgtggttccagaacacccgggcccgggagaggaagggccagttccgggctgtgggccctgcccagagccacaagcgctgccccttctgccgggccctcttcaaggccaagagcgccctggagagccacatccgcagccgccactggaatgaaggcaagcaggccggctacagcctgccccccagccccctcatcagcacagaagatggaggagagagcccccagaagtacatctactttgactaccccagcctgcccctgaccaagattgacctgagcagtgaaaatgagctggccagcacagtgtccacccctgtgtccaagacagctgagctgagccccaagaacctgctgagccccagcagcttcaaggcagaatgttctgaagatgtggagaacctgaatgcccccccagctgaggccggctatgaccagaacaagacagactttgatgagaccagcagcatcaacacagccatcagtgatgccaccactggagatgagggcaacacagagatggagagcaccaccggcagcagtggagatgtgaagccagccctgagccccaaggagcccaagaccctggacaccctgcccaagccagccaccacccccaccacagaggtgtgtgatgacaagttcctgttcagcctgaccagccccagcatccacttcaatgacaaggatggagaccatgaccagagcttctacatcacagatgatcctgatgacaatgctgacagaagtgagaccagcagcattgctgaccccagcagccccaaccccttcggcagcagcaaccccttcaagagcaagagcaatgaccggcccggccacaagcgcttccgcacccagatgagcaacctgcagctgaaggtgctgaaggcctgcttcagtgactaccgcacccccaccatgcaggagtgtgagatgctgggcaatgaaattggcctgcccaagagggtggtgcaggtgtggttccagaatgcccgggccaaggagaagaagttcaagatcaacatcggcaagcccttcatgatcaaccagggcggcacagagggcaccaagccagaatgtaccctgtgtggggtgaagtacagcgcccggctgagcatccgggaccacatcttcagcaagcagcacatcagcaaggtgcgggagaccgtgggcagccagctggaccgggagaaggactacctggcccccaccaccgtgcggcagctgatggcccagcaggagctggaccgcatcaagaaggccagtgatgtgctgggcctgactgtgcagcagcccggcatgatggacagcagcagcctgcacggcatcagcctgcccacagcctacccaggcctgcccggcctgccccctgtgctgctgcccggcatgaatggccccagcagcctgcccggcttcccccagaacagcaacatcgccagcggcatgctgggcttccccaccagcgccaccagcagccctgccctgagcctgagcagcgcccccaccaagcccctgctgcagaccccacctcctcctcctcctcctcctcctcctccacccagcagcagcctgagcggccagcagacagagcagcagaacaaggagagcgagaagaagcagaccaagcccaacaaggtgaagaagatcaaggaggaggagctggaggccaccaagccagagaagcaccccaagaaggaggagaagatcagcagcgccctgtctgtgctgggcaaggtggtgggggagacccacgtggaccccatccagctgcaggccctgcagaatgccatcgccggggaccctgccagcttcatcggcggccagttcctgccctacttcatccctggctttgccagctacttcaccccccagctgcccggcaccgtgcagggcggctacttcccccctgtgtgtggcatggagagcctcttcccctacggccccaccatgccccagaccctggccggcctgagccctggggccctgctgcagcagtaccagcagtaccagcagaacctgcaggagagcctgcagaagcagcagaagcagcagcaggagcagcagcagaagcctgtgcaggccaagaccagcaaggtggagagtgaccagccccagaacagcaatgatgccagcgagaccaaggaggacaagagcacagccacagagagcaccaaggaggagccccagctggagagcaagtctgctgacttcagtgacacctacgtggtgccctttgtgaagtatgagttcatctgcaggaagtgccagatgatgttcacagatgaagatgctgctgtgaaccaccagaagagcttctgctacttcggccagcccctgattgacccccaggagaccgtgctgcgggtgcctgtgtccaagtaccagtgcctggcctgtgatgtggccatctctggaaatgaggccctgagccagcacctgcagagcagcctgcacaaggagaagaccatcaagcaggccatgagaaatgccaaggagcacgtgcggctgctgccccacagcgtgtgcagccccaaccccaacaccaccagcaccagccagagcgctgccagcagcaacaacacctacccccacctgagctgcttctccatgaagtcctggcccaacatcctcttccaggccagcgccaggagagctgccagcccccccagcagcccccccagcctgagcctgcccagcacagtgaccagcagcctgtgcagcaccagcggcgtgcagaccagcctgcccacagagagctgcagtgatgaaagtgacagcgagctgagccagaagctggaggacctggacaacagcctggaggtgaaggccaagccagccagcggcctggatggcaacttcaacagcatccgcatggacatgttttctgtgtag

SEQ ID NO: 176429 - DNA, 10803 bp, synthetic construct
  misc_feature 1..10803: note = Description of Artificial Sequence: Synthetic coding sequence
  source 1..10803: mol_type = other DNA
atggagacctgtgacagcccccccatcagccggcaggagaatggccagagcaccagcaagctgtgtggcaccacccagctggacaatgaggtgcctgagaaggtggccggcatggagccagaccgggagaacagcagcacagatgacaacctgaagacagatgagaggaagtctgaggccctgctgggcttctctgtggagaatgctgctgccacccaggtgaccagcgccaaggagatcccctgcaatgaatgtgccaccagcttccccagcctgcagaagtacatggagcaccactgccccaatgcccggctgcctgtgctgaaggatgacaatgaaagtgagatcagcgagctggaggacagtgatgtggagaacctgaccggggagatcgtgtaccagccagatggcagcgcctacatcatcgaggacagcaaggagagcggccagaatgcccagacaggagccaacagcaagctgttcagcacagccatgttcctggacagcctggccagcgctggggagaagagtgaccagagcgccagcgcccccatgtccttctacccccagatcatcaacaccttccacatcgccagcagcctgggcaagcccttcaccgctgaccaggccttccccaacaccagcgccctggccggcgtgggccctgtgctgcacagcttccgggtgtatgacctgcggcacaagcgggagaaggactacctgaccagtgatggcagcgccaagaacagctgtgtgtccaaggatgtgcccaacaacgtggacctgagcaagtttgatggctgtgtgtctgatggcaagaggaagcctgtgctgatgtgcttcctgtgcaagctgagctttggctacatccgcagctttgtgacccatgctgtgcatgaccacaggatgaccctgaatgatgaggagcagaagctgctgagcaacaagtgtgtgtctgccatcatccagggcatcggcaaggacaaggagcccctcatctccttcctggagcccaagaagagcacctctgtgtacccccacttcagcaccaccaacctgattggccctgaccccaccttccggggcctgtggagcgccttccacgtggagaatggagacagcctgcctgctggctttgccttcctgaagggcagcgccagcaccagcagcagcgctgagcagcccctgggcatcacccagatgcccaaggccgaggtgaacctgggcggcctgagcagcctggtggtgaacacccccatcacctctgtgtccctgagccacagcagcagcgagagcagcaagatgtctgagagcaaggaccaggagaacaactgtgagcggcccaaggagagcaatgtgctgcaccccaatggagaatgtcctgtgaagtctgagcccacagagcctggagatgaagatgaagaagatgcctacagcaatgagctggatgatgaggaggtgctgggggagctgacagacagcatcggcaacaaggacttccccctgctgaaccagagcatcagccccctgagcagctctgtgctgaagttcatcgagaagggcaccagcagcagcagcgccaccgtgtctgatgacacagagaagaagaagcagacagctgctgtgcgggccagcggctctgtggccagcaactacggcatcagcggcaaggactttgctgatgccagcgccagcaaggacagcgccacagctgcccaccccagcgagatcgcccggggagatgaggacagcagcgccaccccccaccagcacggcttcacccccagcaccccaggcaccccaggccctggaggagatggcagccctggcagcggcatcgagtgccccaagtgtgacacagtgctgggcagcagccgcagcctgggcggccacatgaccatgatgcacagcaggaacagctgcaagaccctgaagtgccccaagtgcaactggcactacaagtaccagcagaccctggaggcccacatgaaggagaagcaccctgagcccggcggcagctgtgtgtactgcaagacaggccagccccacccccggctggcccggggggagagctacacctgtggctacaagcccttccgctgtgaggtgtgcaactacagcaccaccaccaagggcaacctgagcatccacatgcagagcgacaagcacctgaacaacgtgcagaacctgcagaatggaaatggagagcaggtgtttggccacagcgccccagcccccaacaccagcctgagcggctgcggcacccccagccccagcaagcccaagcagaagcccacctggaggtgtgaggtgtgtgactatgagaccaacgtggccaggaacctgcgcatccacatgaccagcgagaagcacatgcacaacatgatgctgctgcagcagaacatgaagcagatccagcacaacctgcacctgggcctggccccagctgaggccgagctgtaccagtactacctggcccagaacatcggcctgaccggcatgaagctggagaacccagctgacccccagctgatgatcaaccccttccagctggaccctgccacagctgctgccctggcccctggcctggtgaacaatgagctgcccccagagatccggctggccagcggccagctgatgggagatgacctgagcctgctgacagctggggagctgagcccctacatcagtgaccctgccctgaagctgttccagtgtgctgtgtgcaacaagttcaccagtgacagcctggaggccctgtctgtgcacgtgagcagcgagaggagcctgcctgaggaggagtggagggctgtgattggagacatctaccagtgcaagctgtgcaactacaacacccagctgaaggccaacttccagctgcactgcaagacagacaagcacatgcagaagtaccagctggtggcccacatcaaggagggcggcaagagcaatgagtggaggctgaagtgcatcgccatcggcaaccctgtgcacctgaagtgcaatgcctgtgactactacaccaacagcgtggacaagctgcggctgcacaccaccaaccacagacatgaagctgccctgaagctgtacaagcacctgcagaagcaggagggcgctgtgaaccctgagagctgctactactactgtgctgtgtgtgactacaccaccaaggtgaagctgaacctggtgcagcacgtgcgctctgtgaagcaccagcagacagagggcctgaggaagctgcagctgcaccagcagggcctggcccctgaggaggacaacctgtctgagatcttctttgtgaaggactgccccccaaatgagctggagacagccagcctgggcgcccggacctgtgatgatgacctgacagagcagcagctgcggagcaccagcgaggagcagagcgaggaggccgagggcgccatcaagcccacagctgtggctgaagatgatgagaaggacaccagcgagcgggacaacagcgagggcaagaacagcaacaaggacagcggcatcatcaccccagagaaggagctgaaggtgtctgtggccggcggcacccagcccctgctgctggccaaggaggaggatgtggccaccaagaggagcaagcccacagaggacaacaagttctgccacgagcagttctaccagtgcccctactgcaactacaacagccgggaccagagccgcatccagatgcacgtgctgagccagcacagcgtgcagcccgtcatctgctgccccctgtgccaggatgtgctgagcaacaagatgcacctgcagctgcacctgacccacctgcacagcgtgtccccagactgtgtggagaagctgctgatgacagtgcctgtgcctgatgtgatgatgcccaacagcatgctgctgcctgctgctgccagcgagaagtctgagcgggacaccccagctgctgtgacagctgagggcagcggcaagtacagcggggagagccccatggatgacaagtccatggccggcctggaggacagcaaggccaacgtggaggtgaagaatgaggagcagaagcccaccaaggagcccctggaggtgtctgagtggaacaagaacagcagcaaggatgtgaagatcccagacaccctgcaggaccagctgaatgagcagcagaagaggcagcccctgtctgtgtctgacagacatgtgtacaagtaccgctgcaaccactgcagcctggccttcaagaccatgcagaagctgcagatccacagccagtaccacgccatccgggccgccaccatgtgcaacctgtgccagaggagcttccgcaccttccaggccctgaagaagcacctggaggccggccaccctgagctgtctgaggccgagctgcagcagctgtatgccagcctgcctgtgaatggagagctgtgggccgagagcgagaccatgagccaggatgaccacggcctggagcaggagatggagcgggagtatgaggtggaccacgagggcaaggccagccctgtgggcagtgacagcagcagcatcccagatgacatgggcagcgagcccaagaggaccctgcccttcaggaagggccccaacttcaccatggagaagttcctggaccccagccggccctacaagtgcaccgtgtgcaaggagagcttcacccagaagaacatcctgctggtgcactacaacagcgtgagccacctgcacaagctgaagaaggtgctgcaggaggccagcagccctgtgccccaggagaccaacagcaacacagacaacaagccctacaagtgcagcatctgcaatgtggcctacagccagagcagcaccctggagatccacatgaggtctgtgctgcaccagaccaaggcccgggccgccaagctggagcccagcggccacgtggccggcggccacagcattgctgccaacgtgaacagccctggccagggcatgctggacagcatgagcctggccgctgtgaacagcaaggacacccacctggatgccaaggagctgaacaagaagcagaccccagacctgatcagcgcccagcctgcccaccaccccccccagagccctgcccagatccagatgcagctgcagcacgagctgcagcagcaggccgccttcttccagccccagttcctgaacccagccttcctgccccacttccccatgaccccagaggccctgctgcagttccagcagccccagttcctgttccccttctacatccctggaacagagttcagcctgggccctgacctgggcctgcccggcagcgccaccttcggcatgcctggcatgacaggcatggccggcagcctgctggaggacctgaagcagcagatccagacccagcaccacgtgggccagacccagctgcagatcctgcagcagcaggcccagcagtaccaggccacccagccccagctgcagccccagaagcagcagcagcagcccccaccaccccagcagcagcagcagcagcaggccagcaagctgctgaagcaggagcagagcaacatcgtgtctgctgactgccagatcatgaaggatgtgcccagctacaaggaggccgaggacatcagcgagaagccagagaagcccaagcaggagttcatcagcgagggggagggcctgaaggagggcaaggacaccaagaagcagaagagcctggagcccagcatccccccaccccgcatcgccagcggggcccggggaaatgctgccaaggccctgctggagaactttggatttgagctggtgatccagtacaatgaaaatcggcagaaggtgcagaagaagggcaagtctggagaaggagaaaatacagacaagctggagtgtggcacctgtgggaagctgttcagcaatgtgctgatcctgaagagccaccaggagcacgtgcacggccagttcttcccctatgctgccctggagaagtttgcccggcagtaccgggaggcctatgacaagctgtaccccatcagccccagcagccctgagaccccacctcctcctcctcctcctccacccctgcccccagccccaccccagcccagctccatgggccctgtgaagatccccaacacagtgtccacccccctgcaggcccccccacccaccccacctccacccagcgccccaccccaggtgcagctgcctgtgtccctggacctgcccctcttccccagcatcatgatgcagcctgtgcagcacccagccctgcccccccagctggccctgcagctgccccagatggatgccctgtctgctgacctgacccagctgtgccagcagcagctgggcctggaccccaacttcctgcggcacagccagttcaagaggcccaggacccgcatcacagatgaccagctgaagatcctgcgggcctactttgacatcaacaacagccccagcgaggagcagatccaggagatggccgagaagagcggcctgagccagaaggtgatcaagcactggttcaggaacaccctcttcaaggagcggcagaggaacaaggacagcccctacaacttcagcaacccccccatcaccgtgctggaggacatcagaattgacccccagcccaccagcctggagcactacaagagtgatgccagcttcagcaagaggagcagcaggacccgcttcacagactaccagctgcgggtgctgcaggacttctttgacaccaatgcctaccccaaggatgatgaaattgagcagctgagcacagtgctgaacctgcccaccagggtcatcgtggtgtggttccagaatgcccggcagaaggccaggaagagctatgagaaccaggccgagaccaaggacaatgagaagcgggagctgaccaatgaaagatacatccgcaccagcaacatgcagtaccagtgcaagaagtgcaatgtggtgttcccccgcatctttgacctgatcacccaccagaagaagcagtgctacaaggatgaagatgatgatgcccaggatgagagccagacagaggacagcatggatgccacagaccaggtggtgtacaagcactgcaccgtgtctggccagacagatgctgccaagaatgctgctgccccagctgccagcagcggcagcggcaccagcacccccctcatccccagccccaagccagagcctgagaagaccagccccaagccagagtacccagctgagaagcccaagcagagcgaccccagcccccccagccagggcaccaagccagccctgcccctggccagcaccagcagtgaccccccccaggccagcacagcccagccccagccccagccccagccccccaagcagccccagctgattggccggccccccagcgccagccagacccctgtgcccagcagccccctgcagatctccatgaccagcctgcagaacagcctgcccccccagctgctgcagtaccagtgtgaccagtgcaccgtggccttccccaccctggagctgtggcaggagcaccagcacatgcacttcctggccgcccagaaccagttcctgcacagccccttcctggagcggcccatggacatgccctacatgatctttgaccccaacaaccccctgatgacaggccagctgctgggcagcagcctgacccagatgccaccccaggccagcagcagccacaccacagcccccaccaccgtggccgccagcctgaagaggaagctggatgacaaggaggacaacaactgcagcgagaaggagggcggcaacagcggggaggaccagcaccgggacaagaggctgcggaccaccatcaccccagagcagctggagatcctgtatgagaagtacctgctggacagcaaccccaccaggaagatgctggaccacatcgcccgggaggtgggcctgaagaagagggtggtgcaggtgtggttccagaacacccgggcccgggagaggaagggccagttccgggctgtgggccctgcccagagccacaagcgctgccccttctgccgggccctcttcaaggccaagagcgccctggagagccacatccgcagccgccactggaatgaaggcaagcaggccggctacagcctgccccccagccccctcatcagcacagaagatggaggagagagcccccagaagtacatctactttgactaccccagcctgcccctgaccaagattgacctgagcagtgaaaatgagctggccagcacagtgtccacccctgtgtccaagacagctgagctgagccccaagaacctgctgagccccagcagcttcaaggccgagtgcagtgaagatgtggagaacctgaatgcccctcctgctgaggccggctatgaccagaacaagacagactttgatgagaccagcagcatcaacacagccatcagtgatgccaccactggagatgagggcaacacagagatggagagcaccaccggcagcagtggagatgtgaagccagccctgagccccaaggagcccaagaccctggacaccctgcccaagccagccaccacccccaccacagaggtgtgtgatgacaagttcctgttcagcctgaccagccccagcatccacttcaatgacaaggatggagaccatgaccagagcttctacatcacagatgatcctgatgacaatgctgacagaagtgagaccagcagcattgctgaccccagcagccccaaccccttcggcagcagcaaccccttcaagagcaagagcaatgacaggcctggccacaagcgcttccgcacccagatgagcaacctgcagctgaaggtgctgaaggcctgcttcagtgactaccgcacccccaccatgcaggagtgtgagatgctgggcaatgagatcggcctgcccaagagggtggtgcaggtgtggttccagaatgcccgggccaaggagaagaagttcaagatcaacatcggcaagcccttcatgatcaaccagggcggcacagagggcaccaagccagagtgcaccctgtgtggggtgaagtacagcgcccggctgagcatccgggaccacatcttcagcaagcagcacatcagcaaggtgcgggagaccgtgggcagccagctggaccgggagaaggactacctggcccccaccaccgtgcggcagctgatggcccagcaggagctggaccgcatcaagaaggccagtgatgtgctgggcctgactgtgcagcagcccggcatgatggacagcagcagcctgcacggcatcagcctgcccacagcctacccaggcctgcccggcctgccccctgtgctgctgcccggcatgaatggccccagcagcctgcccggcttcccccagaacagcaacaccctgaccccacctggagctggcatgctgggcttccccaccagcgccaccagcagccctgccctgagcctgagcagcgcccccaccaagcccctgctgcagaccccacctcctcctcctcctcctcctcctcctccacccagcagcagcctgagcggccagcagacagagcagcagaacaaggagagcgagaagaagcagaccaagcccaacaaggtgaagaagatcaaggaggaggagctggaggccaccaagccagagaagcaccccaagaaggaggagaagatcagcagcgccctgtctgtgctgggcaaggtggtgggggagacccacgtggaccccatccagctgcaggccctgcagaatgccatcgccggggaccctgccagcttcatcggcggccagttcctgccctacttcatccctggctttgccagctacttcaccccccagctgcccggcaccgtgcagggcggctacttcccccctgtgtgtggcatggagagcctcttcccctacggccccaccatgccccagaccctggccggcctgagccctggggccctgctgcagcagtaccagcagtaccagcagaacctgcaggagagcctgcagaagcagcagaagcagcagcaggagcagcagcagaagcctgtgcaggccaagaccagcaaggtggagagtgaccagccccagaacagcaatgatgccagcgagaccaaggaggacaagagcacagccacagagagcaccaaggaggagccccagctggagagcaagtctgctgacttcagtgacacctacgtggtgccctttgtgaagtatgagttcatctgcaggaagtgccagatgatgttcacagatgaagatgctgctgtgaaccaccagaagagcttctgctacttcggccagcccctgattgacccccaggagaccgtgctgcgggtgcctgtgtccaagtaccagtgcctggcctgtgatgtggccatctctggaaatgaggccctgagccagcacctgcagagcagcctgcacaaggagaagaccatcaagcaggccatgagaaatgccaaggagcacgtgcggctgctgccccacagcgtgtgcagccccaaccccaacaccaccagcaccagccagagcgctgccagcagcaacaacacctacccccacctgagctgcttctccatgaagtcctggcccaacatcctcttccaggccagcgcccggcgggccgccagcccccccagcagcccccccagcctgagcctgcccagcacagtgaccagcagcctgtgcagcaccagcggcgtgcagaccagcctgcccacagagagctgcagtgatgaaagtgacagcgagctgagccagaagctggaggacctggacaacagcctggaggtgaaggccaagccagccagcggcctggatggcaacttcaacagcatccgcatggacatgttttctgtgtag

SEQ ID NO: 176430 - DNA, 10716 bp, synthetic construct
  misc_feature 1..10716: note = Description of Artificial Sequence: Synthetic coding sequence
  source 1..10716: mol_type = other DNA
atggagacctgtgacagcccccccatcagccggcaggagaatggccagagcaccagcaagctgtgtggcaccacccagctggacaatgaggtgcctgagaaggtggccggcatggagccagaccgggagaacagcagcacagatgacaacctgaagacagatgagaggaagtctgaggccctgctgggcttctctgtggagaatgctgctgccacccaggtgaccagcgccaaggagatcccctgcaatgaatgtgccaccagcttccccagcctgcagaagtacatggagcaccactgccccaatgcccggctgcctgtgctgaaggatgacaatgaaagtgagatcagcgagctggaggacagtgatgtggagaacctgaccggggagatcgtgtaccagccagatggcagcgcctacatcatcgaggacagcaaggagagcggccagaatgcccagacaggagccaacagcaagctgttcagcacagccatgttcctggacagcctggccagcgctggggagaagagtgaccagagcgccagcgcccccatgtccttctacccccagatcatcaacaccttccacatcgccagcagcctgggcaagcccttcaccgctgaccaggccttccccaacaccagcgccctggccggcgtgggccctgtgctgcacagcttccgggtgtatgacctgcggcacaagcgggagaaggactacctgaccagtgatggcagcgccaagaacagctgtgtgtccaaggatgtgcccaacaacgtggacctgagcaagtttgatggctgtgtgtctgatggcaagaggaagcctgtgctgatgtgcttcctgtgcaagctgagctttggctacatccgcagctttgtgacccatgctgtgcatgaccacaggatgaccctgaatgatgaggagcagaagctgctgagcaacaagtgtgtgtctgccatcatccagggcatcggcaaggacaaggagcccctcatctccttcctggagcccaagaagagcacctctgtgtacccccacttcagcaccaccaacctgattggccctgaccccaccttccggggcctgtggagcgccttccacgtggagaatggagacagcctgcctgctggctttgccttcctgaagggcagcgccagcaccagcagcagcgctgagcagcccctgggcatcacccagatgcccaaggccgaggtgaacctgggcggcctgagcagcctggtggtgaacacccccatcacctctgtgtccctgagccacagcagcagcgagagcagcaagatgtctgagagcaaggaccaggagaacaactgtgagcggcccaaggagagcaatgtgctgcaccccaatggagaatgtcctgtgaagtctgagcccacagagcctggagatgaagatgaagaagatgcctacagcaatgagctggatgatgaggaggtgctgggggagctgacagacagcatcggcaacaaggacttccccctgctgaaccagagcatcagccccctgagcagctctgtgctgaagttcatcgagaagggcaccagcagcagcagcgccaccgtgtctgatgacacagagaagaagaagcagacagctgctgtgcgggccagcggctctgtggccagcaactacggcatcagcggcaaggactttgctgatgccagcgccagcaaggacagcgccacagctgcccaccccagcgagatcgcccggggagatgaggacagcagcgccaccccccaccagcacggcttcacccccagcaccccaggcaccccaggccctggaggagatggcagccctggcagcggcatcgagtgccccaagtgtgacacagtgctgggcagcagccgcagcctgggcggccacatgaccatgatgcacagcaggaacagctgcaagaccctgaagtgccccaagtgcaactggcactacaagtaccagcagaccctggaggcccacatgaaggagaagcaccctgagcccggcggcagctgtgtgtactgcaagacaggccagccccacccccggctggcccggggggagagctacacctgtggctacaagcccttccgctgtgaggtgtgcaactacagcaccaccaccaagggcaacctgagcatccacatgcagagcgacaagcacctgaacaacgtgcagaacctgcagaatggaaatggagagcaggtgtttggccacagcgccccagcccccaacaccagcctgagcggctgcggcacccccagccccagcaagcccaagcagaagcccacctggaggtgtgaggtgtgtgactatgagaccaacgtggccaggaacctgcgcatccacatgaccagcgagaagcacatgcacaacatgatgctgctgcagcagaacatgaagcagatccagcacaacctgcacctgggcctggccccagctgaggccgagctgtaccagtactacctggcccagaacatcggcctgaccggcatgaagctggagaacccagctgacccccagctgatgatcaaccccttccagctggaccctgccacagctgctgccctggcccctggcctgggggagctgagcccctacatcagtgaccctgccctgaagctgttccagtgtgctgtgtgcaacaagttcaccagtgacagcctggaggccctgtctgtgcacgtgagcagcgagaggagcctgcctgaggaggagtggagggctgtgattggagacatctaccagtgcaagctgtgcaactacaacacccagctgaaggccaacttccagctgcactgcaagacagacaagcacatgcagaagtaccagctggtggcccacatcaaggagggcggcaagagcaatgagtggaggctgaagtgcatcgccatcggcaaccctgtgcacctgaagtgcaatgcctgtgactactacaccaacagcgtggacaagctgcggctgcacaccaccaaccacagacatgaagctgccctgaagctgtacaagcacctgcagaagcaggagggcgctgtgaaccctgagagctgctactactactgtgctgtgtgtgactacaccaccaaggtgaagctgaacctggtgcagcacgtgcgctctgtgaagcaccagcagacagagggcctgaggaagctgcagctgcaccagcagggcctggcccctgaggaggacaacctgtctgagatcttctttgtgaaggactgccccccaaatgagctggagacagccagcctgggcgcccggacctgtgatgatgacctgacagagcagcacgaggaggccgagggcgccatcaagcccacagctgtggccgaggatgatgagaaggacaccagcgagcgggacaacagcgagggcaagaacagcaacaaggacagcgtgtctgtggccggcggcacccagcccctgctgctggccaaggaggaggatgtggccaccaagaggagcaagcccacagaggacaacaagttctgccacgagcagttctaccagtgcccctactgcaactacaacagccgggaccagagccgcatccagatgcacgtgctgagccagcacagcgtgcagcctgtgatctgctgccccctgtgccaggatgtgctgagcaacaagatgcacctgcagctgcacctgacccacctgcacagcgtgtccccagactgtgtggagaagctgctgatgacagtgcctgtgcctgatgtgatgatgcccaacagcatgctgctgcctgctgctgccagcgagaagtctgagcgggacaccccagctgctgtgacagctgagggcagcggcaagtacagcggggagagccccatggatgacaagtccatggccggcctggaggacagcaaggccaacgtggaggtgaagaatgaggagcagaagcccaccaaggagcccctggaggtgtctgagtggaacaagaacagcagcaaggatgtgaagatcccagacaccctgcaggaccagctgaatgagcagcagaagaggcagcccctgtctgtgtctgacagacatgtgtacaagtaccgctgcaaccactgcagcctggccttcaagaccatgcagaagctgcagatccacagccagtaccacgccatccgggccgccaccatgtgcaacctgtgccagaggagcttccgcaccttccaggccctgaagaagcacctggaggccggccaccctgagctgtctgaggccgagctgcagcagctgtatgccagcctgcctgtgaatggagagctgtgggccgagagcgagaccatgagccaggatgaccacggcctggagcaggagatggagcgggagtatgaggtggaccacgagggcaaggccagccctgtgggcagtgacagcagcagcatcccagatgacatgggcagcgagcccaagaggaccctgcccttcaggaagggccccaacttcaccatggagaagttcctggaccccagccggccctacaagtgcaccgtgtgcaaggagagcttcacccagaagaacatcctgctggtgcactacaacagcgtgagccacctgcacaagctgaagaaggtgctgcaggaggccagcagccctgtgccccaggagaccaacagcaacacagacaacaagccctacaagtgcagcatctgcaatgtggcctacagccagagcagcaccctggagatccacatgaggtctgtgctgcaccagaccaaggcccgggccgccaagctggagcccagcggccacgtggccggcggccacagcattgctgccaacgtgaacagccctggccagggcatgctggacagcatgagcctggccgctgtgaacagcaaggacacccacctggatgccaaggagctgaacaagaagcagaccccagacctgatcagcgcccagcctgcccaccaccccccccagagccctgcccagatccagatgcagctgcagcacgagctgcagcagcaggccgccttcttccagccccagttcctgaacccagccttcctgccccacttccccatgaccccagaggccctgctgcagttccagcagccccagttcctgttccccttctacatccctggaacagagttcagcctgggccctgacctgggcctgcccggcagcgccaccttcggcatgcctggcatgacaggcatggccggcagcctgctggaggacctgaagcagcagatccagacccagcaccacgtgggccagacccagctgcagatcctgcagcagcaggcccagcagtaccaggccacccagccccagctgcagccccagaagcagcagcagcagcccccaccaccccagcagcagcagcagcagcaggccagcaagctgctgaagcaggagcagagcaacatcgtgtctgctgactgccagatcatgaaggatgtgcccagctacaaggaggccgaggacatcagcgagaagccagagaagcccaagcaggagttcatcagcgagggggagggcctgaaggagggcaaggacaccaagaagcagaagagcctggagcccagcatccccccaccaagaattgccagcggggcccggggaaatgctgccaaggccctgctggagaactttggatttgagctggtgatccagtacaatgaaaatcggcagaaggtgcagaagaagggcaagagcggggagggggagaacacagacaagctggagtgtggcacctgtgggaagctgttcagcaatgtgctgatcctgaagagccaccaggagcacgtgcacggccagttcttcccctatgctgccctggagaagtttgcccggcagtaccgggaggcctatgacaagctgtaccccatcagccccagcagccctgagaccccacctcctcctcctcctcctccacccctgcccccagccccaccccagcccagctccatgggccctgtgaagatccccaacacagtgtccacccccctgcaggcccccccacccaccccacctcctcctcctcctcctcctcctcctcctcctcctcctcctcctcctcctcctccttctgccccaccccaggtgcagctgcctgtgtccctggacctgcccctcttccccagcatcatgatgcagcctgtgcagcacccagccctgcccccccagctggccctgcagctgccccagatggatgccctgtctgctgacctgacccagctgtgccagcagcagctgggcctggaccccaacttcctgcggcacagccagttcaagaggcccaggacccgcatcacagatgaccagctgaagatcctgcgggcctactttgacatcaacaacagccccagcgaggagcagatccaggagatggccgagaagagcggcctgagccagaaggtgatcaagcactggttcaggaacaccctcttcaaggagcggcagaggaacaaggacagcccctacaacttcagcaacccccccatcaccgtgctggaggacatcagaattgacccccagcccaccagcctggagcactacaagagtgatgccagcttcagcaagaggagcagcaggacccgcttcacagactaccagctgcgggtgctgcaggacttctttgacaccaatgcctaccccaaggatgatgaaattgagcagctgagcacagtgctgaacctgcccaccagggtgattgtggtgtggttccagaatgcccggcagaaggccaggaagagctatgagaaccaggccgagaccaaggacaatgagaagcgggagctgaccaatgaaagatacatccgcaccagcaacatgcagtaccagtgcaagaagtgcaatgtggtgttcccccgcatctttgacctgatcacccaccagaagaagcagtgctacaaggatgaagatgatgatgcccaggatgagagccagacagaagattccatggatgccacagaccaggtggtgtacaagcactgcaccgtgtctggccagacagatgctgccaagaatgctgctgccccagctgccagcagcggcagcggcaccagcacccccctcatccccagccccaagccagagcctgagaagaccagccccaagccagagtacccagctgagaagcccaagcagagcgaccccagcccccccagccagggcaccaagccagccctgcccctggccagcaccagcagtgaccccccccaggccagcacagcccagccccagccccagccccagccccccaagcagccccagctgattggccggcccccatctgccagccagacccctgtgcccagcagccccctgcagatctccatgaccagcctgcagaacagcctgcccccccagctgctgcagtaccagtgtgaccagtgcaccgtggccttccccaccctggagctgtggcaggagcaccagcacatgcacttcctggccgcccagaaccagttcctgcacagccccttcctggagcggcccatggacatgccctacatgatctttgaccccaacaaccccctgatgacaggccagctgctgggcagcagcctgacccagatgccaccccaggccagcagcagccacaccacagcccccaccaccgtggccgccagcctgaagaggaagctggatgacaaggaggacaacaactgcagcgagaaggagggcggcaacagcggggaggaccagcaccgggacaagaggctgcggaccaccatcaccccagagcagctggagatcctgtatgagaagtacctgctggacagcaaccccaccaggaagatgctggaccacatcgcccgggaggtgggcctgaagaagagggtggtgcaggtgtggttccagaacacccgggcccgggagaggaagggccagttccgggctgtgggccctgcccagagccacaagcgctgccccttctgccgggccctcttcaaggccaagagcgccctggagagccacatccgcagccgccactggaatgaaggcaagcaggccggctacagcctgccccccagccccctcatcagcacagaagatggaggagagagcccccagaagtacatctactttgactaccccagcctgcccctgaccaagattgacctgagcagtgaaaatgagctggccagcacagtgtccacccctgtgtccaagacagctgagctgagccccaagaacctgctgagccccagcagcttcaaggcagaatgttctgaagatgtggagaacctgaatgcccccccagctgaggccggctatgaccagaacaagacagactttgatgagaccagcagcatcaacacagccatcagtgatgccaccactggagatgagggcaacacagagatggagagcaccaccggcagcagtggagatgtgaagccagccctgagccccaaggagcccaagaccctggacaccctgcccaagccagccaccacccccaccacagaggtgtgtgatgacaagttcctgttcagcctgaccagccccagcatccacttcaatgacaaggatggagaccatgaccagagcttctacatcacagatgatcctgatgacaatgctgacagaagtgagaccagcagcattgctgaccccagcagccccaaccccttcggcagcagcaaccccttcaagagcaagagcaatgaccggcccggccacaagcgcttccgcacccagatgagcaacctgcagctgaaggtgctgaaggcctgcttcagtgactaccgcacccccaccatgcaggagtgtgagatgctgggcaatgaaattggcctgcccaagagggtggtgcaggtgtggttccagaatgcccgggccaaggagaagaagttcaagatcaacatcggcaagcccttcatgatcaaccagggcggcacagagggcaccaagccagaatgtaccctgtgtggggtgaagtacagcgcccggctgagcatccgggaccacatcttcagcaagcagcacatcagcaaggtgcgggagaccgtgggcagccagctggaccgggagaaggactacctggcccccaccaccgtgcggcagctgatggcccagcaggagctggaccgcatcaagaaggccagtgatgtgctgggcctgactgtgcagcagcccggcatgatggacagcagcagcctgcacggcatcagcctgcccacagcctacccaggcctgcccggcctgccccctgtgctgctgcccggcatgaatggccccagcagcctgcccggcttcccccagaacagcaacaccctgaccccacctggggccggcatgctgggcttccccaccagcgccaccagcagccctgccctgagcctgagcagcgcccccaccaagcccctgctgcagaccccacctcctcctcctcctcctcctcctcctccacccagcagcagcctgagcggccagcagacagagcagcagaacaaggagagcgagaagaagcagaccaagcccaacaaggtgaagaagatcaaggaggaggagctggaggccaccaagccagagaagcaccccaagaaggaggagaagatcagcagcgccctgtctgtgctgggcaaggtggtgggggagacccacgtggaccccatccagctgcaggccctgcagaatgccatcgccggggaccctgccagcttcatcggcggccagttcctgccctacttcatccctggctttgccagctacttcaccccccagctgcccggcaccgtgcagggcggctacttcccccctgtgtgtggcatggagagcctcttcccctacggccccaccatgccccagaccctggccggcctgagccctggggccctgctgcagcagtaccagcagtaccagcagaacctgcaggagagcctgcagaagcagcagaagcagcagcaggagcagcagcagaagcctgtgcaggccaagaccagcaaggtggagagtgaccagccccagaacagcaatgatgccagcgagaccaaggaggacaagagcacagccacagagagcaccaaggaggagccccagctggagagcaagtctgctgacttcagtgacacctacgtggtgccctttgtgaagtatgagttcatctgcaggaagtgccagatgatgttcacagatgaagatgctgctgtgaaccaccagaagagcttctgctacttcggccagcccctgattgacccccaggagaccgtgctgcgggtgcctgtgtccaagtaccagtgcctggcctgtgatgtggccatctctggaaatgaggccctgagccagcacctgcagagcagcctgcacaaggagaagaccatcaagcaggccatgagaaatgccaaggagcacgtgcggctgctgccccacagcgtgtgcagccccaaccccaacaccaccagcaccagccagagcgctgccagcagcaacaacacctacccccacctgagctgcttctccatgaagtcctggcccaacatcctcttccaggccagcgccaggagagctgccagcccccccagcagcccccccagcctgagcctgcccagcacagtgaccagcagcctgtgcagcaccagcggcgtgcagaccagcctgcccacagagagctgcagtgatgaaagtgacagcgagctgagccagaagctggaggacctggacaacagcctggaggtgaaggccaagccagccagcggcctggatggcaacttcaacagcatccgcatggacatgttttctgtgtag

SEQ ID NO: 176431 - DNA, 468 bp, synthetic construct
  misc_feature 1..468: note = Description of Artificial Sequence: Synthetic coding sequence
  source 1..468: mol_type = other DNA
atggagacctgtgacagcccccccatcagccggcaggagaatggccagagcaccagcaagctgtgtggcaccacccagctggacaatgaggtgcctgagaaggtggccggcatggagccagaccgggagaacagcagcacagatgacaacctgaagacagatgagaggaagtctgaggccctgctgggcttctctgtggagaatgctgctgccacccaggtgaccagcgccaaggagatcccctgcaatgaatgtgccaccagcttccccagcctgcagaagtacatggagcaccactgccccaatgcccggctgcctgtgctgaaggatgacaatgaaagtgagatcagcgagctggaggacagtgatgtggagaacctgaccggggagatcgtgtaccagccagatggcagcgcctacatcatcgaggacagcaaggagagcggccagaatgcccagacaggatag

SEQ ID NO: 176432 - DNA, 10773 bp, synthetic construct
  misc_feature 1..10773: note = Description of Artificial Sequence: Synthetic coding sequence
  source 1..10773: mol_type = other DNA
atggagacctgtgacagcccccccatcagccggcaggagaatggccagagcaccagcaagctgtgtggcaccacccagctggacaatgaggtgcctgagaaggtggccggcatggagccagaccgggagaacagcagcacagatgacaacctgaagacagatgagaggaagtctgaggccctgctgggcttctctgtggagaatgctgctgccacccaggtgaccagcgccaaggagatcccctgcaatgaatgtgccaccagcttccccagcctgcagaagtacatggagcaccactgccccaatgcccggctgcctgtgctgaaggatgacaatgaaagtgagatcagcgagctggaggacagtgatgtggagaacctgaccggggagatcgtgtaccagccagatggcagcgcctacatcatcgaggacagcaaggagagcggccagaatgcccagacaggagccaacagcaagctgttcagcacagccatgttcctggacagcctggccagcgctggggagaagagtgaccagagcgccagcgcccccatgtccttctacccccagatcatcaacaccttccacatcgccagcagcctgggcaagcccttcaccgctgaccaggccttccccaacaccagcgccctggccggcgtgggccctgtgctgcacagcttccgggtgtatgacctgcggcacaagcgggagaaggactacctgaccagtgatggcagcgccaagaacagctgtgtgtccaaggatgtgcccaacaacgtggacctgagcaagtttgatggctgtgtgtctgatggcaagaggaagcctgtgctgatgtgcttcctgtgcaagctgagctttggctacatccgcagctttgtgacccatgctgtgcatgaccacaggatgaccctgaatgatgaggagcagaagctgctgagcaacaagtgtgtgtctgccatcatccagggcatcggcaaggacaaggagcccctcatctccttcctggagcccaagaagagcacctctgtgtacccccacttcagcaccaccaacctgattggccctgaccccaccttccggggcctgtggagcgccttccacgtggagaatggagacagcctgcctgctggctttgccttcctgaagggcagcgccagcaccagcagcagcgctgagcagcccctgggcatcacccagatgcccaaggccgaggtgaacctgggcggcctgagcagcctggtggtgaacacccccatcacctctgtgtccctgagccacagcagcagcgagagcagcaagatgtctgagagcaaggaccaggagaacaactgtgagcggcccaaggagagcaatgtgctgcaccccaatggagaatgtcctgtgaagtctgagcccacagagcctggagatgaagatgaagaagatgcctacagcaatgagctggatgatgaggaggtgctgggggagctgacagacagcatcggcaacaaggacttccccctgctgaaccagagcatcagccccctgagcagctctgtgctgaagttcatcgagaagggcaccagcagcagcagcgccaccgtgtctgatgacacagagaagaagaagcagacagctgctgtgcgggccagcggctctgtggccagcaactacggcatcagcggcaaggactttgctgatgccagcgccagcaaggacagcgccacagctgcccaccccagcgagatcgcccggggagatgaggacagcagcgccaccccccaccagcacggcttcacccccagcaccccaggcaccccaggccctggaggagatggcagccctggcagcggcatcgagtgccccaagtgtgacacagtgctgggcagcagccgcagcctgggcggccacatgaccatgatgcacagcaggaacagctgcaagaccctgaagtgccccaagtgcaactggcactacaagtaccagcagaccctggaggcccacatgaaggagaagcaccctgagcccggcggcagctgtgtgtactgcaagacaggccagccccacccccggctggcccggggggagagctacacctgtggctacaagcccttccgctgtgaggtgtgcaactacagcaccaccaccaagggcaacctgagcatccacatgcagagcgacaagcacctgaacaacgtgcagaacctgcagaatggaaatggagagcaggtgtttggccacagcgccccagcccccaacaccagcctgagcggctgcggcacccccagccccagcaagcccaagcagaagcccacctggaggtgtgaggtgtgtgactatgagaccaacgtggccaggaacctgcgcatccacatgaccagcgagaagcacatgcacaacatgatgctgctgcagcagaacatgaagcagatccagcacaacctgcacctgggcctggccccagctgaggccgagctgtaccagtactacctggcccagaacatcggcctgaccggcatgaagctggagaacccagctgacccccagctgatgatcaaccccttccagctggaccctgccacagctgctgccctggcccctggcctgggggagctgagcccctacatcagtgaccctgccctgaagctgttccagtgtgctgtgtgcaacaagttcaccagtgacagcctggaggccctgtctgtgcacgtgagcagcgagaggagcctgcctgaggaggagtggagggctgtgattggagacatctaccagtgcaagctgtgcaactacaacacccagctgaaggccaacttccagctgcactgcaagacagacaagcacatgcagaagtaccagctggtggcccacatcaaggagggcggcaagagcaatgagtggaggctgaagtgcatcgccatcggcaaccctgtgcacctgaagtgcaatgcctgtgactactacaccaacagcgtggacaagctgcggctgcacaccaccaaccacagacatgaagctgccctgaagctgtacaagcacctgcagaagcaggagggcgctgtgaaccctgagagctgctactactactgtgctgtgtgtgactacaccaccaaggtgaagctgaacctggtgcagcacgtgcgctctgtgaagcaccagcagacagagggcctgaggaagctgcagctgcaccagcagggcctggcccctgaggaggacaacctgtctgagatcttctttgtgaaggactgccccccaaatgagctggagacagccagcctgggcgcccggacctgtgatgatgacctgacagagcagcagctgcggagcaccagcgaggagcagagcgaggaggccgagggcgccatcaagcccacagctgtggctgaagatgatgagaaggacaccagcgagcgggacaacagcgagggcaagaacagcaacaaggacagcggcatcatcaccccagagaaggagctgaaggtgtctgtggccggcggcacccagcccctgctgctggccaaggaggaggatgtggccaccaagaggagcaagcccacagaggacaacaagttctgccacgagcagttctaccagtgcccctactgcaactacaacagccgggaccagagccgcatccagatgcacgtgctgagccagcacagcgtgcagcccgtcatctgctgccccctgtgccaggatgtgctgagcaacaagatgcacctgcagctgcacctgacccacctgcacagcgtgtccccagactgtgtggagaagctgctgatgacagtgcctgtgcctgatgtgatgatgcccaacagcatgctgctgcctgctgctgccagcgagaagtctgagcgggacaccccagctgctgtgacagctgagggcagcggcaagtacagcggggagagccccatggatgacaagtccatggccggcctggaggacagcaaggccaacgtggaggtgaagaatgaggagcagaagcccaccaaggagcccctggaggtgtctgagtggaacaagaacagcagcaaggatgtgaagatcccagacaccctgcaggaccagctgaatgagcagcagaagaggcagcccctgtctgtgtctgacagacatgtgtacaagtaccgctgcaaccactgcagcctggccttcaagaccatgcagaagctgcagatccacagccagtaccacgccatccgggccgccaccatgtgcaacctgtgccagaggagcttccgcaccttccaggccctgaagaagcacctggaggccggccaccctgagctgtctgaggccgagctgcagcagctgtatgccagcctgcctgtgaatggagagctgtgggccgagagcgagaccatgagccaggatgaccacggcctggagcaggagatggagcgggagtatgaggtggaccacgagggcaaggccagccctgtgggcagtgacagcagcagcatcccagatgacatgggcagcgagcccaagaggaccctgcccttcaggaagggccccaacttcaccatggagaagttcctggaccccagccggccctacaagtgcaccgtgtgcaaggagagcttcacccagaagaacatcctgctggtgcactacaacagcgtgagccacctgcacaagctgaagaaggtgctgcaggaggccagcagccctgtgccccaggagaccaacagcaacacagacaacaagccctacaagtgcagcatctgcaatgtggcctacagccagagcagcaccctggagatccacatgaggtctgtgctgcaccagaccaaggcccgggccgccaagctggagcccagcggccacgtggccggcggccacagcattgctgccaacgtgaacagccctggccagggcatgctggacagcatgagcctggccgctgtgaacagcaaggacacccacctggatgccaaggagctgaacaagaagcagaccccagacctgatcagcgcccagcctgcccaccaccccccccagagccctgcccagatccagatgcagctgcagcacgagctgcagcagcaggccgccttcttccagccccagttcctgaacccagccttcctgccccacttccccatgaccccagaggccctgctgcagttccagcagccccagttcctgttccccttctacatccctggaacagagttcagcctgggccctgacctgggcctgcccggcagcgccaccttcggcatgcctggcatgacaggcatggccggcagcctgctggaggacctgaagcagcagatccagacccagcaccacgtgggccagacccagctgcagatcctgcagcagcaggcccagcagtaccaggccacccagccccagctgcagccccagaagcagcagcagcagcccccaccaccccagcagcagcagcagcagcaggccagcaagctgctgaagcaggagcagagcaacatcgtgtctgctgactgccagatcatgaaggatgtgcccagctacaaggaggccgaggacatcagcgagaagccagagaagcccaagcaggagttcatcagcgagggggagggcctgaaggagggcaaggacaccaagaagcagaagagcctggagcccagcatccccccaccccgcatcgccagcggggcccggggaaatgctgccaaggccctgctggagaactttggatttgagctggtgatccagtacaatgaaaatcggcagaaggtgcagaagaagggcaagtctggagaaggagaaaatacagacaagctggagtgtggcacctgtgggaagctgttcagcaatgtgctgatcctgaagagccaccaggagcacgtgcacggccagttcttcccctatgctgccctggagaagtttgcccggcagtaccgggaggcctatgacaagctgtaccccatcagccccagcagccctgagaccccacctcctcctcctcctcctccacccctgcccccagccccaccccagcccagctccatgggccctgtgaagatccccaacacagtgtccacccccctgcaggcccccccacccaccccacctcctcctcctcctcctcctcctcctcctcctcctcctcctcctcctcctccacccagcgccccaccccaggtgcagctgcctgtgtccctggacctgcccctcttccccagcatcatgatgcagcctgtgcagcacccagccctgcccccccagctggccctgcagctgccccagatggatgccctgtctgctgacctgacccagctgtgccagcagcagctgggcctggaccccaacttcctgcggcacagccagttcaagaggcccaggacccgcatcacagatgaccagctgaagatcctgcgggcctactttgacatcaacaacagccccagcgaggagcagatccaggagatggccgagaagagcggcctgagccagaaggtgatcaagcactggttcaggaacaccctcttcaaggagcggcagaggaacaaggacagcccctacaacttcagcaacccccccatcaccgtgctggaggacatcagaattgacccccagcccaccagcctggagcactacaagagtgatgccagcttcagcaagaggagcagcaggacccgcttcacagactaccagctgcgggtgctgcaggacttctttgacaccaatgcctaccccaaggatgatgaaattgagcagctgagcacagtgctgaacctgcccaccagggtcatcgtggtgtggttccagaatgcccggcagaaggccaggaagagctatgagaaccaggccgagaccaaggacaatgagaagcgggagctgaccaatgaaagatacatccgcaccagcaacatgcagtaccagtgcaagaagtgcaatgtggtgttcccccgcatctttgacctgatcacccaccagaagaagcagtgctacaaggatgaagatgatgatgcccaggatgagagccagacagaggacagcatggatgccacagaccaggtggtgtacaagcactgcaccgtgtctggccagacagatgctgccaagaatgctgctgccccagctgccagcagcggcagcggcaccagcacccccctcatccccagccccaagccagagcctgagaagaccagccccaagccagagtacccagctgagaagcccaagcagagcgaccccagcccccccagccagggcaccaagccagccctgcccctggccagcaccagcagtgaccccccccaggccagcacagcccagccccagccccagccccagccccccaagcagccccagctgattggccggccccccagcgccagccagacccctgtgcccagcagccccctgcagatctccatgaccagcctgcagaacagcctgcccccccagctgctgcagtaccagtgtgaccagtgcaccgtggccttccccaccctggagctgtggcaggagcaccagcacatgcacttcctggccgcccagaaccagttcctgcacagccccttcctggagcggcccatggacatgccctacatgatctttgaccccaacaaccccctgatgacaggccagctgctgggcagcagcctgacccagatgccaccccaggccagcagcagccacaccacagcccccaccaccgtggccgccagcctgaagaggaagctggatgacaaggaggacaacaactgcagcgagaaggagggcggcaacagcggggaggaccagcaccgggacaagaggctgcggaccaccatcaccccagagcagctggagatcctgtatgagaagtacctgctggacagcaaccccaccaggaagatgctggaccacatcgcccgggaggtgggcctgaagaagagggtggtgcaggtgtggttccagaacacccgggcccgggagaggaagggccagttccgggctgtgggccctgcccagagccacaagcgctgccccttctgccgggccctcttcaaggccaagagcgccctggagagccacatccgcagccgccactggaatgaaggcaagcaggccggctacagcctgccccccagccccctcatcagcacagaagatggaggagagagcccccagaagtacatctactttgactaccccagcctgcccctgaccaagattgacctgagcagtgaaaatgagctggccagcacagtgtccacccctgtgtccaagacagctgagctgagccccaagaacctgctgagccccagcagcttcaaggccgagtgcagtgaagatgtggagaacctgaatgcccctcctgctgaggccggctatgaccagaacaagacagactttgatgagaccagcagcatcaacacagccatcagtgatgccaccactggagatgagggcaacacagagatggagagcaccaccggcagcagtggagatgtgaagccagccctgagccccaaggagcccaagaccctggacaccctgcccaagccagccaccacccccaccacagaggtgtgtgatgacaagttcctgttcagcctgaccagccccagcatccacttcaatgacaaggatggagaccatgaccagagcttctacatcacagatgatcctgatgacaatgctgacagaagtgagaccagcagcattgctgaccccagcagccccaaccccttcggcagcagcaaccccttcaagagcaagagcaatgacaggcctggccacaagcgcttccgcacccagatgagcaacctgcagctgaaggtgctgaaggcctgcttcagtgactaccgcacccccaccatgcaggagtgtgagatgctgggcaatgagatcggcctgcccaagagggtggtgcaggtgtggttccagaatgcccgggccaaggagaagaagttcaagatcaacatcggcaagcccttcatgatcaaccagggcggcacagagggcaccaagccagagtgcaccctgtgtggggtgaagtacagcgcccggctgagcatccgggaccacatcttcagcaagcagcacatcagcaaggtgcgggagaccgtgggcagccagctggaccgggagaaggactacctggcccccaccaccgtgcggcagctgatggcccagcaggagctggaccgcatcaagaaggccagtgatgtgctgggcctgactgtgcagcagcccggcatgatggacagcagcagcctgcacggcatcagcctgcccacagcctacccaggcctgcccggcctgccccctgtgctgctgcccggcatgaatggccccagcagcctgcccggcttcccccagaacagcaacaccctgaccccacctggagctggcatgctgggcttccccaccagcgccaccagcagccctgccctgagcctgagcagcgcccccaccaagcccctgctgcagaccccacctcctcctcctcctcctcctcctcctccacccagcagcagcctgagcggccagcagacagagcagcagaacaaggagagcgagaagaagcagaccaagcccaacaaggtgaagaagatcaaggaggaggagctggaggccaccaagccagagaagcaccccaagaaggaggagaagatcagcagcgccctgtctgtgctgggcaaggtggtgggggagacccacgtggaccccatccagctgcaggccctgcagaatgccatcgccggggaccctgccagcttcatcggcggccagttcctgccctacttcatccctggctttgccagctacttcaccccccagctgcccggcaccgtgcagggcggctacttcccccctgtgtgtggcatggagagcctcttcccctacggccccaccatgccccagaccctggccggcctgagccctggggccctgctgcagcagtaccagcagtaccagcagaacctgcaggagagcctgcagaagcagcagaagcagcagcaggagcagcagcagaagcctgtgcaggccaagaccagcaaggtggagagtgaccagccccagaacagcaatgatgccagcgagaccaaggaggacaagagcacagccacagagagcaccaaggaggagccccagctggagagcaagtctgctgacttcagtgacacctacgtggtgccctttgtgaagtatgagttcatctgcaggaagtgccagatgatgttcacagatgaagatgctgctgtgaaccaccagaagagcttctgctacttcggccagcccctgattgacccccaggagaccgtgctgcgggtgcctgtgtccaagtaccagtgcctggcctgtgatgtggccatctctggaaatgaggccctgagccagcacctgcagagcagcctgcacaaggagaagaccatcaagcaggccatgagaaatgccaaggagcacgtgcggctgctgccccacagcgtgtgcagccccaaccccaacaccaccagcaccagccagagcgctgccagcagcaacaacacctacccccacctgagctgcttctccatgaagtcctggcccaacatcctcttccaggccagcgcccggcgggccgccagcccccccagcagcccccccagcctgagcctgcccagcacagtgaccagcagcctgtgcagcaccagcggcgtgcagaccagcctgcccacagagagctgcagtgatgaaagtgacagcgagctgagccagaagctggaggacctggacaacagcctggaggtgaaggccaagccagccagcggcctggatggcaacttcaacagcatccgcatggacatgttttctgtgtag

SEQ ID NO: 176433 - DNA, 468 bp, synthetic construct; identical to SEQ ID NO: 176431
  misc_feature 1..468: note = Description of Artificial Sequence: Synthetic coding sequence
  source 1..468: mol_type = other DNA

SEQ ID NO: 176434 - DNA, 10851 bp, synthetic construct
  misc_feature 1..10851: note = Description of Artificial Sequence: Synthetic coding sequence
  source 1..10851: mol_type = other DNA
atggagacctgtgacagcccccccatcagccggcaggagaatggccagagcaccagcaagctgtgtggcaccacccagctggacaatgaggtgcctgagaaggtggccggcatggagccagaccgggagaacagcagcacagatgacaacctgaagacagatgagaggaagtctgaggccctgctgggcttctctgtggagaatgctgctgccacccaggtgaccagcgccaaggagatcccctgcaatgaatgtgccaccagcttccccagcctgcagaagtacatggagcaccactgccccaatgcccggctgcctgtgctgaaggatgacaatgaaagtgagatcagcgagctggaggacagtgatgtggagaacctgaccggggagatcgtgtaccagccagatggcagcgcctacatcatcgaggacagcaaggagagcggccagaatgcccagacaggagccaacagcaagctgttcagcacagccatgttcctggacagcctggccagcgctggggagaagagtgaccagagcgccagcgcccccatgtccttctacccccagatcatcaacaccttccacatcgccagcagcctgggcaagcccttcaccgctgaccaggccttccccaacaccagcgccctggccggcgtgggccctgtgctgcacagcttccgggtgtatgacctgcggcacaagcgggagaaggactacctgaccagtgatggcagcgccaagaacagctgtgtgtccaaggatgtgcccaacaacgtggacctgagcaagtttgatggctgtgtgtctgatggcaagaggaagcctgtgctgatgtgcttcctgtgcaagctgagctttggctacatccgcagctttgtgacccatgctgtgcatgaccacaggatgaccctgaatgatgaggagcagaagctgctgagcaacaagtgtgtgtctgccatcatccagggcatcggcaaggacaaggagcccctcatctccttcctggagcccaagaagagcacctctgtgtacccccacttcagcaccaccaacctgattggccctgaccccaccttccggggcctgtggagcgccttccacgtggagaatggagacagcctgcctgctggctttgccttcctgaagggcagcgccagcaccagcagcagcgctgagcagcccctgggcatcacccagatgcccaaggccgaggtgaacctgggcggcctgagcagcctggtggtgaacacccccatcacctctgtgtccctgagccacagcagcagcgagagcagcaagatgtctgagagcaaggaccaggagaacaactgtgagcggcccaaggagagcaatgtgctgcaccccaatggagaatgtcctgtgaagtctgagcccacagagcctggagatgaagatgaagaagatgcctacagcaatgagctggatgatgaggaggtgctgggggagctgacagacagcatcggcaacaaggacttccccctgctgaaccagagcatcagccccctgagcagctctgtgctgaagttcatcgagaagggcaccagcagcagcagcgccaccgtgtctgatgacacagagaagaagaagcagacagctgctgtgcgggccagcggctctgtggccagcaactacggcatcagcggcaaggactttgctgatgccagcgccagcaaggacagcgccacagctgcccaccccagcgagatcgcccggggagatgaggacagcagcgccaccccccaccagcacggcttcacccccagcaccccaggcaccccaggccctggaggagatggcagccctggcagcggcatcgagtgccccaagtgtgacacagtgctgggcagcagccgcagcctgggcggccacatgaccatgatgcacagcaggaacagctgcaagaccctgaagtgccccaagtgcaactggcactacaagtaccagcagaccctggaggcccacatgaaggagaagcaccctgagcccggcggcagctgtgtgtactgcaagacaggccagccccacccccggctggcccggggggagagctacacctgtggctacaagcccttccgctgtgaggtgtgcaactacagcaccaccaccaagggcaacctgagcatccacatgcagagcgacaagcacctgaacaacgtgcagaacctgcagaatggaaatggagagcaggtgtttggccacagcgccccagcccccaacaccagcctgagcggctgcggcacccccagccccagcaagcccaagcagaagcccacctggaggtgtgaggtgtgtgactatgagaccaacgtggccaggaacctgcgcatccacatgaccagcgagaagcacatgcacaacatgatgctgctgcagcagaacatgaagcagatccagcacaacctgcacctgggcctggccccagctgaggccgagctgtaccagtactacctggcccagaacatcggcctgaccggcatgaagctggagaacccagctgacccccagctgatgatcaaccccttccagctggaccctgccacagctgctgccctggcccctggcctggtgaacaatgagctgcccccagagatccggctggccagcggccagctgatgggagatgacctgagcctgctgacagctggggagctgagcccctacatcagtgaccctgccctgaagctgttccagtgtgctgtgtgcaacaagttcaccagtgacagcctggaggccctgtctgtgcacgtgagcagcgagaggagcctgcctgaggaggagtggagggctgtgattggagacatctaccagtgcaagctgtgcaactacaacacccagctgaaggccaacttccagctgcactgcaagacagacaagcacatgcagaagtaccagctggtggcccacatcaaggagggcggcaagagcaatgagtggaggctgaagtgcatcgccatcggcaaccctgtgcacctgaagtgcaatgcctgtgactactacaccaacagcgtggacaagctgcggctgcacaccaccaaccacagacatgaagctgccctgaagctgtacaagcacctgcagaagcaggagggcgctgtgaaccctgagagctgctactactactgtgctgtgtgtgactacaccaccaaggtgaagctgaacctggtgcagcacgtgcgctctgtgaagcaccagcagacagagggcctgaggaagctgcagctgcaccagcagggcctggcccctgaggaggacaacctgtctgagatcttctttgtgaaggactgccccccaaatgagctggagacagccagcctgggcgcccggacctgtgatgatgacctgacagagcagcagctgcggagcaccagcgaggagcagagcgaggaggccgagggcgccatcaagcccacagctgtggctgaagatgatgagaaggacaccagcgagcgggacaacagcgagggcaagaacagcaacaaggacagcggcatcatcaccccagagaaggagctgaaggtgtctgtggccggcggcacccagcccctgctgctggccaaggaggaggatgtggccaccaagaggagcaagcccacagaggacaacaagttctgccacgagcagttctaccagtgcccctactgcaactacaacagccgggaccagagccgcatccagatgcacgtgctgagccagcacagcgtgcagcccgtcatctgctgccccctgtgccaggatgtgctgagcaacaagatgcacctgcagctgcacctgacccacctgcacagcgtgtccccagactgtgtggagaagctgctgatgacagtgcctgtgcctgatgtgatgatgcccaacagcatgctgctgcctgctgctgccagcgagaagtctgagcgggacaccccagctgctgtgacagctgagggcagcggcaagtacagcggggagagccccatggatgacaagtccatggccggcctggaggacagcaaggccaacgtggaggtgaagaatgaggagcagaagcccaccaaggagcccctggaggtgtctgagtggaacaagaacagcagcaaggatgtgaagatcccagacaccctgcaggaccagctgaatgagcagcagaagaggcagcccctgtctgtgtctgacagacatgtgtacaagtaccgctgcaaccactgcagcctggccttcaagaccatgcagaagctgcagatccacagccagtaccacgccatccgggccgccaccatgtgcaacctgtgccagaggagcttccgcaccttccaggccctgaagaagcacctggaggccggccaccctgagctgtctgaggccgagctgcagcagctgtatgccagcctgcctgtgaatggagagctgtgggccgagagcgagaccatgagccaggatgaccacggcctggagcaggagatggagcgggagtatgaggtggaccacgagggcaaggccagccctgtgggcagtgacagcagcagcatcccagatgacatgggcagcgagcccaagaggaccctgcccttcaggaagggccccaacttcaccatggagaagttcctggaccccagccggccctacaagtgcaccgtgtgcaaggagagcttcacccagaagaacatcctgctggtgcactacaacagcgtgagccacctgcacaagctgaagaaggtgctgcaggaggccagcagccctgtgccccaggagaccaacagcaacacagacaacaagccctacaagtgcagcatctgcaatgtggcctacagccagagcagcaccctggagatccacatgaggtctgtgctgcaccagaccaaggcccgggccgccaagctggagcccagcggccacgtggccggcggccacagcattgctgccaacgtgaacagccctggccagggcatgctggacagcatgagcctggccgctgtgaacagcaaggacacccacctggatgccaaggagctgaacaagaagcagaccccagacctgatcagcgcccagcctgcccaccaccccccccagagccctgcccagatccagatgcagctgcagcacgagctgcagcagcaggccgccttcttccagccccagttcctgaacccagccttcctgccccacttccccatgaccccagaggccctgctgcagttccagcagccccagttcctgttccccttctacatccctggaacagagttcagcctgggccctgacctgggcctgcccggcagcgccaccttcggcatgcctggcatgacaggcatggccggcagcctgctggaggacctgaagcagcagatccagacccagcaccacgtgggccagacccagctgcagatcctgcagcagcaggcccagcagtaccaggccacccagccccagctgcagccccagaagcagcagcagcagcccccaccaccccagcagcagcagcagcagcaggccagcaagctgctgaagcaggagcagagcaacatcgtgtctgctgactgccagatcatgaaggatgtgcccagctacaaggaggccgaggacatcagcgagaagccagagaagcccaagcaggagttcatcagcgagggggagggcctgaaggagggcaaggacaccaagaagcagaagagcctggagcccagcatccccccaccccgcatcgccagcggggcccggggaaatgctgccaaggccctgctggagaactttggatttgagctggtgatccagtacaatgaaaatcggcagaaggtgcagaagaagggcaagtctggagaaggagaaaatacagacaagctggagtgtggcacctgtgggaagctgttcagcaatgtgctgatcctgaagagccaccaggagcacgtgcacggccagttcttcccctatgctgccctggagaagtttgcccggcagtaccgggaggcctatgacaagctgtaccccatcagccccagcagccctgagaccccacctcctcctcctcctcctccacccctgcccccagccccaccccagcccagctccatgggccctgtgaagatccccaacacagtgtccacccccctgcaggcccccccacccaccccacctcctcctcctcctcctcctcctcctcctcctcctcctcctcctcctcctccacccagcgccccaccccaggtgcagctgcctgtgtccctggacctgcccctcttccccagcatcatgatgcagcctgtgcagcacccagccctgcccccccagctggccctgcagctgccccagatggatgccctgtctgctgacctgacccagctgtgccagcagcagctgggcctggaccccaacttcctgcggcacagccagttcaagaggcccaggacccgcatcacagatgaccagctgaagatcctgcgggcctactttgacatcaacaacagccccagcgaggagcagatccaggagatggccgagaagagcggcctgagccagaaggtgatcaagcactggttcaggaacaccctcttcaaggagcggcagaggaacaaggacagcccctacaacttcagcaacccccccatcaccgtgctggaggacatcagaattgacccccagcccaccagcctggagcactacaagagtgatgccagcttcagcaagaggagcagcaggacccgcttcacagactaccagctgcgggtgctgcaggacttctttgacaccaatgcctaccccaaggatgatgaaattgagcagctgagcacagtgctgaacctgcccaccagggtcatcgtggtgtggttccagaatgcccggcagaaggccaggaagagctatgagaaccaggccgagaccaaggacaatgagaagcgggagctgaccaatgaaagatacatccgcaccagcaacatgcagtaccagtgcaagaagtgcaatgtggtgttcccccgcatctttgacctgatcacccaccagaagaagcagtgctacaaggatgaagatgatgatgcccaggatgagagccagacagaggacagcatggatgccacagaccaggtggtgtacaagcactgcaccgtgtctggccagacagatgctgccaagaatgctgctgccccagctgccagcagcggcagcggcaccagcacccccctcatccccagccccaagccagagcctgagaagaccagccccaagccagagtacccagctgagaagcccaagcagagcgaccccagcccccccagccagggcaccaagccagccctgcccctggccagcaccagcagtgaccccccccaggccagcacagcccagccccagccccagccccagccccccaagcagccccagctgattggccggccccccagcgccagccagacccctgtgcccagcagccccctgcagatctccatgaccagcctgcagaacagcctgcccccccagctgctgcagtaccagtgtgaccagtgcaccgtggccttccccaccctggagctgtggcaggagcaccagcacatgcacttcctggccgcccagaaccagttcctgcacagccccttcctggagcggcccatggacatgccctacatgatctttgaccccaacaaccccctgatgacaggccagctgctgggcagcagcctgacccagatgccaccccaggccagcagcagccacaccacagcccccaccaccgtggccgccagcctgaagaggaagctggatgacaaggaggacaacaactgcagcgagaaggagggcggcaacagcggggaggaccagcaccgggacaagaggctgcggaccaccatcaccccagagcagctggagatcctgtatgagaagtacctgctggacagcaaccccaccaggaagatgctggaccacatcgcccgggaggtgggcctgaagaagagggtggtgcaggtgtggttccagaacacccgggcccgggagaggaagggccagttccgggctgtgggccctgcccagagccacaagcgctgccccttctgccgggccctcttcaaggccaagagcgccctggagagccacatccgcagccgccactggaatgaaggcaagcaggccggctacagcctgccccccagccccctcatcagcacagaagatggaggagagagcccccagaagtacatctactttgactaccccagcctgcccctgaccaagattgacctgagcagtgaaaatgagctggccagcacagtgtccacccctgtgtccaagacagctgagctgagccccaagaacctgctgagccccagcagcttcaaggccgagtgcagtgaagatgtggagaacctgaatgcccctcctgctgaggccggctatgaccagaacaagacagactttgatgagaccagcagcatcaacacagccatcagtgatgccaccactggagatgagggcaacacagagatggagagcaccaccggcagcagtggagatgtgaagccagccctgagccccaaggagcccaagaccctggacaccctgcccaagccagccaccacccccaccacagaggtgtgtgatgacaagttcctgttcagcctgaccagccccagcatccacttcaatgacaaggatggagaccatgaccagagcttctacatcacagatgatcctgatgacaatgctgacagaagtgagaccagcagcattgctgaccccagcagccccaaccccttcggcagcagcaaccccttcaagagcaagagcaatgacaggcctggccacaagcgcttccgcacccagatgagcaacctgcagctgaaggtgctgaaggcctgcttcagtgactaccgcacccccaccatgcaggagtgtgagatgctgggcaatgagatcggcctgcccaagagggtggtgcaggtgtggttccagaatgcccgggccaaggagaagaagttcaagatcaacatcggcaagcccttcatgatcaaccagggcggcacagagggcaccaagccagagtgcaccctgtgtggggtgaagtacagcgcccggctgagcatccgggaccacatcttcagcaagcagcacatcagcaaggtgcgggagaccgtgggcagccagctggaccgggagaaggactacctggcccccaccaccgtgcggcagctgatggcccagcaggagctggaccgcatcaagaaggccagtgatgtgctgggcctgactgtgcagcagcccggcatgatggacagcagcagcctgcacggcatcagcctgcccacagcctacccaggcctgcccggcctgccccctgtgctgctgcccggcatgaatggccccagcagcctgcccggcttcccccagaacagcaacaccctgaccccacctggagctggcatgctgggcttccccaccagcgccaccagcagccctgccctgagcctgagcagcgcccccaccaagcccctgctgcagaccccacctcctcctcctcctcctcctcctcctccacccagcagcagcctgagcggccagcagacagagcagcagaacaaggagagcgagaagaagcagaccaagcccaacaaggtgaagaagatcaaggaggaggagctggaggccaccaagccagagaagcaccccaagaaggaggagaagatcagcagcgccctgtctgtgctgggcaaggtggtgggggagacccacgtggaccccatccagctgcaggccctgcagaatgccatcgccggggaccctgccagcttcatcggcggccagttcctgccctacttcatccctggctttgccagctacttcaccccccagctgcccggcaccgtgcagggcggctacttcccccctgtgtgtggcatggagagcctcttcccctacggccccaccatgccccagaccctggccggcctgagccctggggccctgctgcagcagtaccagcagtaccagcagaacctgcaggagagcctgcagaagcagcagaagcagcagcaggagcagcagcagaagcctgtgcaggccaagaccagcaaggtggagagtgaccagccccagaacagcaatgatgccagcgagaccaaggaggacaagagcacagccacagagagcaccaaggaggagccccagctggagagcaagtctgctgacttcagtgacacctacgtggtgccctttgtgaagtatgagttcatctgcaggaagtgccagatgatgttcacagatgaagatgctgctgtgaaccaccagaagagcttctgctacttcggccagcccctgattgacccccaggagaccgtgctgcgggtgcctgtgtccaagtaccagtgcctggcctgtgatgtggccatctctggaaatgaggccctgagccagcacctgcagagcagcctgcacaaggagaagaccatcaagcaggccatgagaaatgccaaggagcacgtgcggctgctgccccacagcgtgtgcagccccaaccccaacaccaccagcaccagccagagcgctgccagcagcaacaacacctacccccacctgagctgcttctccatgaagtcctggcccaacatcctcttccaggccagcgcccggcgggccgccagcccccccagcagcccccccagcctgagcctgcccagcacagtgaccagcagcctgtgcagcaccagcggcgtgcagaccagcctgcccacagagagctgcagtgatgaaagtgacagcgagctgagccagaagctggaggacctggacaacagcctggaggtgaaggccaagccagccagcggcctggatggcaacttcaacagcatccgcatggacatgttttctgtgtag

SEQ ID NO: 176435 - DNA, 423 bp, synthetic construct
  misc_feature 1..423: note = Description of Artificial Sequence: Synthetic coding sequence
  source 1..423: mol_type = other DNA
atggagacctgtgacagcccccccatcagccggcaggagaatggccagagcaccagcaagctgtgtggcaccacccagctggacaatgaggtgcctgagaaggtggccggcatggagccagaccgggagaacagcagcacagatgacaacctgaagacagatgagaggaagtctgaggccctgctgggcttctctgtggagaatgctgctgccacccaggtgaccagcgccaaggagatcccctgcaatgaatgtgccaccagcttccccagcctgcagaagtacatggagcaccactgccccaatgcccggctgcctgtgctgaaggatgacaatgaaagtgagatcagcgagctggaggacagtgatgtggagaacctgaccggggagatcgtgtaccagccagatggcagcgcctactag

SEQ ID NO: 176436 - DNA, 306 bp, synthetic construct
  misc_feature 1..306: note = Description of Artificial Sequence: Synthetic coding sequence
  source 1..306: mol_type = other DNA
atggagacctgtgacagcccccccatcagccggcaggagaatggccagagcaccagcaagctgtgtggcaccacccagctggacaatgaggtgcctgagaaggtggccggcatggagccagaccgggagaacagcagcacagatgacaacctgaagacagatgagaggaagtctgaggccctgctgggcttctctgtggagaatgctgctgccacccaggtgaccagcgccaaggagatcccctgcaatgaatgtgccaccagcttccccagcctgcagaagtacatggagcaccactgcccctag

SEQ ID NO: 176437 - DNA, 2253 bp, synthetic construct
  misc_feature 1..2253: note = Description of Artificial Sequence: Synthetic coding sequence
  source 1..2253: mol_type = other DNA
atggagtttgtgtctggctacagagatgagttcctggacttcaccgccctgctgtttggctggttcaggaagtttgtggccgagagaggagctgtgggcaccagcctggagggccgctgccggcagctggaggcccagatccggcggctgccccaggaccctgccctgtgggtgctgcacgtgctgcccaaccacagcgtgggcatcagcctgggccagggcgctgagcccggccctggccctggcctgggcacagcctggctgctgggggacaacccccccctgcacctgcgggacctgagcccctacatcagctttgtgtccctggaggatggagaggagggggaggaggaggaggaggaggatgaggaggaggagaagagagaagatggaggagctggcagcacagagaaggtggagccagaagaagatcgggagctggcccccaccagccgggagagcccccaggagaccaaccccccaggagagagcgaggaggccgcccgggaggccggcggcggcaaggatggctgccgggaggacagagtggagaatgagacccggccccagaagaggaagggccagaggtctgaggccgcccccctgcacgtgtcctgcctgctgctggtgacagatgagcacggcaccatcctgggcatcgacctgctggtggatggagcccagggcacagcctcctggggcagcggcaccaaggacctggccccctgggcctatgccctgctgtgccacagcatggcctgccccatgggcagcggggaccccaggaagccccggcagctgactgtgggagatgcccggctgcaccgggagctggagagcctggtgccccggctgggcgtgaagctggccaagacccccatgaggacctggggccccaggcctggcttcacctttgccagcctgcgggcccggacctgccacgtgtgccaccgccacagctttgaggccaagctgaccccctgcccccagtgcagcgctgtgctgtactgtggggaggcctgcctgcgggctgactggcagcgctgcccagatgatgtgagccaccgcttctggtgcccccggctggccgccttcatggagagagctggggagctggccaccctgcccttcacctacacagctgaggtgaccagcgagaccttcaacaaggaggccttcctggccagccggggcctgacccggggctactggacccagctgtccatgctgatccctggccctggcttcagccgccacccccggggcaacacccccagcctgagcctgctgcggggcggggacccctaccagctgctgcagggagatggaacagccctgatgcctcctgtgcccccccaccccccccggggcgtgtttggctcctggcaggactactacacctggaggggcctgagcctggacagccccatcgctgtgctgctgacctaccccctgactgtgtactacgtgatcacccacctggtgccccagagcttccctgagctgaacatccagaacaagcagagcctgaagatccacgtggtggaggccggcaaggagtttgacctggtgatggtgttctgggagctgctggtgctgctgccccacgtggccctggagctgcagtttgtgggagatggcctgcccccagagagtgatgagcagcacttcaccctgcagagggacagcctggaggtgtctgtgcggcccggcagcggcatcagcgcccggcccagcagcggcaccaaggagaagggcggccggcgggacctgcagatcaaggtgtctgcccggccctaccacctgttccagggccccaagccagacctggtgattgccagccccagcagcctgtctgctggcttcaacagcggctttgccctgaaggacacctggctgcggagcctgccccggctgcagagcctgcgggtgcctgccttcttcacagagagcagcgagtacagctgtgtgatggatggccagaccatggctgtggccactggaggcggcaccagccccccccagcccaaccccttccgcagccccttccggctgcgggctgctgacaactgcatgtcctggtactgcaatgccttcatcttccacctggtgtacaagccagcccagggcagcggggcccggcctgcccctggccccccaccacccagccccaccccatctgcccccccagcccccaccaggagaagaagaggagagaagaagccaggccgcggggcccggcggaggaagtag

SEQ ID NO: 176438 - DNA, 2112 bp, synthetic construct
  misc_feature 1..2112: note = Description of Artificial Sequence: Synthetic coding sequence
  source 1..2112: mol_type = other DNA
atggagtttgtgtctggctacagagatgagttcctggacttcaccgccctgctgtttggctggttcaggaagtttgtggccgagagaggagctgtgggcaccagcctggagggccgctgccggcagctggaggcccagatccggcggctgccccaggaccctgccctgtgggtgctgcacgtgctgcccaaccacagcgtgggcatcagcctgggccagggcgctgagcccggccctggccctggcctgggcacagcctggctgctgggggacaacccccccctgcacctgcgggacctgagcccctacatcagctttgtgtccctggaggatggagaggagggggaggaggaggaggaggaggatgaggaggaggagaagagagaagatggaggagctggcagcacagagaaggtggagccagaagaagatcgggagctggcccccaccagccgggagagcccccaggagaccaaccccccaggagagagcgaggaggccgcccgggaggccggcggcggcaaggatggctgccgggaggacagagtggagaatgagacccggccccagaagaggaagggccagaggtctgaggccgcccccctgcacgtgtcctgcctgctgctggtgacagatgagcacggcaccatcctgggcatcgacctgctggtggatggagcccagggcacagcctcctggggcagcggcaccaaggacctggccccctgggcctatgccctgctgtgccacagcatggcctgccccatgggcagcggggaccccaggaagccccggcagctgactgtgggagatgcccggctgcaccgggagctggagagcctggtgccccggctgggcgtgaagctggccaagacccccatgaggacctggggccccaggcctggcttcacctttgccagcctgcgggcccggacctgccacgtgtgccaccgccacagctttgaggccaagctgaccccctgcccccagtgcagcgctgtgctgtactgtggggaggcctgcctgcgggctgactggcagcgctgcccagatgatgtgagccaccgcttctggtgcccccggctggccgccttcatggagagagctggggagctggccaccctgcccttcacctacacagctgaggtgaccagcgagaccttcaacaaggaggccttcctggccagccggggcctgacccggggctactggacccagctgtccatgctgatccctggccctggcttcagccgccacccccggggcaacacccccagcctgagcctgctgcggggcggggacccctaccagctgctgcagggagatggaacagccctgatgcctcctgtgcccccccaccccccccggggcgtgtttgtgcctgagctgaacatccagaacaagcagagcctgaagatccacgtggtggaggccggcaaggagtttgacctggtgatggtgttctgggagctgctggtgctgctgccccacgtggccctggagctgcagtttgtgggagatggcctgcccccagagagtgatgagcagcacttcaccctgcagagggacagcctggaggtgtctgtgcggcccggcagcggcatcagcgcccggcccagcagcggcaccaaggagaagggcggcagaagagacctgcagatcaaggtgtctgcccggccctaccacctgttccagggccccaagccagacctggtgattggcttcaacagcggctttgccctgaaggacacctggctgcggagcctgccccggctgcagagcctgcgggtgcctgccttcttcacagagagcagcgagtacagctgtgtgatggatggccagaccatggctgtggccaccggcggcggcaccagccccccccagcccaaccccttccgcagccccttccggctgcgggctgctgacaactgcatgtcctggtactgcaatgccttcatcttccacctggtgtacaagccagcccagggcagcggggcccggcctgcccctggccccccaccacccagccccacccccagcgcccccccagcccccaccaggagaagaagaggagagaagaagccaggccgcggggcccggcggaggaagtag

SEQ ID NO: 176439 - DNA, 1722 bp, synthetic construct
  misc_feature 1..1722: note = Description of Artificial Sequence: Synthetic coding sequence
  source 1..1722: mol_type = other DNA
atggatgccaagagcctgacagcctggagcaggaccctggtgaccttcaaggatgtgtttgtggacttcacccgggaggagtggaagctgctggacacagcccagcagatcgtgtacagaaatgtgatgctggagaactacaagaacctggtgtccctgggctaccagctgaccaagccagatgtgatcctgcggctggagaagggggaggagccctggctggtggagcgggagatccaccaggagacccacccagattctgaaacagcctttgagatcaagagctctgtgagcagccgcagcatcttcaaggacaagcagagctgtgacatcaagatggagggcatggccagaaatgacctgtggtacctgagcctggaggaggtgtggaagtgccgggaccagctggacaagtaccaggagaaccctgagcggcacctgcggcaggtggccttcacccagaagaaggtgctgacccaggagcgggtgtctgagagcggcaagtatggaggcaactgcctgctgcctgcccagctggtgctgcgggagtacttccacaagagggacagccacaccaagagcctgaagcatgacctggtgctgaatggccaccaggacagctgtgccagcaacagcaatgaatgtggccagaccttctgccagaacatccacctgatccagtttgcccggacccacactggagacaagagctacaagtgcccagacaatgacaacagcctgacccacggcagcagcctgggcatcagcaagggcatccaccgggagaagccctatgagtgcaaggaatgtgggaagttcttctcctggaggagcaacctgaccaggcaccagctgatccacactggagagaagccctatgagtgcaaggaatgtgggaagagcttcagccgcagcagccacctgattggccaccagaagacccacactggagaggagccctatgagtgcaaggaatgtgggaagagcttctcctggttcagccacctggtgacccaccagaggacccacactggagacaagctgtacacctgcaaccagtgtgggaagagctttgtgcacagcagccgcctcatccgccaccagaggacccacactggagagaagccctatgagtgcccagaatgtgggaagagcttccggcagagcacccacctgatcctgcaccagaggacccacgtgcgggtgcggccctatgagtgcaatgaatgtgggaagagctacagccagaggagccacctggtggtgcaccaccgcatccacacaggcctgaagccctttgagtgcaaggactgtgggaagtgcttcagccgcagcagccacctgtacagccaccagaggacccacactggagagaagccctatgagtgccacgactgtgggaagagcttcagccagagcagcgccctgattgtgcaccagaggatccacactggagagaagccctatgagtgctgccagtgtgggaaggccttcatcaggaagaatgacctgatcaagcaccagagaattcatgtgggggaggagacctacaagtgcaaccagtgtggcatcatcttcagccagaacagccccttcatcgtgcaccagatcgcccacactggagagcagttcctgacctgcaaccagtgtggcacagccctggtgaacaccagcaacctgattggctaccagaccaaccacatccgggagaatgcctactag

SEQ ID NO: 176440 - DNA, 1722 bp, synthetic construct; identical to SEQ ID NO: 176439
  misc_feature 1..1722: note = Description of Artificial Sequence: Synthetic coding sequence
  source 1..1722: mol_type = other DNA

SEQ ID NO: 176441 - DNA, 219 bp, synthetic construct
  misc_feature 1..219: note = Description of Artificial Sequence: Synthetic coding sequence
  source 1..219: mol_type = other DNA
atggatgccaagagcctgacagcctggagcaggaccctggtgaccttcaaggatgtgtttgtggacttcacccgggaggagtggaagctgctggacacagcccagcagatcgtgtacagaaatgtgatgctggagaactacaagaacctggtgtccctgggctaccagctgaccaagccagatgtgatcctgcggctggagaagggggaggagccctag

SEQ ID NO: 176442 - DNA, 132 bp, synthetic construct
  misc_feature 1..132: note = Description of Artificial Sequence: Synthetic coding sequence
  source 1..132: mol_type = other DNA
atggatgccaagagcctgacagcctggagcaggaccctggtgaccttcaaggatgtgtttgtggacttcacccgggaggagtggaagctgctggacacagcccagcagatcgtgtacagaaatgtgatgtag

SEQ ID NO: 176443 - DNA, 144 bp, synthetic construct
  misc_feature 1..144: note = Description of Artificial Sequence: Synthetic coding sequence
  source 1..144: mol_type = other DNA
atggatgccaagagcctgacagcctggagcaggaccctggtgaccttcaaggatgtgtttgtggacttcacccgggaggagtggaagctgctggacacagcccagcagatcgtgtacagaaatgtgatgctggagaactactag

SEQ ID NO: 176444 - DNA, 1629 bp, synthetic construct
  misc_feature 1..1629: note = Description of Artificial Sequence: Synthetic coding sequence
  source 1..1629: mol_type = other DNA
atggatgaccccaggtatggcatgtgccccctgaagggggccagcggctgccctggagctgagaggagcctgctggtgcagagctactttgagaagggccccctgaccttcagagatgtggccatcgagttcagcctggaggagtggcagtgcctggacagcgcccagcagggcctgtacaggaaggtgatgctggagaactacagaaacctggtgttcctggccggcatcgccctgaccaagccagacctgatcacctgcctggagcagggcaaggagccctggaacatcaagagacatgagatggtggccaagccccctgtgatctgcagccacttcccccaggacctgtgggccgagcaggacatcaaggacagcttccaggaggccatcctgaagaagtatggcaagtatggccatgacaacctgcagctgcagaagggctgcaagtctgtggatgagtgcaaggtgcacaaggagcatgacaacaagctgaaccagtgcctgatcaccacccagagcaacatcttccagtgtgaccccagcgccaaggtgttccacaccttcagcaacagcaacagacacaagatccgccacaccaggaagaagcccttcaagtgcaagaagtgtgagaagagcttctgcatgctgctgcacctgacccagcacaagcgcttccacatcacagagaacagctaccagtgcaaggactgtgggaaggccttcaactggttcagcaccctgaccacccaccggcgcatccacactggagagaagccctacaagtgtgaagaatgtgggaaggccttcaacagaagcagccacctgaccacccacaagatcatccacactggagagaagccctaccgctgtgaagaatgtgggaaggccttcaacagaagcagccacctgaccacccacaagaggatccacactggagtgaagccctacaagtgcacagaatgtgggaaggccttcaacagaagcagccacctgaccacccaccgcatcatccacactggagagaagccctacaagtgtgaagaatgtgggaaggccttcaaccagagcagcaccctgaccacccacaagatcacccacgccggggagaagccctacaagtgtgaagaatgtgggaaggccttctaccgcttctcctacctgaccaagcacaagaccagccacactggagagaagttctacaagtgtgaagaatgtgggaagggcttcaactggagcagcgccctgaccaagcacaagaggatccacactggagagaagccctacaagtgtgaagaatgtgggaaggccttcaatgaaagcagcaacctgaccacccacaagatgatccacactggagagaagccctacaagtgtgatgaatgtgggaaggccttcaacagaagcagccagctgacagcccacaagatgatccacactggagagaagccctacaagtgtgaagaatgtgggaaggccttcaacagaagcagcaccctgaccaagcacaagatcacccacactggagagaagagctacaagtgggaggagtgtgggaaggacttcaaccagagcctgagcctcatcaagcagaacaacagctactggagggagaccctgcagatgtag

SEQ ID NO: 176445 - DNA, 1311 bp, synthetic construct
  misc_feature 1..1311: note = Description of Artificial Sequence: Synthetic coding sequence
  source 1..1311: mol_type = other DNA
atggattctgtggcctttgaagatgtggccgtgaacttcacccaggaggagtgggccctgctgagccccagccagaagaacctgtacagagatgtgaccctggagaccttcaggaacctggcctctgtgggcatccagtggaaggaccaggacattgaaaatctctaccagaacctgggcatcaagctgcggagcctggtggagcggctgtgtggcaggaaggagggcaatgagcaccgggagaccttcagccagatcccagactgccacctgaacaagaagagccagacaggagtgaagccctgcaagtgcagcgtgtgtgggaaggtgttcctgcggcacagcttcctggacagacacatgagggcccatgctggccacaagagaagtgaatgtggcggggagtggagggagacccccaggaagcagaagcagcacggcaaggccagcatcagccccagcagcggggcccggaggacagtgacccccaccaggaagaggccctatgagtgcaaggtgtgtgggaaggccttcaacagccccaacctcttccagatccaccagaggacccacacaggcaagaggagctacaagtgccgggagatcgtgcgggccttcaccgtgagcagcttcttcaggaagcacggcaagatgcacactggagagaagagatatgagtgcaagtactgtgggaagcccatcgactaccccagcctcttccagatccacgtgaggacccacactggagagaagccctacaagtgcaagcagtgtgggaaggccttcatctctgctggctacctgcggacccatgagatccgcagccacgccctggagaagagccaccagtgccaggagtgtgggaagaagctgagctgcagcagcagcctgcacagacatgagaggacccacagcggcggcaagctgtatgagtgccagaagtgtgccaaggtgttccgctgccccaccagcctgcaggcccacgagcgggcccacactggagagcggccctatgagtgcaacaagtgtgggaagaccttcaactaccccagctgcttccgccgccacaagaagacccacagcggggagaagccctatgaatgtacccgctgtgggaaggccttcggctggtgcagcagcctgcggagacatgagatgacccacactggagagaagccctttgactgcaagcagtgtgggaaggtgttcaccttcagcaactacctgcggctgcacgagaggacccacctggccggccgcagccagtgcttcggccggcggcagggcgaccacctgagccctggggtgtag

SEQ ID NO: 176446 - DNA, 1311 bp, synthetic construct; identical to SEQ ID NO: 176445
  misc_feature 1..1311: note = Description of Artificial Sequence: Synthetic coding sequence
  source 1..1311: mol_type = other DNA

SEQ ID NO: 176447 - DNA, 951 bp, synthetic construct
  misc_feature 1..951: note = Description of Artificial Sequence: Synthetic coding sequence
  source 1..951: mol_type = other DNA
atgagggcccatgctggccacaagagaagtgaatgtggcggggagtggagggagacccccaggaagcagaagcagcacggcaaggccagcatcagccccagcagcggggcccggaggacagtgacccccaccaggaagaggccctatgagtgcaaggtgtgtgggaaggccttcaacagccccaacctcttccagatccaccagaggacccacacaggcaagaggagctacaagtgccgggagatcgtgcgggccttcaccgtgagcagcttcttcaggaagcacggcaagatgcacactggagagaagagatatgagtgcaagtactgtgggaagcccatcgactaccccagcctcttccagatccacgtgaggacccacactggagagaagccctacaagtgcaagcagtgtgggaaggccttcatctctgctggctacctgcggacccatgagatccgcagccacgccctggagaagagccaccagtgccaggagtgtgggaagaagctgagctgcagcagcagcctgcacagacatgagaggacccacagcggcggcaagctgtatgagtgccagaagtgtgccaaggtgttccgctgccccaccagcctgcaggcccacgagcgggcccacactggagagcggccctatgagtgcaacaagtgtgggaagaccttcaactaccccagctgcttccgccgccacaagaagacccacagcggggagaagccctatgaatgtacccgctgtgggaaggccttcggctggtgcagcagcctgcggagacatgagatgacccacactggagagaagccctttgactgcaagcagtgtgggaaggtgttcaccttcagcaactacctgcggctgcacgagaggacccacctggccggccgcagccagtgcttcggccggcggcagggcgaccacctgagccctggggtgtag

SEQ ID NO: 176448 - DNA, 1311 bp, synthetic construct; identical to SEQ ID NO: 176445
  misc_feature 1..1311: note = Description of Artificial Sequence: Synthetic coding sequence
  source 1..1311: mol_type = other DNA

SEQ ID NO: 176449 - DNA, 2352 bp, synthetic construct
  misc_feature 1..2352: note = Description of Artificial Sequence: Synthetic coding sequence
  source 1..2352: mol_type = other DNA
atggtggccaagccccctgtgatgtccttccactttgcccaggacctgtggccagagcagaacatcaaggacagcttccagaaggtgaccctgcggcgctatggaaaatgtgaatatgagaacctgcagctgaggaagggctgcaagcacgtggatgaatgtacaggccacaagggcggccacaacacagtgaaccagtgcctgacagccacccccagcaagatcttccagtgcaacaagtatgtgaaggtgtttgacaagttcagcaacagcaaccgctacaagaggaggcacactggaaacaagcacttcaagtgcaaggagtgcagcaagagcttctgtgtgctgagccagctgacccagcaccggcgcatccacaccagggtgaacagctacaagtgtgaggagtgtgggaaggccttcaactggttcagcaccctgaccaagcacaagaggatccacactggagagaagccctacaagtgtgaggagtgtgggaaggccttcaaccagagcagccagctgaccaggcacaagatcatccacacagaggagaagcccaacaagtgtgaggagtgtgggaaggccttcaagcaggccagccacctgaccatccacaagatcatccacactggagagaagccctacaagtatgaggagtgtgggaaggtgttcagccagagcagccacctgaccacccagaagatcctgcacactggagaaaatctctacaagtgcaaggaatgtgggaaggccttcaacctcttcagcaacctgaccaaccacaagagaattcatgctggggagaagccctacaagtgcaaggaatgtggccgggccttcaacatcagcagcaacctgaacaagcaggagaagatccacactggaggcaagctgaacaagtgtgaggagtgtgacaaggccttcaacagaagcctgaagctgacagcccacaagaagatcctgatggaggagaagccctacaagtgtgaggagtgtgggaaggtgttcaaccagttcagcaccctgaccaggcacaagatcatccacactggagagaagccctacaagtgcaaggaatgtgggaaggccttcaaccagagcagcaacctgacagagcacaagaagatccacacagctgagaagagctacaagtgtgaggagtgtgggaaggccttcaaccagcacagcaacctgatcaaccacaggaagatctacagcggggagaagccctacaagtgtgaggagtgtgggaaggccttcaacagaagcagcaccctgaccaggcacaagaagatccacactggagagaagccctacaagtgtgaggagtgtgaccgggccttcagccagagcagcaacctgacagagcacaagaagatccacactggagagaagccctacaagtgtgaggagtgtgggaaggccttcaaccgcttcagcaccctgaccaagcacaagaggatccacactggagagaagccctacaagtgtgaggagtgtgggaaggccttcaaccagagctaccagctgaccaggcacaagatcgtgcacaccaaggagaagctgaacaagtgtgaggagtttgggaaggccttcaagcagagcagccacaggaccatccacaagatcatccacactggagagaagccctacaagtgtgaggagcacggcaaggtgttcaaccagagcagcaacctgaccacccagaagatcatccacactggagaaaatctctacaagtttgaggagcacggcaaggccttcaacctcttcagcaacatcaccaaccacaagatcatctacacaggagagaagccccacaagtgtgaggagtgtgggaaggcctacaaccgcttcagcaacctgaccatccacaagaggatccacactggagagaagccctaccagtgtgccgagtgtgggaaggccttcaactgcagcagcaccctgaacagacacaagatcatccacactggagagaagccctacaagtgcaaggaatgtgggaaggccttcaacctgagcagcaccctgacagcccacaagaagatccacactggagagaagccctacaagtgtgaggagtgtgggaaggccttcaaccagagcagcaacctgaccacccacaagaagatccacaccagcgagaagccctacaagtgtgaggagtgtgggaagagcttcaaccagttcagcagcctgaacatccacaagatcatccacactggagagaagccctacaagtgtggggactatggccgggccttcaacctgagcagcaacctgaccacccacaagaagatccacactggagagaagccctacaagtgtgaatatggcaagacctag

SEQ ID NO: 176450 - DNA, 276 bp, synthetic construct
  misc_feature 1..276: note = Description of Artificial Sequence: Synthetic coding sequence
  source 1..276: mol_type = other DNA
atggtggccaagccccctgtgatgtccttccactttgcccaggacctgtggccagagcagaacatcaaggacagcttccagaaggtgaccctgcggcgctatggaaaatgtgaatatgagaacctgcagctgaggaagggctgcaagcacgtggatgaatgtacaggccacaagggcggccacaacacagtgaaccagtgcctgacagccacccccagcaagatcttccagtgcaacaagtatgtgaaggtgtttgacaagttcagcaacagctag

SEQ ID NO: 176451 - DNA, 2352 bp, synthetic construct; identical to SEQ ID NO: 176449
  misc_feature 1..2352: note = Description of Artificial Sequence: Synthetic coding sequence
  source 1..2352: mol_type = other DNA

SEQ ID NO: 176452 - DNA, 2352 bp, synthetic construct; identical to SEQ ID NO: 176449
  misc_feature 1..2352: note = Description of Artificial Sequence: Synthetic coding sequence
  source 1..2352: mol_type = other DNA

SEQ ID NO: 176453 - DNA, 453 bp, synthetic construct
  misc_feature 1..453: note = Description of Artificial Sequence: Synthetic coding sequence
  source 1..453: mol_type = other DNA
atggtggccaagccccctgtgatgtccttccactttgcccaggacctgtggccagagcagaacatcaaggacagcttccagaaggtgaccctgcggcgctatggaaaatgtgaatatgagaacctgcagctgaggaagggctgcaagcacgtggatgaatgtacaggccacaagggcggccacaacacagtgaaccagtgcctgacagccacccccagcaagatcttccagtgcaacaagtatgtgaaggtgtttgacaagttcagcaacagcaaccgctacaagaggaggcacactggaaacaagcacttcaagtgcaaggagtgcagcaagagcttctgtgtgctgagccagctgacccagcaccggcgcatccacaccagggtgaacagctacaagtgtgaggagtgtgggaaggccatcatcatctgcagcgacttcacccagcactag

SEQ ID NO: 176454 - DNA, 1254 bp, synthetic construct
  misc_feature 1..1254: note = Description of Artificial Sequence: Synthetic coding sequence
  source 1..1254: mol_type = other DNA
atgagccaggacagcgtgacctttgctgatgtggccgtgaacttcaccaaggaggagtggaccctgctggaccctgcccagaggaacctgtacagagatgtgatgctggagaacagcaggaacctggccttcatcgactgggccaccccctgcaagaccaaggatgccaccccccagcctgacatcctgcccaagaggaccttccctgaggccaacagagtgtgcctgaccagcatcagcagccagcacagcaccctgcgggaggactggcgctgccccaagacagaggagccccaccggcagggcgtgaacaacgtgaagcccccagctgtggcccctgagaaggatgagagccctgtgtccatctgtgaggaccacgagatgaggaaccacagcaagcccacctgccgcctggtgcccagccagggcgacagcatccggcagtgcatcctgacccgggacagcagcatcttcaagtacaaccctgtgctgaatgacagccagaagacccatgagaacaatgaagatgatggagtgctgggctggaacatccagtgggtgccctgtggcaggaagacagagctgaagagcagcacctggacaggcagccagaacacagtgcaccacatcagagatgaaattgacaccggggccaacagacaccagaggaacccctttgggaaggccttccgggaggatggcagcctgcgggcccacaacacccacggccgggagaagatgtatgacttcacccagtgtgagaacaccagcaggaacaacagcatccacgccatgcagatgcagctgtacacagctgagaccaacaagaaggactgccagacaggagccaccagcgccaatgcccccaacagcggcagccacaagagccactgcacaggagagaagacccacaagtgcccagaatgtggccgggccttcttctaccagagcttcctgatgaggcacatgaagatccacactggagagaagccctatgaatgtgggaaatgtgggaaggccttccgctacagcctgcacctgaacaagcacctgaggaagcacgtggtgcagaagaagccctatgaatgtgaagaatgtgggaaggtgatccgggagagcagcaagtacacccacatccgcagccacactggagagaagccctacaagtgcaagacctgtgggaaggactttgccaagagcagcggcctgaagaagcacctgaagacccacaaggatgagaagccctgtgagtag

SEQ ID NO: 176455 - DNA, 1254 bp, synthetic construct; identical to SEQ ID NO: 176454
  misc_feature 1..1254: note = Description of Artificial Sequence: Synthetic coding sequence
  source 1..1254: mol_type = other DNA

SEQ ID NO: 176456 - DNA, 1452 bp, synthetic construct
  misc_feature 1..1452: note = Description of Artificial Sequence: Synthetic coding sequence
  source 1..1452: mol_type = other DNA
atgaagagacatgagatggtggccaagcacctggtgatgttctactactttgcccagcacctgtggccagagcagaacatccgggacagcttccagaaggtgaccctgcggcgctacagaaaatgtggctatgagaacctgcagctgaggaagggctgcaagtctgtggtggagtgcaagcagcacaagggggactacagcggcctgaaccagtgcctgaagaccaccctgagcaagatcttccagtgcaacaagtatgtggaggtgttccacaagatcagcaacagcaacagacacaagatgaggcacacagagaacaagcacttcaagtgcaaggaatgtaggaagaccttctgcatgctgagccacctgacccagcacaagaggatccagaccagggtgaacttctacaagtgtgaggcctacggccgggccttcaactggagcagcaccctgaacaagcacaagaggatccacactggagagaagccctacaagtgcaaggaatgtgggaaggccttcaaccagaccagccacctgatccgccacaagaggatccacacagaggagaagccctacaagtgtgaagaatgtgggaaggccttcaaccagagcagcaccctgaccacccacaacatcatccacactggagagatcccctacaagtgtgagaagtgtgtgcgggccttcaaccaggccagcaagctgacagagcacaagctgatccacactggagagaagagatatgaatgtgaagaatgtgggaaggccttcaacagaagcagcaagctgacagagcacaagtacatccacactggagagaagctgtacaagtgtgaagaatgtgggaaggccttcaaccagagcagcaccctgaccacccacaagaggatccacagcggggagaagccctacaagtgtgaagaatgtgggaaggccttcaagcagttcagcaacctgacagaccacaagaagatccacactggagagaagccctacaagtgtgaagaatgtgggaaggccttcaaccagctgagcaacctgaccaggcacaaggtgatccacactggagagaagccctacaagtgtggagaatgtgggaaggccttcaaccagagcagcgccctgaacacccacaagatcatccacactggagagaacccccacaagtgccgggagagcggcaaggtgttccacctgagcagcaagctgagcacctgcaagaagatccacactggagagaagctgtacaagtgtgaagaatgtgggaaggccttcaacagaagcagcaccctgattggccacaagaggatccacactggagagaagccctacaagtgtgaagaatgtgggaaggccttcaaccagagcagcaccctgaccacccacaagatcatccacacagaggagaagcagtacaagtgtgatgaatgtgggaaggccagcacctag

SEQ ID NO: 176457 - DNA, 1152 bp, synthetic construct
  misc_feature 1..1152: note = Description of Artificial Sequence: Synthetic coding sequence
  source 1..1152: mol_type = other DNA
atgaagagacatgagatggtggccaagcacctggtgatgttctactactttgcccagcacctgtggccagagcagaacatccgggacagcttccagaaggtgaccctgcggcgctacagaaaatgtggctatgagaacctgcagctgaggaagggctgcaagtctgtggtggagtgcaagcagcacaagggggactacagcggcctgaaccagtgcctgaagaccaccctgagcaagatcttccagtgcaacaagtatgtggaggtgttccacaagatcagcaacagcaacagacacaagatgaggcacacagagaacaagcacttcaagtgcaaggaatgtaggaagaccttctgcatgctgagccacctgacccagcacaagaggatccagaccagggtgaacttctacaagtgtgaggcctacggccgggccttcaactggagcagcaccctgaacaagcacaagaggatccacactggagagaagccctacaagtgcaaggaatgtgggaaggccttcaaccagaccagccacctgatccgccacaagaggatccacacagaggagaagccctacaagtgtgaagaatgtgggaaggccttcaaccagagcagcaccctgaccacccacaacatcatccacactggagagatcccctacaagtgtgagaagtgtgtgcgggccttcaaccaggccagcaagctgacagagcacaagctgatccacactggagagaagagatatgaatgtgaagaatgtgggaaggccttcaacagaagcagcaagctgacagagcacaagtacatccacactggagagaagctgtacaagtgtgaagaatgtgggaaggccttcaaccagagcagcaccctgaccacccacaagaggatccacagcggggagaagccctacaagtgtgaagaatgtgggaaggccttcaagcagttcagcaacctgacagaccacaagaagatccacactggagagaagccctacaagtgtgaagaatgtgggaaggccttcaaccagctgagcaacctgaccaggcacaaggtgatccacactggagagaagccctacaagtgtggagaatgtgggaaggccaacctgagcagcaccctgaccccccacaagaccatccacatctag

SEQ ID NO: 176458 - DNA, 1368 bp, synthetic construct
  misc_feature 1..1368: note = Description of Artificial Sequence: Synthetic coding sequence
  source 1..1368: mol_type = other DNA
atgctggagaactacagcaacctggtgtctgtgggctaccacatcatcaagccagatgtgatcagcaagctggagcagggcgaggagccctggatcgtggagggggagttcctgctgcagagctacccagatgaggtgtggcagacagatgacctgattgagcgcatccaggaggaggagaacaagcccagccggcagacagtgttcatcgagaccctcatcgaggagagaggaaatgtgcctgggaagacctttgatgtggagaccaaccctgtgcccagcaggaagatcgcctacaagaacagcctgtgtgacagctgtgagaagtgcctgacctctgtgtctgagtacatcagcagtgatggcagctatgccaggatgaaggcagatgaatgttctggctgcggcaagagcctgctgcacatcaagctggagaagacccaccctggggaccaggcctatgagttcaaccagaatggagagccctacaccctgaatgaggagagcctgtaccagaagatccgcatcctggagaagccctttgagtacatcgagtgccagaaggccttccagaaggacacagtgtttgtgaaccacatggaggagaagccctacaagtggaatggcagcgagatcgccttcctgcagatgtctgacctgactgtgcaccagaccagccacatggagatgaagccctatgagtgcagtgaatgtgggaagagcttctgcaagaagagcaagttcatcatccaccagaggacccacactggagagaagccctatgagtgcaaccagtgtgggaagagcttctgccagaagggcaccctgactgtgcaccagaggacccacactggagagaagccctatgagtgcaatgaatgtgggaagaacttctaccagaagctgcacctgatccagcaccagaggacccacagcggggagaagccctatgagtgcagctactgtgggaagagcttctgccagaagacccacctgacccagcaccagaggacccacagcggggagcggccctacgtgtgccacgactgtggccccagccgccgcagccagcacctgatgcaccagaagatccacactggagtgaagctgtacaagtgcagtgaatgtgggaagtgcttctgcaggaagagcaccctgaccacccacctgcggacccacactggagagaagccctatgagtgcaatgaatgtgggaagttcttcagccggctgagctacctgactgtgcactaccgcacccacagcggggagaagccctatgagtgcaatgaatgtgggaagaccttctacctgaacagcgccctgatgaggcaccagagggtgcacactggagagaagccctactag

SEQ ID NO: 176459 - DNA, 1980 bp, synthetic construct
  misc_feature 1..1980: note = Description of Artificial Sequence: Synthetic coding sequence
  source 1..1980: mol_type = other DNA
atgaacaagagcctgggccctgtgtccttcaaggatgtggccgtggacttcacccaggaggagtggcagcagctggaccctgagcagaagatcacctacagagatgtgatgctggagaactacagcaacctggtgtctgtgggctaccacatcatcaagccagatgtgatcagcaagctggagcagggcgaggagccctggatcgtggagggggagttcctgctgcagagctacccagatgaggtgtggcagacagatgacctgattgagcgcatccaggaggaggagaacaagcccagccggcagacagtgttcatcgagaccctcatcgaggagcgggagtacatcagcagtgatggcagctatgccaggatgaaggcagatgaatgttctggctgcggcaagagcctgctgcacatcaagctggagaagacccaccctggggaccaggcctatgagttcaaccagaatggagagccctacaccctgaatgaggagagcctgtaccagaagatccgcatcctggagaagccctttgagtacatcgagtgccagaaggccttccagaaggacacagtgtttgtgaaccacatggaggagaagccctacaagtggaatggcagcgagatcgccttcctgcagatgtctgacctgactgtgcaccagaccagccacatggagatgaagccctatgagtgcagtgaatgtgggaagagcttctgcaagaagagcaagttcatcatccaccagaggacccacactggagagaagccctatgagtgcaaccagtgtgggaagagcttctgccagaagggcaccctgactgtgcaccagaggacccacactggagagaagccctatgagtgcaatgaatgtgggaagaacttctaccagaagctgcacctgatccagcaccagaggacccacagcggggagaagccctatgagtgcagctactgtgggaagagcttctgccagaagacccacctgacccagcaccagaggacccacagcggggagcggccctacgtgtgccacgactgtgggaagaccttcagccagaagagcgccctgaatgaccaccagaagatccacactggagtgaagctgtacaagtgcagtgaatgtgggaagtgcttctgcaggaagagcaccctgaccacccacctgcggacccacactggagagaagccctatgagtgcaatgaatgtgggaagttcttcagccggctgagctacctgactgtgcactaccgcacccacagcggggagaagccctatgagtgcaatgaatgtgggaagaccttctacctgaacagcgccctgatgaggcaccagagggtgcacactggagagaagccctatgagtgcaatgaatgtgggaagctgttcagccagctgagctacctgaccatccaccacaggacccacagcggcgtgaagccctatgagtgcagtgaatgtgggaagaccttctaccagaacagcgccctgtgccgccaccggcgcatccacaagggggagaagccctatgagtgctacatctgtgggaagttcttcagccagatgagctacctgaccatccaccaccgcatccacagcggggagaagccctatgagtgcagtgaatgtgggaagaccttctgccagaacagcgccctgaacagacaccagaggacccacactggagagaaggcctatgagtgctatgaatgtgggaagtgcttcagccagatgagctacctgaccatccaccaccgcatccacagcggggagaagccctttgagtgcaatgaatgtgggaaggccttcagcaggatgagctacctgactgtgcactaccgcacccacagcggggagaagccctatgagtgcacagaatgtgggaagaagttctaccacaagagcgccttcaacagccaccagaggatccaccggcggggcaacatgaatgtgattgatgtgggccgcctgctgtag

SEQ ID NO: 176460 - DNA, 2268 bp, synthetic construct
  misc_feature 1..2268: note = Description of Artificial Sequence: Synthetic coding sequence
  source 1..2268: mol_type = other DNA
atgagggccacagccctggtgcgctggacaggccgggacctggccagcagaagagccccagccacagccatcccccccaggcctgtgggcagcggcggcgctgaggccgctgagccccaggaggacctgccccccctgagccagagcagccgcttcttccaggagcagcagaagatgaacaagagcctgggccctgtgtccttcaaggatgtggccgtggacttcacccaggaggagtggcagcagctggaccctgagcagaagatcacctacagagatgtgatgctggagaactacagcaacctggtgtctgtgggctaccacatcatcaagccagatgtgatcagcaagctggagcagggcgaggagccctggatcgtggagggggagttcctgctgcagagctacccagatgaggtgtggcagacagatgacctgattgagcgcatccaggaggaggagaacaagcccagccggcagacagtgttcatcgagaccctcatcgaggagagaggaaatgtgcctgggaagacctttgatgtggagaccaaccctgtgcccagcaggaagatcgcctacaagaacagcctgtgtgacagctgtgagaagtgcctgacctctgtgtctgagtacatcagcagtgatggcagctatgccaggatgaaggcagatgaatgttctggctgcggcaagagcctgctgcacatcaagctggagaagacccaccctggggaccaggcctatgagttcaaccagaatggagagccctacaccctgaatgaggagagcctgtaccagaagatccgcatcctggagaagccctttgagtacatcgagtgccagaaggccttccagaaggacacagtgtttgtgaaccacatggaggagaagccctacaagtggaatggcagcgagatcgccttcctgcagatgtctgacctgactgtgcaccagaccagccacatggagatgaagccctatgagtgcagtgaatgtgggaagagcttctgcaagaagagcaagttcatcatccaccagaggacccacactggagagaagccctatgagtgcaaccagtgtgggaagagcttctgccagaagggcaccctgactgtgcaccagaggacccacactggagagaagccctatgagtgcaatgaatgtgggaagaacttctaccagaagctgcacctgatccagcaccagaggacccacagcggggagaagccctatgagtgcagctactgtgggaagagcttctgccagaagacccacctgacccagcaccagaggacccacagcggggagcggccctacgtgtgccacgactgtgggaagaccttcagccagaagagcgccctgaatgaccaccagaagatccacactggagtgaagctgtacaagtgcagtgaatgtgggaagtgcttctgcaggaagagcaccctgaccacccacctgcggacccacactggagagaagccctatgagtgcaatgaatgtgggaagttcttcagccggctgagctacctgactgtgcactaccgcacccacagcggggagaagccctatgagtgcaatgaatgtgggaagaccttctacctgaacagcgccctgatgaggcaccagagggtgcacactggagagaagccctatgagtgcaatgaatgtgggaagctgttcagccagctgagctacctgaccatccaccacaggacccacagcggcgtgaagccctatgagtgcagtgaatgtgggaagaccttctaccagaacagcgccctgtgccgccaccggcgcatccacaagggggagaagccctatgagtgctacatctgtgggaagttcttcagccagatgagctacctgaccatccaccaccgcatccacagcggggagaagccctatgagtgcagtgaatgtgggaagaccttctgccagaacagcgccctgaacagacaccagaggacccacactggagagaaggcctatgagtgctatgaatgtgggaagtgcttcagccagatgagctacctgaccatccaccaccgcatccacagcggggagaagccctttgagtgcaatgaatgtgggaaggccttcagcaggatgagctacctgactgtgcactaccgcacccacagcggggagaagccctatgagtgcacagaatgtgggaagaagttctaccacaagagcgccttcaacagccaccagaggatccaccggcggggcaacatgaatgtgattgatgtgggccgcctgctgtag

SEQ ID NO: 176461 - DNA, 2094 bp, synthetic construct
  misc_feature 1..2094: note = Description of Artificial Sequence: Synthetic coding sequence
  source 1..2094: mol_type = other DNA
atgaacaagagcctgggccctgtgtccttcaaggatgtggccgtggacttcacccaggaggagtggcagcagctggaccctgagcagaagatcacctacagagatgtgatgctggagaactacagcaacctggtgtctgtgggctaccacatcatcaagccagatgtgatcagcaagctggagcagggcgaggagccctggatcgtggagggggagttcctgctgcagagctacccagatgaggtgtggcagacagatgacctgattgagcgcatccaggaggaggagaacaagcccagccggcagacagtgttcatcgagaccctcatcgaggagagaggaaatgtgcctgggaagacctttgatgtggagaccaaccctgtgcccagcaggaagatcgcctacaagaacagcctgtgtgacagctgtgagaagtgcctgacctctgtgtctgagtacatcagcagtgatggcagctatgccaggatgaaggcagatgaatgttctggctgcggcaagagcctgctgcacatcaagctggagaagacccaccctggggaccaggcctatgagttcaaccagaatggagagccctacaccctgaatgaggagagcctgtaccagaagatccgcatcctggagaagccctttgagtacatcgagtgccagaaggccttccagaaggacacagtgtttgtgaaccacatggaggagaagccctacaagtggaatggcagcgagatcgccttcctgcagatgtctgacctgactgtgcaccagaccagccacatggagatgaagccctatgagtgcagtgaatgtgggaagagcttctgcaagaagagcaagttcatcatccaccagaggacccacactggagagaagccctatgagtgcaaccagtgtgggaagagcttctgccagaagggcaccctgactgtgcaccagaggacccacactggagagaagccctatgagtgcaatgaatgtgggaagaacttctaccagaagctgcacctgatccagcaccagaggacccacagcggggagaagccctatgagtgcagctactgtgggaagagcttctgccagaagacccacctgacccagcaccagaggacccacagcggggagcggccctacgtgtgccacgactgtgggaagaccttcagccagaagagcgccctgaatgaccaccagaagatccacactggagtgaagctgtacaagtgcagtgaatgtgggaagtgcttctgcaggaagagcaccctgaccacccacctgcggacccacactggagagaagccctatgagtgcaatgaatgtgggaagttcttcagccggctgagctacctgactgtgcactaccgcacccacagcggggagaagccctatgagtgcaatgaatgtgggaagaccttctacctgaacagcgccctgatgaggcaccagagggtgcacactggagagaagccctatgagtgcaatgaatgtgggaagctgttcagccagctgagctacctgaccatccaccacaggacccacagcggcgtgaagccctatgagtgcagtgaatgtgggaagaccttctaccagaacagcgccctgtgccgccaccggcgcatccacaagggggagaagccctatgagtgctacatctgtgggaagttcttcagccagatgagctacctgaccatccaccaccgcatccacagcggggagaagccctatgagtgcagtgaatgtgggaagaccttctgccagaacagcgccctgaacagacaccagaggacccacactggagagaaggcctatgagtgctatgaatgtgggaagtgcttcagccagatgagctacctgaccatccaccaccgcatccacagcggggagaagccctttgagtgcaatgaatgtgggaaggccttcagcaggatgagctacctgactgtgcactaccgcacccacagcggggagaagccctatgagtgcacagaatgtgggaagaagttctaccacaagagcgccttcaacagccaccagaggatccaccggcggggcaacatgaatgtgattgatgtgggccgcctgctgtag

SEQ ID NO: 176462 - DNA, 1173 bp, synthetic construct
  misc_feature 1..1173: note = Description of Artificial Sequence: Synthetic coding sequence
  source 1..1173: mol_type = other DNA
atggccgagatccacaacggcggggagctgtgtgacttcatggagaatggagagatcttcagcgagcacagctgcctgaatgcccacatgggcacagaaaatactggagacacctatgactgtgatgaatatggagagaacttccccatgctgcacaacagcgccccagctggggagaccctgtctgtgctgaaccagtgcaggaaggccttcagcctgccccccaacgtgcaccagaggacctggattggagacaagagctttgagtacagcgactgtgaggaggcctttgtggaccagagccacctgcaggccaaccgcatcacccacaatggagagaccctgtatgagcagaagcagtgtggccgggccttcacctacagcaccagccatgctgtgtctgtgaagatgcacacagtggagaagccctatgagtgcaaggaatgtgggaagttcttccgctacagcagctacctgaacagccacatgaggacccacactggagagaagccctatgagtgcaaggaatgtgggaagtgcttcaccgtgagcagccacctggtggagcacgtgcgcatccacactggagagaagccctaccagtgcaaggaatgtggccgggcctttgctggccgcagcggcctgaccaagcacgtgcgcatccacactggagagaagccctatgaatgtaatgaatgtgggaaggcctacaaccgcttctacctgctgacagagcacttcaagacccacacagaggagaagccctttgagtgcaaggtgtgtgggaagagcttccgcagcagcagctgcctgaagaaccacttccgcatccacacaggcatcaagccctacaagtgcaaggaatgtgggaaggccttcaccgtgagcagcagcctgcacaaccacgtgaagatccacactggagagaagccctatgagtgcaaggactgtgggaaggcctttgccaccagcagccagctgattgagcacatccgcacccacactggagagaagccctacatctgcaaggaatgtgggaagaccttccgggccagcagccacctgcagaagcacgtgcgcatccacactggagagaagccctacatctgcaatgaatgtgggaaggcctacaaccgcttctacctgctgaccaagcacctgaagacccactag

SEQ ID NO: 176463 - DNA, 1032 bp, synthetic construct
  misc_feature 1..1032: note = Description of Artificial Sequence: Synthetic coding sequence
  source 1..1032: mol_type = other DNA
atggccgagatccacaacggcggggagctgtgtgacttcatggagaatggagagatcttcagcgagcacagctgcctgaatgcccacatgggcacagaaaatactggagacacctatgactgtgatgaatatggagagaacttccccatgctgcacaacagcgccccagctggggagaccctgtctgtgctgaaccagtgcaggaaggccttcagcctgccccccaacgtgcaccagaggacctggattggagacaagagctttgagtacagcgactgtgaggaggcctttgtggaccagagccacctgcaggccaaccgcatcacccacaatggagagaccctgtatgagcagaagcagtgtggccgggccttcacctacagcaccagccatgctgtgtctgtgaagatgcacacagtggagaagccctatgagtgcaaggaatgtgggaagttcttccgctacagcagctacctgaacagccacatgaggacccacactggagagaagccctatgagtgcaaggaatgtgggaagtgcttcaccgtgagcagccacctggtggagcacgtgcgcatccacactggagagaagccctaccagtgcaaggaatgtggccgggcctttgctggccgcagcggcctgaccaagcacgtgcgcatccacactggagagaagccctatgaatgtaatgaatgtgggaaggcctacaaccgcttctacctgctgacagagcacttcaagacccacacagaggagaagccctttgagtgcaaggtgtgtgggaagagcttccgcagcagcagctgcctgaagaaccacttccgcatccacacaggcatcaagccctacaagtgcaaggaatgtgggaaggccttcaccgtgagcagcagcctgcacaaccacgtgaagatccacactggagagaagccctatgagtgcaaggactgtgggaaggcctttgccaccagcagccagctgattgagcacatccgcacccacacctgcaaccccagcaccctgcggggctag

SEQ ID NO: 176464 - DNA, 870 bp, synthetic construct
  misc_feature 1..870: note = Description of Artificial Sequence: Synthetic coding sequence
  source 1..870: mol_type = other DNA
atgagcggccaccctggctcctgggagatgaacagcgtggcctttgaagatgtggccgtgaacttcacccaggaggagtgggccctgctggaccccagccagaagaacctgtacagagatgtgatgcaggagaccttcaggaacctggccagcatcggcaacaagggggaggaccagagcattgaggaccagtacaagaacagcagcaggaacctgagcagcttccagatccaccagaggaaccacactggagagaagccctatgagtgcatggagtgtgggaaggccctgggcttcagccgcagcctgaacagacacaagaggatccacactggagagaagagatatgagtgcaagcagtgtgggaaggccttcagccgcagcagccacctgcgggaccacgagaggacccacactggagagaagccctatgagtgcaagcactgcggcaaggccttccgctacagcaactgcctgcactaccacgagaggacccacactggagagaagccctacgtgtgcatggagtgtgggaaggccttcagctgcctgagcagcctgcagggccacatcaaggcccatgctggggaggagccctacccctgcaagcagtgtgggaaggccttccgctatgccagcagcctgcagaagcatgagaagacccacatcgcccagaagccctacgtgtgcaacaactgtgggaagggcttccgctgcagcagcagcctgcgggaccacgagaggacccacactggagagaagccctatgagtgccagaagtgtgggaaggccttcagccgggccagcaccctgtggaagcacaagaagacccacactggagagaagccctacaagtgcaagaagatgtag

SEQ ID NO: 176465 - DNA, 939 bp, synthetic construct
  misc_feature 1..939: note = Description of Artificial Sequence: Synthetic coding sequence
  source 1..939: mol_type = other DNA
atgcccaacttcaacctgaacaagaagatcccagcccgggtgaagccccatgagtgcatcgtgtgtgagaagttcttcatccgccacagcagcctgcaccgccacatcatcagccacagcggcaacaacccctacggctgtgaagaatgtgggaagaagccctgcacctgcaagcagtgccagaagaccagcctgtctgtgaccagggtgcaccgggacacagtgatgcacactggaaatggccactacggctgcaccatctgtgagaaggtgttcaacatccccagcagcttccagatccaccagaggaaccacactggagagaagccctatgagtgcatggagtgtgggaaggccctgggcttcagccgcagcctgaacagacacaagaggatccacactggagagaagagatatgagtgcaagcagtgtgggaaggccttcagccgcagcagccacctgcgggaccacgagaggacccacactggagagaagccctatgagtgcaagcactgtgggaaggccttccgctacagcaactgcctgcactaccacgagaggacccacactggagagaagccctacgtgtgcatggagtgtgggaaggccttcagctgcctgagcagcctgcagggccacatcaaggcccacgccggggaggagccctacccctgcaagcagtgtgggaaggccttccgctatgccagcagcctgcagaagcatgagaagacccacatcgcccagaagccctacgtgtgcaacaactgtgggaagggcttccgctgcagcagcagcctgcgggaccacgagaggacccacactggagagaagccctatgagtgccagaagtgtgggaaggccttcagccgggccagcaccctgtggaagcacaagaagacccacactggagagaagccctacaagtgcaagaagatgtag

SEQ ID NO: 176466 - DNA, 468 bp, synthetic construct
  misc_feature 1..468: note = Description of Artificial Sequence: Synthetic coding sequence
  source 1..468: mol_type = other DNA
atgaatgccctgtgtgtgaagaacagcagctaccacagcagcctgcaccgccacatcatcagccacagcggcaacaacccctacggctgtgaggagtgtgggaagaagccctgcacctgcaagcagtgccagaagaccagcctgtctgtgaccagggtgcaccgggacacagtgatgcacactggaaatggccactacggctgcaccatctgtgagaaggtgttcaacatccccagcagcttccagatccaccagaggaaccacactggagagaagccctatgagtgcatggagtgtgggaaggccctgggcttcagccgcagcctgaacagacacaagaggatccacactggagagaagagatatgagtgcaagaagtgtgggaaggccttcagccgggccagcaccctgtggaagcacaagaagacccacactggagagaagccctacaagtgcaagaagatgtag

SEQ ID NO: 176467 - DNA, 888 bp, synthetic construct
  misc_feature 1..888: note = Description of Artificial Sequence: Synthetic coding sequence
  source 1..888: mol_type = other DNA
atgaatgccctgtgtgtgaagaacagcagctaccacagcagcctgcaccgccacatcatcagccacagcggcaacaacccctacggctgtgaggagtgtgggaagaagccctgcacctgcaagcagtgccagaagaccagcctgtctgtgaccagggtgcaccgggacacagtgatgcacactggaaatggccactacggctgcaccatctgtgagaaggtgttcaacatccccagcagcttccagatccaccagaggaaccacactggagagaagccctatgagtgcatggagtgtgggaaggccctgggcttcagccgcagcctgaacagacacaagaggatccacactggagagaagagatatgagtgcaagcagtgtgggaaggccttcagccgcagcagccacctgcgggaccacgagaggacccacactggagagaagccctatgagtgcaagcactgcggcaaggccttccgctacagcaactgcctgcactaccacgagaggacccacactggagagaagccctacgtgtgcatggagtgtgggaaggccttcagctgcctgagcagcctgcagggccacatcaaggcccatgctggggaggagccctacccctgcaagcagtgtgggaaggccttccgctatgccagcagcctgcagaagcatgagaagacccacatcgcccagaagccctacgtgtgcaacaactgtgggaagggcttccgctgcagcagcagcctgcgggaccacgagaggacccacactggagagaagccctatgagtgccagaagtgtgggaaggccttcagccgggccagcaccctgtggaagcacaagaagacccacactggagagaagccctacaagtgcaagaagatgtag

SEQ ID NO: 176468 - DNA, 222 bp, synthetic construct
  misc_feature 1..222: note = Description of Artificial Sequence: Synthetic coding sequence
  source 1..222: mol_type = other DNA
atgagcggccaccctggctcctgggagatgaacagcgtggcctttgaagatgtggccgtgaacttcacccaggaggagtgggccctgctggaccccagccagaagaacctgtacagagatgtgatgcaggagaccttcaggaacctggccagcatcggcaacaagggggaggaccagagcattgaggaccagtacaagaacagcagcaggaacctgaggtag

SEQ ID NO: 176469 - DNA, 1770 bp, synthetic construct
  misc_feature 1..1770: note = Description of Artificial Sequence: Synthetic coding sequence
  source 1..1770: mol_type = other DNA
atggaggccgaggagaccatggagtgcctgcaggagttccctgagcaccacaagatgatcctggaccggctgaatgagcagcgggagcaggaccgcttcacagacatcaccctgattgtggatggccaccacttcaaggcccacaaggctgtgctggccgcctgcagcaagttcttctacaagttcttccaggagttcacccaggagcccctggtggagattgagggcgtgtccaagatggccttccgccacctgattgagttcacctacacagccaagctgatgatccagggcgaggaggaggccaatgatgtgtggaaggctgctgagttcctgcagatgctggaggccatcaaggccctggaggtgaggaacaaggaaaattctgcccccctggaggagaacaccaccgggaagaatgaggccaagaagaggaagattgctgagaccagcaatgtcatcacagagagcctgcccagcgctgagagcgagcctgtggagattgaggtggagattgctgagggcaccatcgaggtggaggatgagggcatcgagaccctggaggaggtggccagcgccaagcagagcgtgaagtacatccagagcacaggcagcagtgatgattctgccctggccctgctggccgacatcaccagcaagtaccggcagggcgacaggaagggccagatcaaggaggatggctgccccagcgaccccaccagcaagcaggagcacatgaagagccacagcacagagagcttcaagtgtgagatctgcaacaagcgctacctgcgggagagcgcctggaagcagcacctgaactgctaccacctggaggagggcggcgtgtccaagaagcagaggacaggcaagaagatccacgtgtgccagtactgtgagaagcagtttgaccacttcggccacttcaaggagcacctgaggaagcacactggagagaagccctttgaatgtcccaactgccacgagagatttgccaggaacagcaccctgaagtgccacctgacagcctgccagacaggagtgggcgccaagaagggcaggaagaagctgtatgagtgccaggtgtgcaacagcgtcttcaacagctgggaccagttcaaggaccacctggtgatccacactggagacaagcccaaccactgcaccctgtgtgacctgtggttcatgcagggcaatgagctgcggcggcacctgagtgatgcccacaacatcagcgagcggctggtgacagaggaggtgctgtctgtggagaccagggtgcagacagagcctgtgacctccatgaccatcatcgagcaggtgggcaaggtgcacgtgctgcccctgctgcaggtgcaggtggacagcgcccaggtgacagtggagcaggtgcacccagacctgctgcaggacagccaggtgcatgacagccacatgtctgagctgcctgagcaggtgcaggtgtcctacctggaggtgggccgcatccagacagaggagggcacagaggtgcacgtggaggagctgcacgtggagcgggtgaaccagatgcctgtggaggtgcagacagagctgctggaggccgacctggaccacgtgaccccagagatcatgaaccaggaggagcgggagagcagccaggctgatgctgctgaggccgcccgggaggaccatgaagatgctgaggacctggagaccaagcccaccgtggacagcgaggccgagaaggccgagaatgaagatagaacagccctgcctgtgctggagtag

SEQ ID NO: 176470 - DNA, 1872 bp, synthetic construct
  misc_feature 1..1872: note = Description of Artificial Sequence: Synthetic coding sequence
  source 1..1872: mol_type = other DNA
atggaggccgaggagaccatggagtgcctgcaggagttccctgagcaccacaagatgatcctggaccggctgaatgagcagcgggagcaggaccgcttcacagacatcaccctgattgtggatggccaccacttcaaggcccacaaggctgtgctggccgcctgcagcaagttcttctacaagttcttccaggagttcacccaggagcccctggtggagattgagggcgtgtccaagatggccttccgccacctgattgagttcacctacacagccaagctgatgatccagggcgaggaggaggccaatgatgtgtggaaggctgctgagttcctgcagatgctggaggccatcaaggccctggaggtgaggaacaaggaaaattctgcccccctggaggagaacaccaccgggaagaatgaggccaagaagaggaagattgctgagaccagcaatgtcatcacagagagcctgcccagcgctgagagcgagcctgtggagattgaggtggagattgctgagggcaccatcgaggtggaggatgagggcatcgagaccctggaggaggtggccagcgccaagcagagcgtgaagtacatccagagcacaggcagcagtgatgattctgccctggccctgctggccgacatcaccagcaagtaccggcagggcgacaggaagggccagatcaaggaggatggctgccccagcgaccccaccagcaagcaggtggagggcattgaaattgtggagctgcagctgagccacgtgaaggacctcttccactgtgagaagtgcaacagaagcttcaagctgttctaccacttcaaggagcacatgaagagccacagcacagagagcttcaagtgtgagatctgcaacaagcgctacctgcgggagagcgcctggaagcagcacctgaactgctaccacctggaggagggcggcgtgtccaagaagcagaggacaggcaagaagatccacgtgtgccagtactgtgagaagcagtttgaccacttcggccacttcaaggagcacctgaggaagcacactggagagaagccctttgaatgtcccaactgccacgagagatttgccaggaacagcaccctgaagtgccacctgacagcctgccagacaggagtgggcgccaagaagggcaggaagaagctgtatgagtgccaggtgtgcaacagcgtcttcaacagctgggaccagttcaaggaccacctggtgatccacactggagacaagcccaaccactgcaccctgtgtgacctgtggttcatgcagggcaatgagctgcggcggcacctgagtgatgcccacaacatcagcgagcggctggtgacagaggaggtgctgtctgtggagaccagggtgcagacagagcctgtgacctccatgaccatcatcgagcaggtgggcaaggtgcacgtgctgcccctgctgcaggtgcaggtggacagcgcccaggtgacagtggagcaggtgcacccagacctgctgcaggacagccaggtgcatgacagccacatgtctgagctgcctgagcaggtgcaggtgtcctacctggaggtgggccgcatccagacagaggagggcacagaggtgcacgtggaggagctgcacgtggagcgggtgaaccagatgcctgtggaggtgcagacagagctgctggaggccgacctggaccacgtgaccccagagatcatgaaccaggaggagcgggagagcagccaggctgatgctgctgaggccgcccgggaggaccatgaagatgctgaggacctggagaccaagcccaccgtggacagcgaggccgagaaggccgagaatgaagatagaacagccctgcctgtgctggagtag

SEQ ID NO: 176471 - DNA, 1770 bp, synthetic construct; identical to SEQ ID NO: 176469
  misc_feature 1..1770: note = Description of Artificial Sequence: Synthetic coding sequence
  source 1..1770: mol_type = other DNA

SEQ ID NO: 176472 - DNA, 456 bp, synthetic construct
  misc_feature 1..456: note = Description of Artificial Sequence: Synthetic coding sequence
  source 1..456: mol_type = other DNA
atggaggccgaggagaccatggagtgcctgcaggagttccctgagcaccacaagatgatcctggaccggctgaatgagcagcgggagcaggaccgcttcacagacatcaccctgattgtggatggccaccacttcaaggcccacaaggctgtgctggccgcctgcagcaagttcttctacaagttcttccaggagttcacccaggagcccctggtggagattgagggcgtgtccaagatggccttccgccacctgattgagttcacctacacagccaagctgatgatccagggcgaggaggaggccaatgatgtgtggaaggctgctgagttcctgcagatgctggaggccatcaaggccctggaggtgaggaacaaggaaaattctgcccccctggaggagaacaccaccgggaagaatgaggccaagaagaggaagattgctgagaccagctag

SEQ ID NO: 176473 - DNA, 1872 bp, synthetic construct; identical to SEQ ID NO: 176470
  misc_feature 1..1872: note = Description of Artificial Sequence: Synthetic coding sequence
  source 1..1872: mol_type = other DNA

SEQ ID NO: 176474 - DNA, 420 bp, synthetic construct
  misc_feature 1..420: note = Description of Artificial Sequence: Synthetic coding sequence
  source 1..420: mol_type = other DNA
atggaggccgaggagaccatggagtgcctgcaggagttccctgagcaccacaagatgatcctggaccggctgaatgagcagcgggagcaggaccgcttcacagacatcaccctgattgtggatggccaccacttcaaggcccacaaggctgtgctggccgcctgcagcaagttcttctacaagttcttccaggagttcacccaggagcccctggtggagattgagggcgtgtccaagatggccttccgccacctgattgagttcacctacacagccaagctgatgatccagggcgaggaggaggccaatgatgtgtggaaggctgctgagttcctgcagatgctggaggccatcaaggccctggaggtgaggaacaaggaaaattctgcccccctggaggagaacaccaccgggaagtag

SEQ ID NO: 176475 - DNA, 1770 bp, synthetic construct; identical to SEQ ID NO: 176469
  misc_feature 1..1770: note = Description of Artificial Sequence: Synthetic coding sequence
  source 1..1770: mol_type = other DNA

SEQ ID NO: 176476 - DNA, 798 bp, synthetic construct
  misc_feature 1..798: note = Description of Artificial Sequence: Synthetic coding sequence
  source 1..798: mol_type = other DNA
atggaggccgaggagaccatggagtgcctgcaggagttccctgagcaccacaagatgatcctggaccggctgaatgagcagcgggagcaggaccgcttcacagacatcaccctgattgtggatggccaccacttcaaggcccacaaggctgtgctggccgcctgcagcaagttcttctacaagttcttccaggagttcacccaggagcccctggtggagattgagggcgtgtccaagatggccttccgccacctgattgagttcacctacacagccaagctgatgatccagggcgaggaggaggccaatgatgtgtggaaggctgctgagttcctgcagatgctggaggccatcaaggccctggaggtgaggaacaaggaaaattctgcccccctggaggagaacaccaccgggaagaatgaggccaagaagaggaagattgctgagaccagcaatgtcatcacagagagcctgcccagcgctgagagcgagcctgtggagattgaggtggagattgctgagggcaccatcgaggtggaggatgagggcatcgagaccctggaggaggtggccagcgccaagcagagcgtgaagtacatccagagcacaggcagcagtgatgattctgccctggccctgctggccgacatcaccagcaagtaccggcagggcgacaggaagggccagatcaaggaggatggctgccccagcgaccccaccagcaagcaggagcacatgaagagccacagcacagagagcttcaagtgtgagatctgcaacaagcgctacctgaggtag

SEQ ID NO: 176477 - DNA, 2121 bp, synthetic construct
  misc_feature 1..2121: note = Description of Artificial Sequence: Synthetic coding sequence
  source 1..2121: mol_type = other DNA
atggccctgcccagcccccaggtgctgatgggcctgcctgccctgctgatgggccctgcccagcacacctcctggccctgtggcagcgctgtgcccaccctgaagtccatggtgacctttgaagatgtggccgtgtacttcagccaggaggagtgggagctgctggatgctgcccagaggcacctgtaccacagcgtgatgctggagaacctggagctggtgaccagcctgggctcctggcatggagtggagggggagggcgcccaccccaagcagaatgtgtctgtggaggtgctgcaggtgcgcatccccaatgctgaccccagcaccaagaaggccaacagctgtgacatgtgtggccccttcctgaaggacatcctgcacctggccgagcaccagggcacccagagcgaggagaagccctacacctgtggggcctgtggccgggacttctggctgaatgccaacctgcaccagcaccagaaggagcacagcggcggcaagcccttccgctggtacaaggacagagatgccctgatgaagagcagcaaggtgcacctgtctgagaaccccttcacctgccgggagggcggcaaggtgatcctgggcagctgtgacctgctgcagctgcaggccgtggacagcggccagaagccctacagcaacctgggccagctgcctgaggtgtgcaccacccagaagctgtttgaatgtagcaactgtgggaaggccttcctgaagagcagcaccctgcccaaccacctgcggacccacagcgaggagatccccttcacctgccccaccggcggcaacttcctggaggagaagagcatcctgggcaacaagaagttccacactggagagatcccccacgtgtgcaaggaatgtgggaaggccttcagccacagcagcaagctgaggaagcaccagaagttccacacagaggtgaagtactatgagtgcatcgcctgtgggaagaccttcaaccacaagctgacctttgtgcaccaccagaggatccacagcggggagcggccctatgaatgtgatgaatgtgggaaggccttcagcaacagaagccacctgatcagacatgagaaggtgcacactggagagcggccctttgagtgcctgaagtgtggccgggccttcagccagagcagcaacttcctgcggcaccagaaggtgcacacccaggtgcggccctatgagtgcagccagtgtgggaagagcttcagccgcagcagcgccctgatccagcactggagggtgcacactggagagcggccctatgagtgcagtgaatgtggccgggccttcaacaacaacagcaacctggcccagcaccagaaggtgcacactggagagcggccctttgagtgcagtgaatgtggccgggacttcagccagagcagccacctgctgcggcaccagaaggtgcacactggagagcggccctttgagtgctgtgactgtgggaaggccttcagcaacagcagcaccctcatccagcaccagaaggtgcacacaggccagaggccctatgagtgcagtgaatgtaggaagagcttcagccgcagcagcagcctcatccagcactggaggatccacactggagagaagccctatgagtgcagtgaatgtgggaaggcctttgcccacagcagcaccctgattgagcactggagggtgcacaccaaggagcggccctatgagtgcaatgaatgtgggaagttcttcagccagaacagcatcctgatcaagcaccagaaggtgcacactggagagaagccctacaagtgcagtgaatgtgggaagttcttcagcaggaagagcagcctcatctgccactggagggtgcacactggagagcggccctatgagtgcagtgaatgtggccgggccttcagcagcaacagccacctggtgcgccaccagagggtgcacacccaggagcggccctatgagtgcatccagtgtgggaaggccttcagcgagaggagcaccctggtgcgccaccagaaggtgcacacccgggagaggacctatgagtgcagccagtgtgggaagctgttcagccacctgtgcaacctggcccagcacaagaagatccacacctag

SEQ ID NO: 176478 - DNA, 1191 bp, synthetic construct
  misc_feature 1..1191: note = Description of Artificial Sequence: Synthetic coding sequence
  source 1..1191: mol_type = other DNA
cccaccctgaagtccatggtgacctttgaagatgtggccgtgtacttcagccaggaggagtgggagctgctggatgctgcccagaggcacctgtaccacagcgtgatgctggagaacctggagctggtgaccagcctgggcaatgccctgagccagcacgtgtgcctcttccccatcgagagctctgtgcaccccaaggcccgctcctgggtgctgctgcccagccgggtgtcctgctgccgctgctggggcgctgaggtgctgctgggcgtggagggggagggcgcccaccccaagcagaatgtgtctgtggaggtgctgcagcaccagaaggagcacagcggcggcaagcccttccgctggtacaaggacagcagcggccagaagccctacagcaacctgggccagctgcctgaggtgtgcaccacccagaagctgtttgagtgcagcaactgtgggaaggccttcctgaagagcagcaccctgcccaaccacctgcggacccacagcgaggagatccccttcacctgccccactggaggcaacttcctggaggagaagagcatcctgggcaacaagaagttccacactggagagatcccccacgtgtgcaaggaatgtgggaaggccttcagccacagcagcaagctgaggaagcaccagaagttccacacagaggtgcggccctatgaatgttcccagtgtgggaagagcttcagccgcagcagcgccctgatccagcactggaggatccacactggagagaagccctatgaatgttctgaatgtgggaaggcctttgcccacagcagcaccctcatcgagcactggagggtgcacaccaaggagcggccctatgaatgtaatgaatgtgggaagttcttcagccagaacagcatcctgatcaagcaccagaaggtgcacactggagagaagccctacaagtgcagtgaatgtgggaagttcttcagcaggaagagcagcctcatctgccactggagggtgcacactggagagcggccctatgaatgttctgaatgtggccgggccttcagcagcaacagccacctggtgcgccaccagagggtgcacacccaggagcggccctatgagtgcatccagtgtgggaaggccttcagcgagaggagcaccctggtgcgccaccagaaggtgcacacccgggagaggtag

SEQ ID NO: 176479 - DNA, 1965 bp, synthetic construct
  misc_feature 1..1965: note = Description of Artificial Sequence: Synthetic coding sequence
  source 1..1965: mol_type = other DNA
atggccttcagagatgtggccgtggacttcacccaggatgagtggaggctgctgagccctgcccagaggaccctgtaccgggaggtgatgctggagaactacagcaacctggtgtccctgggcatctccttcagcaagccagagctgatcacccagctggagcagggcaaggagacctggagggaggagaagaagtgcagccctgccacctgcccagctgaccctgagcctgagctgtacctggaccccttctgccccccaggcttcagcagccagaagttccccatgcagcacgtgctgtgcaaccaccccccctggatcttcacctgcctgtgtgccgagggcaacatccagcccggggaccccggccctggggaccaggagaagcagcagcaggccagcgagggccggccctggagcgaccaggccgagggccctgagggggagggcgccatgcccctgtttggaagaaccaagaagaggaccctgggcgccttcagcaggcctccccagaggcagcctgtgagcagcagaaatggcctgcggggcgtggagctggaggccagccctgcccagagcggcaaccctgaggagacagacaagctgctgaagagaattgaggtgctgggctttggaacagtgaactgtggggagtgtggcctgtccttcagcaagatgaccaacctgctgagccaccagaggatccacagcggggagaagccctacgtgtgtggggtgtgtgagaagggcttcagcctgaagaagagcctggcccggcaccagaaggcccacagcggggagaagcccatcgtgtgccgggagtgtggccggggcttcaacaggaagagcaccctcatcatccacgagaggacccacagcggggagaagccctacatgtgcagtgaatgtggccggggcttcagccagaagagcaacctgatcatccaccagaggacccacagcggggagaagccctacgtgtgccgggagtgtgggaagggcttcagccagaagtctgctgtggtgcgccaccagaggacccacctggaggagaagaccatcgtgtgcagcgactgtggcctgggcttcagtgacaggagcaacctgatcagccaccagaggacccacagcggggagaagccctatgcctgcaaggaatgtggccgctgcttccggcagaggaccaccctggtgaaccaccagaggacccacagcaaggagaagccctacgtgtgtggggtgtgtggccacagcttcagccagaacagcaccctcatcagccacaggaggacccacactggagagaagccctacgtgtgtggggtgtgtggccggggcttcagcctgaagagccacctgaacagacaccagaacatccacagcggggagaagcccatcgtgtgcaaggactgtggccggggcttcagccagcagagcaacctgatccgccaccagaggacccacagcggggagaagcccatggtgtgtggggagtgtggccggggcttcagccagaagagcaacctggtggcccaccagaggacccacagcggggagcggccctacgtgtgccgggagtgtggccggggcttcagccaccaggccggcctcatccgccacaagaggaagcacagccgggagaagccctacatgtgccggcagtgtggcctgggctttggaaacaagagcgccctgatcacccacaagagggcccacagcgaggagaagccctgtgtgtgccgggagtgtggccagggcttcctgcagaagagccacctgaccctgcaccagatgacccacactggagagaagccctacgtgtgcaagacctgtggccggggcttcagcctgaagagccacctgagccgccacaggaagaccacctctgtgcaccaccggctgcctgtgcagcctgaccctgagccctgtgccggccagcccagcgacagcctgtacagcctgtag

SEQ ID NO: 176480 - DNA, 300 bp, synthetic construct
  misc_feature 1..300: note = Description of Artificial Sequence: Synthetic coding sequence
  source 1..300: mol_type = other DNA
atggccttcagagatgtggccgtggacttcacccaggatgagtggaggctgctgagccctgcccagaggaccctgtaccgggaggtgatgctggagaactacagcaacctggtgtccctgggcatctccttcagcaagccagagctgatcacccagctggagcagggcaaggagacctggagggaggagaagaagtgcagccctgccacctgcccagaccaccaggagtatggcaacaactgtgacctgcagaaggaggccgaccctgagcctgagctgtacctggaccccttctgctag

SEQ ID NO: 176481 - DNA, 1962 bp, synthetic construct
  misc_feature 1..1962: note = Description of Artificial Sequence: Synthetic coding sequence
  source 1..1962: mol_type = other DNA
atggccttcagagatgtggccgtggacttcacccaggatgagtggaggctgctgagccctgcccagaggaccctgtaccgggaggtgatgctggagaactacagcaacctggtgtccctgggcatctccttcagcaagccagagctgatcacccagctggagcagggcaaggagacctggagggaggagaagaagtgcagccctgccacctgcccagaccctgagcctgagctgtacctggaccccttctgccccccaggcttcagcagccagaagttccccatgcagcacgtgctgtgcaaccaccccccctggatcttcacctgcctgtgtgccgagggcaacatccagcccggggaccccggccctggggaccaggagaagcagcagcaggccagcgagggccggccctggagcgaccaggccgagggccctgagggggagggcgccatgcccctgtttggccgcaccaagaagaggaccctgggcgccttcagccggcccccccagaggcagcctgtgagcagcagaaatggcctgcggggcgtggagctggaggccagccctgcccagagcggcaaccctgaggagacagacaagctgctgaagagaattgaggtgctgggcttcggcaccgtgaactgtggagaatgtggcctgtccttcagcaagatgaccaacctgctgagccaccagaggatccacagcggggagaagccctacgtgtgtggggtgtgtgagaagggcttcagcctgaagaagagcctggcccggcaccagaaggcccacagcggggagaagcccatcgtgtgcagagaatgtggccggggcttcaacaggaagagcaccctcatcatccacgagaggacccacagcggggagaagccctacatgtgcagtgaatgtggccggggcttcagccagaagagcaacctgatcatccaccagaggacccacagcggggagaagccctacgtgtgcagagaatgtgggaagggcttcagccagaagtctgctgtggtgcgccaccagaggacccacctggaggagaagaccatcgtgtgcagcgactgtggcctgggcttcagtgacaggagcaacctgatcagccaccagaggacccacagcggggagaagccctatgcctgcaaggaatgtggccgctgcttccggcagaggaccaccctggtgaaccaccagaggacccacagcaaggagaagccctacgtgtgtggggtgtgtggccacagcttcagccagaacagcaccctcatcagccacaggaggacccacactggagagaagccctacgtgtgtggggtgtgtggccggggcttcagcctgaagagccacctgaacagacaccagaacatccacagcggggagaagcccatcgtgtgcaaggactgtggccggggcttcagccagcagagcaacctgatccgccaccagaggacccacagcggggagaagcccatggtgtgtggagaatgtggccggggcttcagccagaagagcaacctggtggcccaccagaggacccacagcggggagcggccctacgtgtgcagagaatgtggccggggcttcagccaccaggccggcctcatccgccacaagaggaagcacagccgggagaagccctacatgtgccggcagtgtggcctgggcttcggcaacaagagcgccctgatcacccacaagagggcccacagcgaggagaagccctgtgtgtgcagagaatgtggccagggcttcctgcagaagagccacctgaccctgcaccagatgacccacactggagagaagccctacgtgtgcaagacctgtggccggggcttcagcctgaagagccacctgagccgccacaggaagaccacctctgtgcaccaccggctgcctgtgcagcctgaccctgagccctgtgccggccagcccagcgacagcctgtacagcctgtag

SEQ ID NO: 176482 - DNA, 1974 bp, synthetic construct
  misc_feature 1..1974: note = Description of Artificial Sequence: Synthetic coding sequence
  source 1..1974: mol_type = other DNA
atggcccacatggccttcagagatgtggccgtggacttcacccaggatgagtggaggctgctgagccctgcccagaggaccctgtaccgggaggtgatgctggagaactacagcaacctggtgtccctgggcatctccttcagcaagccagagctgatcacccagctggagcagggcaaggagacctggagggaggagaagaagtgcagccctgccacctgcccagctgaccctgagcctgagctgtacctggaccccttctgccccccaggcttcagcagccagaagttccccatgcagcacgtgctgtgcaaccaccccccctggatcttcacctgcctgtgtgccgagggcaacatccagcccggggaccccggccctggggaccaggagaagcagcagcaggccagcgagggccggccctggagcgaccaggccgagggccctgagggggagggcgccatgcccctgtttggccgcaccaagaagaggaccctgggcgccttcagccggcccccccagaggcagcctgtgagcagcagaaatggcctgcggggcgtggagctggaggccagccctgcccagagcggcaaccctgaggagacagacaagctgctgaagagaattgaggtgctgggcttcggcaccgtgaactgtggagaatgtggcctgtccttcagcaagatgaccaacctgctgagccaccagaggatccacagcggggagaagccctacgtgtgtggggtgtgtgagaagggcttcagcctgaagaagagcctggcccggcaccagaaggcccacagcggggagaagcccatcgtgtgcagagaatgtggccggggcttcaacaggaagagcaccctcatcatccacgagaggacccacagcggggagaagccctacatgtgcagtgaatgtggccggggcttcagccagaagagcaacctgatcatccaccagaggacccacagcggggagaagccctacgtgtgcagagaatgtgggaagggcttcagccagaagtctgctgtggtgcgccaccagaggacccacctggaggagaagaccatcgtgtgcagcgactgtggcctgggcttcagtgacaggagcaacctgatcagccaccagaggacccacagcggggagaagccctatgcctgcaaggaatgtggccgctgcttccggcagaggaccaccctggtgaaccaccagaggacccacagcaaggagaagccctacgtgtgtggggtgtgtggccacagcttcagccagaacagcaccctcatcagccacaggaggacccacactggagagaagccctacgtgtgtggggtgtgtggccggggcttcagcctgaagagccacctgaacagacaccagaacatccacagcggggagaagcccatcgtgtgcaaggactgtggccggggcttcagccagcagagcaacctgatccgccaccagaggacccacagcggggagaagcccatggtgtgtggagaatgtggccggggcttcagccagaagagcaacctggtggcccaccagaggacccacagcggggagcggccctacgtgtgcagagaatgtggccggggcttcagccaccaggccggcctcatccgccacaagaggaagcacagccgggagaagccctacatgtgccggcagtgtggcctgggcttcggcaacaagagcgccctgatcacccacaagagggcccacagcgaggagaagccctgtgtgtgcagagaatgtggccagggcttcctgcagaagagccacctgaccctgcaccagatgacccacactggagagaagccctacgtgtgcaagacctgtggccggggcttcagcctgaagagccacctgagccgccacaggaagaccacctctgtgcaccaccggctgcctgtgcagcctgaccctgagccctgtgccggccagcccagcgacagcctgtacagcctgtag

SEQ ID NO: 176483 - DNA, 1965 bp, synthetic construct; identical to SEQ ID NO: 176479
  misc_feature 1..1965: note = Description of Artificial Sequence: Synthetic coding sequence
  source 1..1965: mol_type = other DNA

SEQ ID NO: 176484 - DNA, 1776 bp, synthetic construct
  misc_feature 1..1776: note = Description of Artificial Sequence: Synthetic coding sequence
  source 1..1776: mol_type = other DNA
atgtgcaatggaaggaagacagtgctggccgaccctgagcctgagctgtacctggaccccttctgccccccaggcttcagcagccagaagttccccatgcagcacgtgctgtgcaaccaccccccctggatcttcacctgcctgtgtgccgagggcaacatccagcccggggaccccggccctggggaccaggagaagcagcagcaggccagcgagggccggccctggagcgaccaggccgagggccctgagggggagggcgccatgcccctgtttggccgcaccaagaagaggaccctgggcgccttcagccggcccccccagaggcagcctgtgagcagcagaaatggcctgcggggcgtggagctggaggccagccctgcccagagcggcaaccctgaggagacagacaagctgctgaagagaattgaggtgctgggcttcggcaccgtgaactgtggagaatgtggcctgtccttcagcaagatgaccaacctgctgagccaccagaggatccacagcggggagaagccctacgtgtgtggggtgtgtgagaagggcttcagcctgaagaagagcctggcccggcaccagaaggcccacagcggggagaagcccatcgtgtgcagagaatgtggccggggcttcaacaggaagagcaccctcatcatccacgagaggacccacagcggggagaagccctacatgtgcagtgaatgtggccggggcttcagccagaagagcaacctgatcatccaccagaggacccacagcggggagaagccctacgtgtgcagagaatgtgggaagggcttcagccagaagtctgctgtggtgcgccaccagaggacccacctggaggagaagaccatcgtgtgcagcgactgtggcctgggcttcagtgacaggagcaacctgatcagccaccagaggacccacagcggggagaagccctatgcctgcaaggaatgtggccgctgcttccggcagaggaccaccctggtgaaccaccagaggacccacagcaaggagaagccctacgtgtgtggggtgtgtggccacagcttcagccagaacagcaccctcatcagccacaggaggacccacactggagagaagccctacgtgtgtggggtgtgtggccggggcttcagcctgaagagccacctgaacagacaccagaacatccacagcggggagaagcccatcgtgtgcaaggactgtggccggggcttcagccagcagagcaacctgatccgccaccagaggacccacagcggggagaagcccatggtgtgtggagaatgtggccggggcttcagccagaagagcaacctggtggcccaccagaggacccacagcggggagcggccctacgtgtgcagagaatgtggccggggcttcagccaccaggccggcctcatccgccacaagaggaagcacagccgggagaagccctacatgtgccggcagtgtggcctgggcttcggcaacaagagcgccctgatcacccacaagagggcccacagcgaggagaagccctgtgtgtgcagagaatgtggccagggcttcctgcagaagagccacctgaccctgcaccagatgacccacactggagagaagccctacgtgtgcaagacctgtggccggggcttcagcctgaagagccacctgagccgccacaggaagaccacctctgtgcaccaccggctgcctgtgcagcctgaccctgagccctgtgccggccagcccagcgacagcctgtacagcctgtag

SEQ ID NO: 176485 - DNA, 540 bp, synthetic construct
  misc_feature 1..540: note = Description of Artificial Sequence: Synthetic coding sequence
  source 1..540: mol_type = other DNA
atggccttcagagatgtggccgtggacttcacccaggatgagtggaggctgctgagccctgcccagaggaccctgtaccgggaggtgatgctggagaactacagcaacctggtgtccctgggcatctccttcagcaagccagagctgatcacccagctggagcagggcaaggagacctggagggaggagaagaagtgcagccctgccacctgcccagctgaccctgagcctgagctgtacctggaccccttctgccccccaggcttcagcagccagaagttccccatgcagcacgtgctgtgcaaccaccccccctggatcttcacctgcctgtgtgccgagggcaacatccagcccggggaccccggccctggggaccaggagaagcagcagcaggccagcgagggccggccctggagcgaccaggccgagggccctgagggggagggcgccatgcccctgtttggaagaaccaagaagaggaccctgggcgccttcagcaggcctccccagaggcagcctgtgagcagcaggaactag

SEQ ID NO: 176486 - DNA, 432 bp, synthetic construct
  misc_feature 1..432: note = Description of Artificial Sequence: Synthetic coding sequence
  source 1..432: mol_type = other DNA
atggccttcagagatgtggccgtggacttcacccaggatgagtggaggctgctgagccctgcccagaggaccctgtaccgggaggtgatgctggagaactacagcaacctggtgtccctgggcatctccttcagcaagccagagctgatcacccagctggagcagggcaaggagacctggagggaggagaagaagtgcagccctgccacctgcccagctgaccctgagcctgagctgtacctggaccccttctgccccccaggcttcagcagccagaagttccccatgcagcacgtgctgtgcaaccaccccccctggatcttcacctgcctgtgtgccgagggcaacatccagcccggggaccccggccctggggaccaggagaagcagcagcaggccagcgagggccggccctggagcgaccaggcctag

SEQ ID NO: 176487 - DNA, 1680 bp, synthetic construct
  misc_feature 1..1680: note = Description of Artificial Sequence: Synthetic coding sequence
  source 1..1680: mol_type = other DNA
atgcagcacgtgctgtgcaaccaccccccctggatcttcacctgcctgtgtgccgagggcaacatccagcccggggaccccggccctggggaccaggagaagcagcagcaggccagcgagggccggccctggagcgaccaggccgagggccctgagggggagggcgccatgcccctgtttggccgcaccaagaagaggaccctgggcgccttcagccggcccccccagaggcagcctgtgagcagcagaaatggcctgcggggcgtggagctggaggccagccctgcccagagcggcaaccctgaggagacagacaagctgctgaagagaattgaggtgctgggcttcggcaccgtgaactgtggagaatgtggcctgtccttcagcaagatgaccaacctgctgagccaccagaggatccacagcggggagaagccctacgtgtgtggggtgtgtgagaagggcttcagcctgaagaagagcctggcccggcaccagaaggcccacagcggggagaagcccatcgtgtgcagagaatgtggccggggcttcaacaggaagagcaccctcatcatccacgagaggacccacagcggggagaagccctacatgtgcagtgaatgtggccggggcttcagccagaagagcaacctgatcatccaccagaggacccacagcggggagaagccctacgtgtgcagagaatgtgggaagggcttcagccagaagtctgctgtggtgcgccaccagaggacccacctggaggagaagaccatcgtgtgcagcgactgtggcctgggcttcagtgacaggagcaacctgatcagccaccagaggacccacagcggggagaagccctatgcctgcaaggaatgtggccgctgcttccggcagaggaccaccctggtgaaccaccagaggacccacagcaaggagaagccctacgtgtgtggggtgtgtggccacagcttcagccagaacagcaccctcatcagccacaggaggacccacactggagagaagccctacgtgtgtggggtgtgtggccggggcttcagcctgaagagccacctgaacagacaccagaacatccacagcggggagaagcccatcgtgtgcaaggactgtggccggggcttcagccagcagagcaacctgatccgccaccagaggacccacagcggggagaagcccatggtgtgtggagaatgtggccggggcttcagccagaagagcaacctggtggcccaccagaggacccacagcggggagcggccctacgtgtgcagagaatgtggccggggcttcagccaccaggccggcctcatccgccacaagaggaagcacagccgggagaagccctacatgtgccggcagtgtggcctgggcttcggcaacaagagcgccctgatcacccacaagagggcccacagcgaggagaagccctgtgtgtgcagagaatgtggccagggcttcctgcagaagagccacctgaccctgcaccagatgacccacactggagagaagccctacgtgtgcaagacctgtggccggggcttcagcctgaagagccacctgagccgccacaggaagaccacctctgtgcaccaccggctgcctgtgcagcctgaccctgagccctgtgccggccagcccagcgacagcctgtacagcctgtag

SEQ ID NO: 176488 - DNA, 1680 bp, synthetic construct; identical to SEQ ID NO: 176487
  misc_feature 1..1680: note = Description of Artificial Sequence: Synthetic coding sequence
  source 1..1680: mol_type = other DNA

SEQ ID NO: 176489 - DNA, 1284 bp, synthetic construct
  misc_feature 1..1284: note = Description of Artificial Sequence: Synthetic coding sequence
  source 1..1284: mol_type = other DNA
atgaccctggtgacagctgggggcgcctggacaggccctggctgctggcatgaggtgaaggatgaggagagcagcagcgagcagagcatcagcattgctgtgagccacgtgaacaccagcaaggccggcctgcctgcccagacagccctgccctgtgacatctgtggccccatcctgaaggacatcctgcacctggatgagcaccagggcacccaccacggcctgaagctgcacacctgtggggcctgtggccggcagttctggttcagcgccaacctgcaccagtaccagaagtgctacagcattgagcagcccctgcggcgggacaagtctgaggccagcatcgtgaagaactgcaccgtgtccaaggagccccaccccagcgagaagcccttcacctgcaaggaggagcagaagaacttccaggccaccctgggcggctgccagcagaaggccatccacagcaagaggaagacccacaggagcacagaaagtggagatgccttccacggggagcagatgcactacaagtgcagtgaatgtgggaaggccttcagcaggaaggacaccctggtgcagcaccagaggatccacagcggggagaagccctatgaatgttctgaatgtgggaaggccttcagcaggaaggccaccctggtgcagcaccagaggatccacactggagagcggccctatgaatgttctgaatgtgggaagaccttcagcaggaaggacaacctgacccagcacaagaggatccacactggagagatgccctacaagtgcaatgaatgtgggaagtacttcagccaccacagcaacctgattgtgcaccagagggtgcacaatggagcccggccctacaagtgcagcgactgtgggaaggtgttccgccacaagagcaccctggtgcagcacgagagcatccacactggagagaacccctatgactgcagcgactgtgggaagagctttggccacaagtacaccctcatcaagcaccagaggatccacacagagagcaagccctttgaatgtattgaatgtgggaagttcttcagccgcagcagtgactacatcgcccaccagagggtgcacactggagagcggccctttgtgtgcagcaaatgtgggaaggacttcatccgcaccagccacctggtgcgccaccagagggtgcacactggagagcggccctatgaatgttctgaatgtgggaaggcctacagcctgagcagccacctgaacagacaccagaaggtgcacacagctggccgcctgtag

SEQ ID NO: 176490 - DNA, 1485 bp, synthetic construct
  misc_feature 1..1485: note = Description of Artificial Sequence: Synthetic coding sequence
  source 1..1485: mol_type = other DNA
ctgcgctggaaccacaggagccgcagcagcggcctgctgggcggcagcgaggtgacagaagctgggggctgcggccgcagccgctgcagcctgtgtggggtggcccggcagaggcggccccggctgcggccccggggccgcaccacagctgtgcccggcagccgggacctgggccccccccggggcagcggctggagcaccaactgtgatggcggcggcagaggagatggccctggggccggctgctggcatgaggtgaaggatgaggagagcagcagcgagcagagcatcagcattgctgtgagccacgtgaacaccagcaaggccggcctgcctgcccagacagccctgccctgtgacatctgtggccccatcctgaaggacatcctgcacctggatgagcaccagggcacccaccacggcctgaagctgcacacctgtggggcctgtggccggcagttctggttcagcgccaacctgcaccagtaccagaagtgctacagcattgagcagcccctgcggcgggacaagtctgaggccagcatcgtgaagaactgcaccgtgtccaaggagccccaccccagcgagaagcccttcacctgcaaggaggagcagaagaacttccaggccaccctgggcggctgccagcagaaggccatccacagcaagaggaagacccacaggagcacagagagcggagatgccttccatggagagcagatgcactacaagtgcagtgaatgtgggaaggccttcagcaggaaggacaccctggtgcagcaccagaggatccacagcggggagaagccctatgagtgcagtgaatgtgggaaggccttcagcaggaaggccaccctggtgcagcaccagaggatccacactggagagcggccctatgagtgcagtgaatgtgggaagaccttcagcaggaaggacaacctgacccagcacaagaggatccacactggagagatgccctacaagtgcaatgaatgtgggaagtacttcagccaccacagcaacctgattgtgcaccagagggtgcacaacggggcccggccctacaagtgcagcgactgtgggaaggtgttccgccacaagagcaccctggtgcagcacgagagcatccacactggagagaacccctatgactgcagcgactgtgggaagagctttggccacaagtacaccctcatcaagcaccagaggatccacacagagagcaagccctttgagtgcattgaatgtgggaagttcttcagccgcagcagtgactacatcgcccaccagagggtgcacactggagagcggccctttgtgtgcagcaaatgtgggaaggacttcatccgcaccagccacctggtgcgccaccagagggtgcacactggagagcggccctatgagtgcagtgaatgtgggaaggcctacagcctgagcagccacctgaacagacaccagaaggtgcacacagctggccgcctgtag

SEQ ID NO: 176491 - DNA, 1044 bp, synthetic construct
  misc_feature 1..1044: note = Description of Artificial Sequence: Synthetic coding sequence
  source 1..1044: mol_type = other DNA
atgtggggcatgtgggagaccatcctggtgcagtgcctgcaccagtaccagaagtgctacagcattgagcagcccctgcggcgggacaagtctgaggccagcatcgtgaagaactgcaccgtgtccaaggagccccaccccagcgagaagcccttcacctgcaaggaggagcagaagaacttccaggccaccctgggcggctgccagcagaaggccatccacagcaagaggaagacccacaggagcacagaaagtggagatgccttccacggggagcagatgcactacaagtgcagtgaatgtgggaaggccttcagcaggaaggacaccctggtgcagcaccagaggatccacagcggggagaagccctatgaatgttctgaatgtgggaaggccttcagcaggaaggccaccctggtgcagcaccagaggatccacactggagagcggccctatgaatgttctgaatgtgggaagaccttcagcaggaaggacaacctgacccagcacaagaggatccacactggagagatgccctacaagtgcaatgaatgtgggaagtacttcagccaccacagcaacctgattgtgcaccagagggtgcacaatggagcccggccctacaagtgcagcgactgtgggaaggtgttccgccacaagagcaccctggtgcagcacgagagcatccacactggagagaacccctatgactgcagcgactgtgggaagagctttggccacaagtacaccctcatcaagcaccagaggatccacacagagagcaagccctttgaatgtattgaatgtgggaagttcttcagccgcagcagtgactacatcgcccaccagagggtgcacactggagagcggccctttgtgtgcagcaaatgtgggaaggacttcatccgcaccagccacctggtgcgccaccagagggtgcacactggagagcggccctatgaatgttctgaatgtgggaaggcctacagcctgagcagccacctgaacagacaccagaaggtgcacacagctggccgcctgtag

SEQ ID NO: 176492 - DNA, 1977 bp, synthetic construct
  misc_feature 1..1977: note = Description of Artificial Sequence: Synthetic coding sequence
  source 1..1977: mol_type = other DNA
atgaccccaggagtgcgggtgtccacagatcctgagcaggtgacctttgaagatgtggtggtgggcttcagccaggaggagtggggccagctgaagccagcccagaggaccctgtacagagatgtgatgctggacaccttccggctgctggtgtctgtgggccactggctgcccaagcccaacgtcatcagcctgctggagcaggaggccgagctgtgggccgtggagagccggctgccccagggcgtgtacccagacctggagacccggcccaaggtgaagctgtctgtgctgaagcagggcatcagcgaggagatcagcaacagcgtcatcctggtggagcgcttcctgtgggatggcctgtggtactgcagaggagaggacacagagggccactgggagtggagctgtgagagcctggagagcctggccgtgcctgtggccttcacccctgtgaagacccctgtgctggagcagtggcagagaaatggatttggagagaacatcagcctgaacccagacctgccccaccagcccatgaccccagagcggcagagcccccacacctggggcacccggggcaagcgggagaagccagacctgaatgtgctgcagaagacctgtgtgaaggagaagccctacaagtgccaggagtgtgggaaggccttcagccacagcagcgccctgattgagcaccacaggacccacactggagagcggccctatgaatgtcatgagtgcctgaagggcttcaggaacagcagcgccctgaccaagcaccagaggatccacactggagagaagccctacaagtgcacccagtgtggccgcaccttcaaccagatcgcccccctcatccagcaccagaggacccacactggagagaagccctatgaatgttctgaatgtgggaagagcttctccttccgcagcagcttcagccagcacgagaggacccacactggagagaagccctatgaatgttctgaatgtgggaaggccttccggcagagcatccacctgacccagcacctgcgcatccacactggagagaagccctaccagtgtggggagtgtgggaaggccttcagccacagcagcagcctgaccaagcaccagaggatccacactggagagaagccctatgaatgtcatgaatgtgggaaggccttcacccagatcacccccctcatccagcaccagaggacccacactggagagaagccctatgaatgtggggagtgtgggaaggccttcagccagagcaccctgctgacagagcaccggcgcatccacactggagagaagccctacggctgcaatgaatgtgggaagaccttcagccacagcagcagcctgagccagcacgagaggacccacactggagagaagccctatgaatgttcccagtgtgggaaggccttccggcagagcacccacctgacccagcaccagaggatccacactggagagaagccctatgaatgtaatgactgtgggaaggccttcagccacagcagcagcctgaccaagcaccagaggatccacactggagagaagccctatgagtgcaaccagtgtggccgggccttcagccagctggcccccctcatccagcaccagaggatccacactggagagaagccctatgagtgcaaccagtgtggccgggccttcagccagagcagcctgctgattgagcaccagaggatccacaccaaggagaagccctacggctgcaatgaatgtgggaagagcttcagccacagcagcagcctgagccagcacgagaggacccacactggagagaagccctatgaatgtcatgactgtgggaagagcttccggcagagcacccacctgacccagcaccggcgcatccacactggagagaagccctatgcctgccgggactgtgggaaggccttcacccacagcagcagcctgaccaagcaccagaggacccacactggatag

SEQ ID NO: 176493 - DNA, 1173 bp, synthetic construct
  misc_feature 1..1173: note = Description of Artificial Sequence: Synthetic coding sequence
  source 1..1173: mol_type = other DNA
atggagctgggcagcagaagaagatctgtgggctgccgctgccggggcctgtgcctggccgtgcggcgggagcaggtgacctttgaagatgtggtggtgggcttcagccaggaggagtggggccagctgaagccagcccagaggaccctgtacagagatgtgatgctggacaccttccggctgctggtgtctgtgggccactggctgcccaagcccaacgtcatcagcctgctggagcaggaggccgagctgtgggccgtggagagccggctgccccagggcgtgtacccagacctggagacccggcccaaggtgaagctgtctgtgctgaagcagggcatcagcgaggagatcagcaacagcgtcatcctggtggagcgcttcctgtgggatggcctgtggtactgcagaggagaggacacagagggccactgggagtggagctgtgagagcctggagagcctggccgtgcctgtggccttcacccctgtgaagacccctgtgctggagcagtggcagagaaatggatttggagagaacatcagcctgaacccagacctgccccaccagcccatgaccccagagcggcagagcccccacacctggggcacccggggcaagcgggagaagccagacctgaatgtgctgcagaagacctgtgtgaaggagaagccctacaagtgccaggagtgtgggaaggccttcagccacagcagcgccctgattgagcaccacaggacccacactggagagcggccctatgaatgtcatgagtgcctgaagggcttcaggaacagcagcgccctgaccaagcaccagaggatccacactggagagaagccctacaagtgcacccagtgtggccgcaccttcaaccagatcgcccccctcatccagcaccagaggacccacactggagagaagccctatgaatgttctgaatgtgggaagagcttctccttccgcagcagcttcagccagcacgagaggacccacactggagagaagccctatgaatgttctgaatgtgggaaggccttccggcagagcatccacctgacccagcacctgcgcatccacactggagagaagccctaccagtgtggggagtgtgggaaggccttcacccacagcagcagcctgaccaagcaccagaggacccacactggatag

SEQ ID NO: 176494 - DNA, 2049 bp, synthetic construct
  misc_feature 1..2049: note = Description of Artificial Sequence: Synthetic coding sequence
  source 1..2049: mol_type = other DNA
atggagctgggcagcagaagaagatctgtgggctgccgctgccggggcctgtgcctggccgtgcggcgggagcaggtgacctttgaagatgtggtggtgggcttcagccaggaggagtggggccagctgaagccagcccagaggaccctgtacagagatgtgatgctggacaccttccggctgctggtgtctgtgggccactggctgcccaagcccaacgtcatcagcctgctggagcaggaggccgagctgtgggccgtggagagccggctgccccagggcgtgtacccagagatcaagggccacttccagttcctgctgctgagtgacctggagacccggcccaaggtgaagctgtctgtgctgaagcagggcatcagcgaggagatcagcaacagcgtcatcctggtggagcgcttcctgtgggatggcctgtggtactgcagaggagaggacacagagggccactgggagtggagctgtgagagcctggagagcctggccgtgcctgtggccttcacccctgtgaagacccctgtgctggagcagtggcagagaaatggatttggagagaacatcagcctgaacccagacctgccccaccagcccatgaccccagagcggcagagcccccacacctggggcacccggggcaagcgggagaagccagacctgaatgtgctgcagaagacctgtgtgaaggagaagccctacaagtgccaggagtgtgggaaggccttcagccacagcagcgccctgattgagcaccacaggacccacactggagagcggccctatgaatgtcatgagtgcctgaagggcttcaggaacagcagcgccctgaccaagcaccagaggatccacactggagagaagccctacaagtgcacccagtgtggccgcaccttcaaccagatcgcccccctcatccagcaccagaggacccacactggagagaagccctatgaatgttctgaatgtgggaagagcttctccttccgcagcagcttcagccagcacgagaggacccacactggagagaagccctatgaatgttctgaatgtgggaaggccttccggcagagcatccacctgacccagcacctgcgcatccacactggagagaagccctaccagtgtggggagtgtgggaaggccttcagccacagcagcagcctgaccaagcaccagaggatccacactggagagaagccctatgaatgtcatgaatgtgggaaggccttcacccagatcacccccctcatccagcaccagaggacccacactggagagaagccctatgaatgtggggagtgtgggaaggccttcagccagagcaccctgctgacagagcaccggcgcatccacactggagagaagccctacggctgcaatgaatgtgggaagaccttcagccacagcagcagcctgagccagcacgagaggacccacactggagagaagccctatgaatgttcccagtgtgggaaggccttccggcagagcacccacctgacccagcaccagaggatccacactggagagaagccctatgaatgtaatgactgtgggaaggccttcagccacagcagcagcctgaccaagcaccagaggatccacactggagagaagccctatgagtgcaaccagtgtggccgggccttcagccagctggcccccctcatccagcaccagaggatccacactggagagaagccctatgagtgcaaccagtgtggccgggccttcagccagagcagcctgctgattgagcaccagaggatccacaccaaggagaagccctacggctgcaatgaatgtgggaagagcttcagccacagcagcagcctgagccagcacgagaggacccacactggagagaagccctatgaatgtcatgactgtgggaagagcttccggcagagcacccacctgacccagcaccggcgcatccacactggagagaagccctatgcctgccgggactgtgggaaggccttcacccacagcagcagcctgaccaagcaccagaggacccacactggatag

SEQ ID NO: 176495 - DNA, 1977 bp, synthetic construct; identical to SEQ ID NO: 176492
  misc_feature 1..1977: note = Description of Artificial Sequence: Synthetic coding sequence
  source 1..1977: mol_type = other DNA

SEQ ID NO: 176496 - DNA, 1851 bp, synthetic construct
  misc_feature 1..1851: note = Description of Artificial Sequence: Synthetic coding sequence
  source 1..1851: mol_type = other DNA
atgctggacaccttccggctgctggtgtctgtgggccactggctgcccaagcccaacgtcatcagcctgctggagcaggaggccgagctgtgggccgtggagagccggctgccccagggcgtgtacccagacctggagacccggcccaaggtgaagctgtctgtgctgaagcagggcatcagcgaggagatcagcaacagcgtcatcctggtggagcgcttcctgtgggatggcctgtggtactgcagaggagaggacacagagggccactgggagtggagctgtgagagcctggagagcctggccgtgcctgtggccttcacccctgtgaagacccctgtgctggagcagtggcagagaaatggatttggagagaacatcagcctgaacccagacctgccccaccagcccatgaccccagagcggcagagcccccacacctggggcacccggggcaagcgggagaagccagacctgaatgtgctgcagaagacctgtgtgaaggagaagccctacaagtgccaggagtgtgggaaggccttcagccacagcagcgccctgattgagcaccacaggacccacactggagagcggccctatgaatgtcatgagtgcctgaagggcttcaggaacagcagcgccctgaccaagcaccagaggatccacactggagagaagccctacaagtgcacccagtgtggccgcaccttcaaccagatcgcccccctcatccagcaccagaggacccacactggagagaagccctatgaatgttctgaatgtgggaagagcttctccttccgcagcagcttcagccagcacgagaggacccacactggagagaagccctatgaatgttctgaatgtgggaaggccttccggcagagcatccacctgacccagcacctgcgcatccacactggagagaagccctaccagtgtggggagtgtgggaaggccttcagccacagcagcagcctgaccaagcaccagaggatccacactggagagaagccctatgaatgtcatgaatgtgggaaggccttcacccagatcacccccctcatccagcaccagaggacccacactggagagaagccctatgaatgtggggagtgtgggaaggccttcagccagagcaccctgctgacagagcaccggcgcatccacactggagagaagccctacggctgcaatgaatgtgggaagaccttcagccacagcagcagcctgagccagcacgagaggacccacactggagagaagccctatgaatgttcccagtgtgggaaggccttccggcagagcacccacctgacccagcaccagaggatccacactggagagaagccctatgaatgtaatgactgtgggaaggccttcagccacagcagcagcctgaccaagcaccagaggatccacactggagagaagccctatgagtgcaaccagtgtggccgggccttcagccagctggcccccctcatccagcaccagaggatccacactggagagaagccctatgagtgcaaccagtgtggccgggccttcagccagagcagcctgctgattgagcaccagaggatccacaccaaggagaagccctacggctgcaatgaatgtgggaagagcttcagccacagcagcagcctgagccagcacgagaggacccacactggagagaagccctatgaatgtcatgactgtgggaagagcttccggcagagcacccacctgacccagcaccggcgcatccacactggagagaagccctatgcctgccgggactgtgggaaggccttcacccacagcagcagcctgaccaagcaccagaggacccacactggatag

SEQ ID NO: 176497 - DNA, 2013 bp, synthetic construct
  misc_feature 1..2013: note = Description of Artificial Sequence: Synthetic coding sequence
  source 1..2013: mol_type = other DNA
atgaccccaggagtgcgggtgtccacagatcctgagcaggtgacctttgaagatgtggtggtgggcttcagccaggaggagtggggccagctgaagccagcccagaggaccctgtacagagatgtgatgctggacaccttccggctgctggtgtctgtgggccactggctgcccaagcccaacgtcatcagcctgctggagcaggaggccgagctgtgggccgtggagagccggctgccccagggcgtgtacccagagatcaagggccacttccagttcctgctgctgagtgacctggagacccggcccaaggtgaagctgtctgtgctgaagcagggcatcagcgaggagatcagcaacagcgtcatcctggtggagcgcttcctgtgggatggcctgtggtactgcagaggagaggacacagagggccactgggagtggagctgtgagagcctggagagcctggccgtgcctgtggccttcacccctgtgaagacccctgtgctggagcagtggcagagaaatggatttggagagaacatcagcctgaacccagacctgccccaccagcccatgaccccagagcggcagagcccccacacctggggcacccggggcaagcgggagaagccagacctgaatgtgctgcagaagacctgtgtgaaggagaagccctacaagtgccaggagtgtgggaaggccttcagccacagcagcgccctgattgagcaccacaggacccacactggagagcggccctatgaatgtcatgagtgcctgaagggcttcaggaacagcagcgccctgaccaagcaccagaggatccacactggagagaagccctacaagtgcacccagtgtggccgcaccttcaaccagatcgcccccctcatccagcaccagaggacccacactggagagaagccctatgaatgttctgaatgtgggaagagcttctccttccgcagcagcttcagccagcacgagaggacccacactggagagaagccctatgaatgttctgaatgtgggaaggccttccggcagagcatccacctgacccagcacctgcgcatccacactggagagaagccctaccagtgtggggagtgtgggaaggccttcagccacagcagcagcctgaccaagcaccagaggatccacactggagagaagccctatgaatgtcatgaatgtgggaaggccttcacccagatcacccccctcatccagcaccagaggacccacactggagagaagccctatgaatgtggggagtgtgggaaggccttcagccagagcaccctgctgacagagcaccggcgcatccacactggagagaagccctacggctgcaatgaatgtgggaagaccttcagccacagcagcagcctgagccagcacgagaggacccacactggagagaagccctatgaatgttcccagtgtgggaaggccttccggcagagcacccacctgacccagcaccagaggatccacactggagagaagccctatgaatgtaatgactgtgggaaggccttcagccacagcagcagcctgaccaagcaccagaggatccacactggagagaagccctatgagtgcaaccagtgtggccgggccttcagccagctggcccccctcatccagcaccagaggatccacactggagagaagccctatgagtgcaaccagtgtggccgggccttcagccagagcagcctgctgattgagcaccagaggatccacaccaaggagaagccctacggctgcaatgaatgtgggaagagcttcagccacagcagcagcctgagccagcacgagaggacccacactggagagaagccctatgaatgtcatgactgtgggaagagcttccggcagagcacccacctgacccagcaccggcgcatccacactggagagaagccctatgcctgccgggactgtgggaaggccttcacccacagcagcagcctgaccaagcaccagaggacccacactggatag

SEQ ID NO: 176498 - DNA, 2031 bp, synthetic construct
  misc_feature 1..2031: note = Description of Artificial Sequence: Synthetic coding sequence
  source 1..2031: mol_type = other DNA
tgaagatctgtgggctgccgctgccggggcctgtgcctggccgtgcggcgggagcaggtgacctttgaagatgtggtggtgggcttcagccaggaggagtggggccagctgaagccagcccagaggaccctgtacagagatgtgatgctggacaccttccggctgctggtgtctgtgggccactggctgcccaagcccaacgtcatcagcctgctggagcaggaggccgagctgtgggccgtggagagccggctgccccagggcgtgtacccagagatcaagggccacttccagttcctgctgctgagtgacctggagacccggcccaaggtgaagctgtctgtgctgaagcagggcatcagcgaggagatcagcaacagcgtcatcctggtggagcgcttcctgtgggatggcctgtggtactgcagaggagaggacacagagggccactgggagtggagctgtgagagcctggagagcctggccgtgcctgtggccttcacccctgtgaagacccctgtgctggagcagtggcagagaaatggatttggagagaacatcagcctgaacccagacctgccccaccagcccatgaccccagagcggcagagcccccacacctggggcacccggggcaagcgggagaagccagacctgaatgtgctgcagaagacctgtgtgaaggagaagccctacaagtgccaggagtgtgggaaggccttcagccacagcagcgccctgattgagcaccacaggacccacactggagagcggccctatgaatgtcatgagtgcctgaagggcttcaggaacagcagcgccctgaccaagcaccagaggatccacactggagagaagccctacaagtgcacccagtgtggccgcaccttcaaccagatcgcccccctcatccagcaccagaggacccacactggagagaagccctatgaatgttctgaatgtgggaagagcttctccttccgcagcagcttcagccagcacgagaggacccacactggagagaagccctatgaatgttctgaatgtgggaaggccttccggcagagcatccacctgacccagcacctgcgcatccacactggagagaagccctaccagtgtggggagtgtgggaaggccttcagccacagcagcagcctgaccaagcaccagaggatccacactggagagaagccctatgaatgtcatgaatgtgggaaggccttcacccagatcacccccctcatccagcaccagaggacccacactggagagaagccctatgaatgtggggagtgtgggaaggccttcagccagagcaccctgctgacagagcaccggcgcatccacactggagagaagccctacggctgcaatgaatgtgggaagaccttcagccacagcagcagcctgagccagcacgagaggacccacactggagagaagccctatgaatgttcccagtgtgggaaggccttccggcagagcacccacctgacccagcaccagaggatccacactggagagaagccctatgaatgtaatgactgtgggaaggccttcagccacagcagcagcctgaccaagcaccagaggatccacactggagagaagccctatgagtgcaaccagtgtggccgggccttcagccagctggcccccctcatccagcaccagaggatccacactggagagaagccctatgagtgcaaccagtgtggccgggccttcagccagagcagcctgctgattgagcaccagaggatccacaccaaggagaagccctacggctgcaatgaatgtgggaagagcttcagccacagcagcagcctgagccagcacgagaggacccacactggagagaagccctatgaatgtcatgactgtgggaagagcttccggcagagcacccacctgacccagcaccggcgcatccacactggagagaagccctatgcctgccgggactgtgggaaggccttcacccacagcagcagcctgaccaagcaccagaggacccacactggatag

SEQ ID NO: 176499 - DNA, 1623 bp, synthetic construct
  misc_feature 1..1623: note = Description of Artificial Sequence: Synthetic coding sequence
  source 1..1623: mol_type = other DNA
atggattctgtggcctttgaagatgtggatgtgaacttcacccaggaggagtgggccctgctggaccccagccagaagaacctgtacagagatgtgatgtgggagaccatgaggaacctggccagcatcggcaagaagtggaaggaccagaacatcaaggaccactacaagcaccggggcaggaacctgcggagccacatgctggagcggctgtaccagaccaaggatggcagccagagaggaggcatcttcagccagtttgccaaccagaacctgagcaagaagatccctggggtgaagctgtgtgagagcatcgtgtatggagaggtgtccatgggccagagcagcctgaacagacacatcaaggaccacagcggccacgagcccaaggagtaccaggagtatggagagaagccagacaccaggaaccagtgctggaagcccttcagcagccaccacagcttccgcacccatgagatcatccacactggagagaagctgtatgactgcaaggaatgtgggaagaccttcttcagcctgaagaggatccgccgccacatcatcacccacagcggctacaccccctacaagtgcaaggtgtgtgggaaggcctttgactaccccagccgcttccgcacccatgagaggagccacactggagagaagccctatgagtgccaggagtgtgggaaggccttcacctgcatcacctctgtgcggcggcacatgatcaagcacactggagatggcccctacaagtgcaaggtgtgtgggaagcccttccacagcctgagcagcttccaggtgcatgagcgcatccacactggagagaagcccttcaagtgcaagcagtgtgggaaggccttcagctgcagccccaccctgcgcatccacgagaggacccacactggagagaagccctatgagtgcaagcagtgtgggaaggccttctcctacctgcccagcctgcggctgcacgagcgcatccacactggagagaagccctttgtgtgcaagcagtgtgggaaggccttccgcagcgccagcaccttccagatccacgagaggacccacactggagagaagccctatgagtgcaaggaatgtggggaggccttcagctgcatccccagcatgaggaggcacatgatcaagcacactggagagggcccctacaagtgcaaggtgtgtgggaagcccttccacagcctgagccccttccgcatccacgagaggacccacactggagagaagccctacgtgtgcaagcactgcggcaaggcctttgtgagcagcaccagcatccgcatccacgagaggacccacactggagagaagccctatgagtgcaagcagtgtgggaaggccttctcctacctgaacagcttccgcacccatgagatgatccacactggagagaagccctttgagtgcaagagatgtgggaaggccttccgcagcagcagcagcttccggctgcacgagaggacccacacaggccagaagccctaccactgcaaggaatgtgggaaggcctacagctgccgggccagcttccagaggcacatgctgacccatgctgaagatggccccccctacaagtgcatgtgggagagcctgtag

SEQ ID NO: 176500 - DNA, 1425 bp, synthetic construct
  misc_feature 1..1425: note = Description of Artificial Sequence: Synthetic coding sequence
  source 1..1425: mol_type = other DNA
atgctggagcggctgtaccagaccaaggatggcagccagagaggaggcatcttcagccagtttgccaaccagaacctgagcaagaagatccctggggtgaagctgtgtgagagcatcgtgtatggagaggtgtccatgggccagagcagcctgaacagacacatcaaggaccacagcggccacgagcccaaggagtaccaggagtatggagagaagccagacaccaggaaccagtgctggaagcccttcagcagccaccacagcttccgcacccatgagatcatccacactggagagaagctgtatgactgcaaggaatgtgggaagaccttcttcagcctgaagaggatccgccgccacatcatcacccacagcggctacaccccctacaagtgcaaggtgtgtgggaaggcctttgactaccccagccgcttccgcacccatgagaggagccacactggagagaagccctatgagtgccaggagtgtgggaaggccttcacctgcatcacctctgtgcggcggcacatgatcaagcacactggagatggcccctacaagtgcaaggtgtgtgggaagcccttccacagcctgagcagcttccaggtgcatgagcgcatccacactggagagaagcccttcaagtgcaagcagtgtgggaaggccttcagctgcagccccaccctgcgcatccacgagaggacccacactggagagaagccctatgagtgcaagcagtgtgggaaggccttctcctacctgcccagcctgcggctgcacgagcgcatccacactggagagaagccctttgtgtgcaagcagtgtgggaaggccttccgcagcgccagcaccttccagatccacgagaggacccacactggagagaagccctatgagtgcaaggaatgtggggaggccttcagctgcatccccagcatgaggaggcacatgatcaagcacactggagagggcccctacaagtgcaaggtgtgtgggaagcccttccacagcctgagccccttccgcatccacgagaggacccacactggagagaagccctacgtgtgcaagcactgcggcaaggcctttgtgagcagcaccagcatccgcatccacgagaggacccacactggagagaagccctatgagtgcaagcagtgtgggaaggccttctcctacctgaacagcttccgcacccatgagatgatccacactggagagaagccctttgagtgcaagagatgtgggaaggccttccgcagcagcagcagcttccggctgcacgagaggacccacacaggccagaagccctaccactgcaaggaatgtgggaaggcctacagctgccgggccagcttccagaggcacatgctgacccatgctgaagatggccccccctacaagtgcatgtgggagagcctgtag

SEQ ID NO: 176501 - DNA, 960 bp, synthetic construct
  misc_feature 1..960: note = Description of Artificial Sequence: Synthetic coding sequence
  source 1..960: mol_type = other DNA
atgggccccctgaccttcatggatgtggccatcgagttcagcctggaggagtggcagtgcctggacacagcccagagaaatgtgtacagacatgtgatgctggagaactacagaaacctggtgttcctggacctgatcacctgcctggagcagggcaaggagccctggaacatgaagagacatgagatggtggtggccaagcacagcgccctgtgcagcagatttgcccaggacctgtggctggagcagaacatcaaggacagcttccagaaggtgaccctgagccgctatggcaagtatggccacaagaacctgcagctgaggaagggctgcaagtctgtggatgagtgcaagggccaccagggcggcttcaacggcctgaaccagtgcctgaagatcaccaccagcaagatcttccagtgcaacaagtatgtgaaggtgatgcacaagttcagcaacagcaacagacacaagatccgccacacagagaacaagcacttccgctgcaaggaatgtgacaagagcctgtgcatgctgagccggctgacccagcacaagaagatccacacccgggagaacttctacaagtgtgaagaatgtgggaagaccttcaactggagcaccaacctgagcaagcccaagaagatccacactggagagaagccctacaagtgtgaggtgtgtgggaaggccttccaccagagcagcatcctgaccaagcacaagatcatcagaactggagagaagccctacaagtgtgcccactgtgggaaggccttcaagcagagcagccacctgaccaggcacaagatcatccacacagaggagaagccctacaagtgtgagcagtgtgggaaggtgttcaagcagagccccaccctgaccaagcaccagatcatctacaccggggaggagccctacaagtgtgaagaatgtgggaaggccttcaacctgtcctag

SEQ ID NO: 176502 - DNA, 789 bp, synthetic construct
  misc_feature 1..789: note = Description of Artificial Sequence: Synthetic coding sequence
  source 1..789: mol_type = other DNA
atgaagagacatgagatggtggtggccaagcacagcgccctgtgcagcagatttgcccaggacctgtggctggagcagaacatcaaggacagcttccagaaggtgaccctgagccgctatggcaagtatggccacaagaacctgcagctgaggaagggctgcaagtctgtggatgaatgtaaaggccaccagggcggcttcaacggcctgaaccagtgcctgaagatcaccaccagcaagatcttccagtgcaacaagtatgtgaaggtgatgcacaagttcagcaacagcaacagacacaagatccgccacacagagaacaagcacttccgctgcaaggaatgtgacaagagcctgtgcatgctgagccggctgacccagcacaagaagatccacacccgggagaacttctacaagtgtgaggagtgtgggaagaccttcaactggagcaccaacctgagcaagcccaagaagatccacactggagagaagccctacaagtgtgaggtgtgtgggaaggccttccaccagagcagcatcctgaccaagcacaagatcatcagaactggagagaagccctacaagtgtgcccactgcggcaaggccttcaagcagagcagccacctgaccaggcacaagatcatccacacagaggagaagccctacaagtgtgagcagtgtgggaaggtgttcaagcagagccccaccctgaccaagcaccagatcatctacacaggagaggagccctacaagtgtgaggagtgtgggaaggccttcaacctgtcctag

SEQ ID NO: 176503 - DNA, 789 bp, synthetic construct; identical to SEQ ID NO: 176502
  misc_feature 1..789: note = Description of Artificial Sequence: Synthetic coding sequence
  source 1..789: mol_type = other DNA

SEQ ID NO: 176504 - DNA, 864 bp, synthetic construct
  misc_feature 1..864: note = Description of Artificial Sequence: Synthetic coding sequence
  source 1..864: mol_type = other DNA
atggatgtggccatcgagttcagcctggaggagtggcagtgcctggacacagcccagagaaatgtgtacagacatgtgatgctggagaactacagaaacctggtgttcctggccctgtgcagcagatttgcccaggacctgtggctggagcagaacatcaaggacagcttccagaaggtgaccctgagccgctatggcaagtatggccacaagaacctgcagctgaggaagggctgcaagtctgtggatgagtgcaagggccaccagggcggcttcaacggcctgaaccagtgcctgaagatcaccaccagcaagatcttccagtgcaacaagtatgtgaaggtgatgcacaagttcagcaacagcaacagacacaagatccgccacacagagaacaagcacttccgctgcaaggaatgtgacaagagcctgtgcatgctgagccggctgacccagcacaagaagatccacacccgggagaacttctacaagtgtgaagaatgtgggaagaccttcaactggagcaccaacctgagcaagcccaagaagatccacactggagagaagccctacaagtgtgaggtgtgtgggaaggccttccaccagagcagcatcctgaccaagcacaagatcatcagaactggagagaagccctacaagtgtgcccactgtgggaaggccttcaagcagagcagccacctgaccaggcacaagatcatccacacagaggagaagccctacaagtgtgagcagtgtgggaaggtgttcaagcagagccccaccctgaccaagcaccagatcatctacaccggggaggagccctacaagtgtgaagaatgtgggaaggccttcaacctgtcctag

SEQ ID NO: 176505 - DNA, 882 bp, synthetic construct
  misc_feature 1..882: note = Description of Artificial Sequence: Synthetic coding sequence
  source 1..882: mol_type = other DNA
atgggccccctgaccttcatggatgtggccatcgagttcagcctggaggagtggcagtgcctggacacagcccagagaaatgtgtacagacatgtgatgctggagaactacagaaacctggtgttcctggccctgtgcagcagatttgcccaggacctgtggctggagcagaacatcaaggacagcttccagaaggtgaccctgagccgctatggcaagtatggccacaagaacctgcagctgaggaagggctgcaagtctgtggatgagtgcaagggccaccagggcggcttcaacggcctgaaccagtgcctgaagatcaccaccagcaagatcttccagtgcaacaagtatgtgaaggtgatgcacaagttcagcaacagcaacagacacaagatccgccacacagagaacaagcacttccgctgcaaggaatgtgacaagagcctgtgcatgctgagccggctgacccagcacaagaagatccacacccgggagaacttctacaagtgtgaagaatgtgggaagaccttcaactggagcaccaacctgagcaagcccaagaagatccacactggagagaagccctacaagtgtgaggtgtgtgggaaggccttccaccagagcagcatcctgaccaagcacaagatcatcagaactggagagaagccctacaagtgtgcccactgtgggaaggccttcaagcagagcagccacctgaccaggcacaagatcatccacacagaggagaagccctacaagtgtgagcagtgtgggaaggtgttcaagcagagccccaccctgaccaagcaccagatcatctacaccggggaggagccctacaagtgtgaagaatgtgggaaggccttcaacctgtcctag

SEQ ID NO: 176506 - DNA, 381 bp, synthetic construct
  misc_feature 1..381: note = Description of Artificial Sequence: Synthetic coding sequence
  source 1..381: mol_type = other DNA
atgggccccctgaccttcatggatgtggccatcgagttcagcctggaggagtggcagtgcctggacacagcccagagaaatgtgtacagacatgtgatgctggagaactacagaaacctggtgttcctggacctgatcacctgcctggagcagggcaaggagccctggaacatgaagagacatgagatggtggtggccaagcacagcgctgtggccttcacctttgacctgagcggcctgaacatcctgtccttccagagcatcctgccctttgtgtctgccctgtatgtgatgggcaacagaaaccagtgcctgcagaagcacctggaggccaggaacaaggacctgtgtgtgctggtgctgcccaagacctttggatag

SEQ ID NO: 176507 - DNA, 1929 bp, synthetic construct
  misc_feature 1..1929: note = Description of Artificial Sequence: Synthetic coding sequence
  source 1..1929: mol_type = other DNA
atggattctgtgtcctttgaagatgtggccgtgaacttcaccctggaggagtgggccctgctggacagcagccagaagaagctgtatgaagatgtgatgcaggagaccttcaagaacctggtgtgcctgggcaagaagtgggaggaccaggacattgaagatgaccacaggaaccagggcaagaacagacgctgccacatggtggagcggctgtgtgagagcagaagaggcagcaaatgtggggagaccaccagccagatgcccaacgtgaacatcaacaaggagaccttcaccggggccaagccccatgagtgcagcttctgtggccgggacttcatccaccacagcagcctgaacagacacatgaggagccacacaggccagaagcccaatgagtaccaggagtatgagaagcagccctgcaagtgcaaggctgtgggcaagaccttctcctaccaccactgcttcaggaagcatgagaggacccacactggagtgaagccctatgagtgcaagcagtgtgggaaggccttcatctactaccagcccttccagagacatgagaggacccacgccggccagaagccctatgagtgcaagcagtgtgggaagaccttcatctactaccagagcttccagaagcacgcccacacaggcaagaagccctatgagtgcaagcagtgtgggaaggccttcatctgctaccagagcttccagaggcacaagaggacccacactggagagaagccctatgagtgcaagcagtgtgggaaggccttcagctgccccacctacttccgcacccatgagaggacccacactggagagaagccctacaagtgcaaggaatgtgggaaggccttctccttcctgagcagcttcagaagacacaagaggacccacagcggggagaagccctatgagtgcaaggaatgtgggaaggccttcttctacagcgccagcttccgggcccacgtgatcatccacactggagcccggccctacaagtgcaaggaatgtgggaaggccttcaacagcagcaacagctgccgggtgcatgagaggacccacatcggggagaagccctatgagtgcaagagatgtgggaagagcttctcctggagcatcagcctgcggctgcacgagaggacccacactggagagaagccctatgagtgcaagcagtgccacaagaccttctccttcagcagcagcctgcgggagcacgagaccacccacactggagagaagccctatgagtgcaagcagtgtgggaagaccttctccttcagcagcagcctgcagagacatgagaggacccacaatgctgagaagccctatgagtgcaagcagtgtgggaaggccttccgctgcagcagctacttccgcatccacgagaggagccacactggagagaagccctatgagtgcaagcagtgtgggaaggtgttcatccgcagcagcagcttccggctgcacgagaggacccacactggagagaagccctatgagtgcaagctgtgtgggaagaccttctccttcagcagcagcctgcgggagcacgagaagatccacacaggcaacaagccctttgagtgcaagcagtgtgggaaggccttcctgcggagcagccagatccggctgcacgagaggacccacactggagagaagccctaccagtgcaagcagtgtgggaaggccttcatcagcagcagcaagttcaggatgcatgagaggacccacactggagagaagccctaccgctgcaagcagtgtgggaaggccttccgcttcagcagctctgtgcgcatccacgagaggagccacactggagagaagccctatgagtgcaagcagtgtgggaaggccttcatcagcagcagccacttccggctgcacgagaggacccacatgggagagaaggtgtag

SEQ ID NO: 176508 - DNA, 1374 bp, synthetic construct
  misc_feature 1..1374: note = Description of Artificial Sequence: Synthetic coding sequence
  source 1..1374: mol_type = other DNA
atgagccagggctctgtgaccttcagagatgtggccatcgacttcagccaggaggagtggaagtggctgcagcctgcccagagggacctgtaccgctgtgtgatgctggagaactacggccacctggtgtccctgggcctgagcatcagcaagccagatgtggtgtccctgctggagcagggcaaggagccctggctgggcaagcgggaggtgaagagggacctcttctctgtgtctgagagcagcggggagatcaaggacttcagccccaagaatgtcatctatgatgacagcagccagtacctgatcatggagcgcatcctgagccagggccctgtgtacagcagcttcaagggcggctggaagtgcaaggaccacacagagatgctgcaggagaaccagggctgcatcaggaaggtgacagtgagccaccaggaggccctggcccagcacatgaacatcagcacagtggagcggccctacggctgccatgaatgtgggaagaccttcggccgccgcttcagcctggtgctgcaccagaggacccacactggagagaagccctatgcctgcaaggaatgtgggaagaccttcagccagatcagcaacctggtgaagcaccagatgatccacacaggcaagaagccccatgagtgcaaggactgcaacaagaccttctcctacctgtccttcctgattgagcaccagaggacccacactggagagaagccctatgagtgcacagaatgtgggaaggccttcagccgggccagcaacctgaccaggcaccagaggatccacatcggcaagaagcagtacatctgcaggaaatgtgggaaggccttcagcagcggcagcgagctgatccgccaccagatcacccacactggagagaagccctatgagtgcattgaatgtgggaaggccttccgccgcttcagccacctgaccaggcaccagagcatccacaccaccaagaccccctatgagtgcaatgaatgtaggaaggccttccgctgccacagcttcctgatcaagcaccagagaattcatgctggggagaagctgtatgaatgtgatgaatgtgggaaggtgttcacctggcacgccagcctcatccagcacaccaagagccacactggagagaagccctatgcctgtgctgaatgtgacaaggccttcagccgctccttcagcctcatcctgcaccagaggacccacactggagagaagccctacgtgtgcaaggtgtgcaacaagagcttctcctggagcagcaacctggccaagcaccagaggacccacaccctggacaacccctatgaatatgagaacagcttcaactaccacagcttcctgacagagcaccagtag

SEQ ID NO: 176509 - DNA, 351 bp, synthetic construct
  misc_feature 1..351: note = Description of Artificial Sequence: Synthetic coding sequence
  source 1..351: mol_type = other DNA
atgagccagggctctgtgaccttcagagatgtggccatcgacttcagccaggaggagtggaagtggctgcagcctgcccagagggacctgtaccgctgtgtgatgctggagaactacggccacctggtgtccctgggcctgagcatcagcaagccagatgtggtgtccctgctggagcagggcaaggagccctggctgggcaagcgggaggtgaagagggacctcttctctgtgtctgagagcagcggggagatcaaggacttcagccccaagaatgtcatctatgatgacagcagccagtacctgatcatggagcgcatcctgagccagggccctgtgtacagcagctag

SEQ ID NO: 176510 - DNA, 684 bp, synthetic construct
  misc_feature 1..684: note = Description of Artificial Sequence: Synthetic coding sequence
  source 1..684: mol_type = other DNA
acccacactggagagaagccctatgcctgcaaggaatgtgggaagaccttcagccagatcagcaacctggtgaagcaccagatgatccacacaggcaagaagccccatgagtgcaaggactgcaacaagaccttctcctacctgtccttcctgattgagcaccagaggacccacactggagagaagccctatgaatgtacagaatgtgggaaggccttcagccgggccagcaacctgaccaggcaccagaggatccacatcggcaagaagcagtacatctgcaggaaatgtgggaaggccttcagcagcggcagcgagctgatccgccaccagatcacccacactggagagaagccctatgaatgtattgaatgtgggaaggccttccgccgcttcagccacctgaccaggcaccagagaattcatgctggggagaagctgtatgaatgtgatgaatgtgggaaggtgttcacctggcacgccagcctcatccagcacaccaagagccacactggagagaagccctatgcctgtgccgagtgtgacaaggccttcagccgctccttcagcctcatcctgcaccagaggacccacactggagagaagccctacgtgtgcaaggtgtgcaacaagagcttctcctggagcagcaacctggccaagcaccagaggacccacacctag

SEQ ID NO: 176511 - DNA, 1065 bp, synthetic construct
  misc_feature 1..1065: note = Description of Artificial Sequence: Synthetic coding sequence
  source 1..1065: mol_type = other DNA
atggagcgcatcctgagccagggccctgtgtacagcagcttcaagggcggctggaagtgcaaggaccacacagagatgctgcaggagaaccagggctgcatcaggaaggtgacagtgagccaccaggaggccctggcccagcacatgaacatcagcacagtggagcggccctacggctgccatgaatgtgggaagacctttggaagacgcttcagcctggtgctgcaccagaggacccacactggagagaagccctatgcctgcaaggaatgtgggaagaccttcagccagatcagcaacctggtgaagcaccagatgatccacacaggcaagaagccccatgagtgcaaggactgcaacaagaccttctcctacctgtccttcctgattgagcaccagaggacccacactggagagaagccctatgaatgtacagaatgtgggaaggccttcagccgggccagcaacctgaccaggcaccagaggatccacatcggcaagaagcagtacatctgcaggaaatgtgggaaggccttcagcagcggcagcgagctgatccgccaccagatcacccacactggagagaagccctatgaatgtattgaatgtgggaaggccttccgccgcttcagccacctgaccaggcaccagagcatccacaccaccaagaccccctatgaatgtaatgaatgtaggaaggccttccgctgccacagcttcctgatcaagcaccagagaattcatgctggggagaagctgtatgaatgtgatgaatgtgggaaggtgttcacctggcacgccagcctcatccagcacaccaagagccacactggagagaagccctatgcctgtgccgagtgtgacaaggccttcagccgctccttcagcctcatcctgcaccagaggacccacactggagagaagccctacgtgtgcaaggtgtgcaacaagagcttctcctggagcagcaacctggccaagcaccagaggacccacaccctggacaacccctatgaatatgaaaattccttcaactaccacagcttcctgacagagcaccagtag

SEQ ID NO: 176512 - DNA, 1425 bp, synthetic construct
  misc_feature 1..1425: note = Description of Artificial Sequence: Synthetic coding sequence
  source 1..1425: mol_type = other DNA
atggagctgctgaccttcagagatgtggccatcgagttcagccctgaggagtggaagtgcctggaccctgaccagcagaacctgtacagagatgtgatgctggagaactacagaaacctggtgtccctgggcgtggccatcagcaacccagacctggtgacctgcctggagcagaggaaggagccctacaacgtgaagatccacaagatcgtggcccggcccccagccatgtgcagccacttcacccaggaccactggcctgtgcagggcatcgaggacagcttccacaagctgatcctgcggcgctatgaaaaatgtggccatgacaacctgcagctgaggaagggctgcaagagcctgaatgaatgcaagctgcagaagggcggctacaatgagttcaatgaatgtctgagcaccacccagagcaagatcctgcagtgcaaggcctctgtgaaggtggtgtccaagttcagcaacagcaacaagaggaagaccaggcacactggagagaagcacttcaaggaatgtgggaagagcttccagaagttcagccacctgacccagcacaaggtgattcatgctggggagaagccctacacctgtgaagaatgtgggaaggccttcaagtggagcctcatcttcaatgagcacaagaggatccacactggagagaagcccttcacctgtgaagaatgtggcagcatcttcaccaccagcagccactttgccaagcacaagatcatccacactggagagaagccctacaagtgtgaagaatgtgggaaggccttcaaccgcttcaccaccctgaccaagcacaagagaattcatgctggggagaagcccatcacctgtgaagaatgtaggaagatcttcaccagcagcagcaactttgccaagcacaagaggatccacactggagagaagccctacaagtgtgaagaatgtgggaaggccttcaacagaagcaccaccctgaccaagcacaagaggatccacactggagagaagccctacacctgtgaagaatgtgggaaggccttccggcagagcagcaagctgaatgagcacaagaaggtgcacactggagagcggccctacaagtgtgatgaatgtgggaaggccttcggccgcagccgggtgctgaatgagcacaagaagatccacactggagagaagccctacaagtgtgaagaatgtgggaaggccttcagaagaagcacagacaggagccagcacaagaagatccacagcgctgacaagccctacaagtgcaaggaatgtgacaaggccttcaagcagttcagcctgctgagccagcacaagaagatccacacagtggacaagccctacaagtgcaaggactgtgacaaggccttcaagcgcttcagccacctgaacaagcacaagaagatccacacctag

SEQ ID NO: 176513 - DNA, 606 bp, synthetic construct
  misc_feature 1..606: note = Description of Artificial Sequence: Synthetic coding sequence
  source 1..606: mol_type = other DNA
atggagctgctgaccttcagagatgtggccatcgagttcagccctgaggagtggaagtgcctggaccctgaccagcagaacctgtacagagatgtgatgctggagaactacagaaacctggtgtccctgggcgtggccatcagcaacccagacctggtgacctgcctggagcagaggaaggagccctacaacgtgaagatccacaagatcgtggcccggcccccagccatgtgcagccacttcacccaggaccactggcctgtgcagggcatcgaggacagcttccacaagctgatcctgcggcgctatgaaaaatgtggccatgacaacctgcagctgaggaagggctgcaagagcctgaatgaatgcaagctgcagaagggcggctacaatgagttcaatgaatgtctgagcaccacccagagcaagatcctgcagtgcaaggcctctgtgaaggtggtgtccaagttcagcaacagcaacaagaggaagaccaggcacactggagagaagcacttcaaggaatgtgggaagagcttccagaagttcagccacctgacccagcacaagaacagcagcatctccatgaccaccagccccttctag

SEQ ID NO: 176514 - DNA, 5064 bp, synthetic construct
  misc_feature 1..5064: note = Description of Artificial Sequence: Synthetic coding sequence
  source 1..5064: mol_type = other DNA
atgacagaccccctgctggacagccagcctgccagcagcactggagagatggatggcctgtgcccagagctgctgctgatccccccacccctgagcaacagaggcatcctgggccctgtgcagagcccctgccccagccgggaccctgcccccatccccacagagcccggctgcctgctggtggaggccacagccacagaggagggccctggcaacatggagatcatcgtggagaccgtggccggcaccctgacccctggggcccctggagagaccccagcccccaagctgcccccaggagagcgggagcccagccaggaggccggcacccccctgcccggccaggagacagctgaggaggagaatgtggagaaggaggagaagagtgacacccagaaggacagccagaaggctgtggacaagggccagggcgcccagaggctggagggagatgtggtgtctggaacagagagcctcttcaagacccacatgtgcccagagtgcaagcgctgcttcaagaagaggacccacctggtggagcacctgcacctgcacttcccagaccccagcctgcagtgccccaactgccagaagttcttcaccagcaagagcaagctgaagacccacctgctgcgggagctgggggagaaggcccaccactgccccctgtgccactacagcgctgtggagagaaatgccctgaacagacacatggcctccatgcatgaggacatcagcaacttctacagcgacacctacgcctgccctgtgtgccgggaggagttccggctgagccaggccctgaaggagcacctgaagagccacacagctgctgctgctgctgagcccctgcccctgcgctgcttccaggagggctgcagctatgctgccccagacaggaaggccttcatcaagcacctgaaggagacccatggagtgcgggctgtggagtgccgccaccacagctgccccatgctgtttgccacagctgaggccatggaggcccaccacaagagccactacgccttccactgcccccactgtgactttgcctgcagcaacaagcacctgttcaggaagcacaagaagcagggccaccctggcagcgaggagctgcgctgcaccttctgcccctttgccaccttcaaccctgtggcctaccaggaccacgtgggcaagatgcacgcccacgagaagatccaccagtgcccagagtgcaactttgccacagcccacaagagggtgctgatccgccacatgctgctgcacactggagagaagccccacaagtgtgagctgtgtgacttcacctgcagagatgtgtcctacctgagcaagcacatgctgacccacagcaacaccaaggactacatgtgcacagaatgtggctacgtgaccaagtggaagcactacctgcgggtgcacatgaggaagcacgccggggacctgcgctaccagtgcaaccagtgcagctaccgctgccacagagctgaccagctgagcagccacaagctgcggcaccagggcaagagcctgatgtgtgaggtgtgtgcctttgcctgcaagaggaaatatgagctgcagaagcacatggccagccagcaccaccctggcaccccagcccccctgtacccctgccactactgcagctaccagagccgccacaagcaggccgtgctgagccatgagaactgcaagcacacccggctgcgggagttccactgtgccctgtgtgactaccgcaccttcagcaacaccaccctgctcttccacaagaggaaggcccacggctacgtgcctggggaccaggcctggcagctgcgctatgccagccaggagcctgagggcgccatgcagggccccaccccacctccagattctgagcccagcaaccagctgagcgcccggcctgagggccctggccacgagcccggcaccgtggtggaccccagcctggaccaggccctgcctgagatgtctgaggaggtgaacacaggccggcaggagggcagcgaggcccctcatggaggagacctgggcggcagccccagccctgctgaggtggaggagggcagctgcaccctgcacctggaggccctgggcgtggagctggagagcgtgacagagccccccctggaggaggtgacagaaacagcccccatggagttccggcccctgggcctggagggcccagatggcctggagggccctgagctgagcagctttgagggcatcggcaccagtgacctgtctgctgaggagaaccccctgctggagaagcctgtgtctgagcccagcaccaacccccccagcctggaggaggcccccaacaactgggtgggcaccttcaagaccaccccacctgctgagacagcccccctgccccccctgcctgagagcgagagcctgctgaaggccctgcggcggcaggacaaggagcaggccgaggccctggtgctggagggccgggtgcagatggtggtgatccagggcgagggccgggccttccgctgcccccactgccccttcatcacccggcgggagaaggccctgaacctgcacagcaggacaggctgccagggccggcgggagcccctgctgtgcccagaatgtggggccagcttcaagcagcagaggggcctgagcacccacctgctgaagaagtgccctgtgctgctgaggaagaacaagggcctgcccaggccagacagccccatccccctgcagcctgtgctgcccggcacccaggccagcgaggacacagaaagtggcaagcccccaccagccagccaggaggccgagctgctgctgcccaaggatgcccccctggagctgccccgggagcctgaggagacagaggagcccctggccaccgtgtctggcagccctgtgcccccagctggcaacagcctgcccacagaggcccccaagaagcactgctttgatcctgtgcccccagctggcaacagcagccccacagaggcccccaagaagcaccacctggaccctgtgcccccagctggcaacagcagccccacagaggccctgaagaagcacagatttgagcagggcaagttccactgcaacagctgccccttcctgtgcagccggctgagcagcatcaccagccacgtggccgagggctgccggggcggccggggcggcggcggcaagaggggcaccccccagacccagccagatgtgagccccctgagcaatggagacagcgccccacccaagaatggcagcacagagagcagcagtggagatggagacacagtgctggtgcagaagcagaagggggcccgcttcagctgccccacctgccccttcagctgccagcaggagcgggccctgcggacccaccagatccggggctgccccctggaggagagcggggagctgcactgcagcctgtgccccttcaccgccccagctgccacagccctgcggctgcaccagaagaggaggcaccccacagctgccccagcccggggcccccggccccacctgcagtgtggggactgtggcttcacctgcaagcagagccgctgcatgcagcagcaccggcggctgaagcatgagggcgtgaagccccaccagtgccccttctgtgacttcagcaccacccggcgctaccgcctggaggcccaccagagccgccacactggaattggccgcatcccctgcagcagctgcccccagaccttcggcaccaacagcaagctgcggctgcaccggctgcgggtgcatgacaagacccccacccacttctgccccctgtgtgactacagcggctacctgcggcatgacatcaccaggcatgtgaacagctgccaccagggcaccccagcctttgcctgcagccagtgtgaggcccagttcagcagcgagacagccctgaagcagcacgccctgcggcggcaccctgagcccgcccagcctgcccctggcagccctgctgagaccacagagggccccctgcactgcagccgctgtggcctgctgtgccccagccctgccagcctgcggggccacaccaggaagcagcacccccggctggagtgtggggcctgccaggaggccttccccagccggctggccctggatgagcaccggcggcagcagcacttcagccaccgctgccagctgtgtgactttgctgcccgggagcgggtgggcctggtgaagcactacctggagcagcacgaggagaccagcgctgctgtggccgccagtgatggagatggagatgctggccagccccccctgcactgccccttctgtgacttcacctgccgccaccagctggtgctggaccaccacgtgaagggccacggcggcacccggctgtacaagtgcacagactgtgcctacagcaccaagaaccggcagaagatcacctggcacagccgcatccacactggagagaagccctaccactgccacctgtgcccctatgcctgtgccgaccccagccggctgaagtaccacatgaggatccacaaggaggagaggaagtacctgtgcccagaatgtggctacaagtgcaagtgggtgaaccagctgaagtaccacatgaccaagcacacaggcctgaagccctaccagtgcccagaatgtgagtactgcaccaacagagcagatgccctgcgggtgcaccaggagaccaggcaccgggaggcccgggccttcatgtgtgagcagtgtgggaaggccttcaagacccgcttcctgctgcggacccacctgaggaagcacagcgaggccaagccctacgtgtgcaatgtgtgccaccgggccttccgctgggccgccggcctgcggcaccacgccctgacccacacagacagacaccccttcttctgccgcctgtgcaactacaaggccaagcagaagttccaggtggtgaagcacgtgagaagacaccacccagaccaggccgaccccaaccagggcgtgggcaaggaccccaccacccccaccgtgcacctgcatgatgtgcagctggaggaccccagccccccagccccagctgccccccacactggacctgagggctag

SEQ ID NO: 176515 - DNA, 45 bp, synthetic construct
  misc_feature 1..45: note = Description of Artificial Sequence: Synthetic coding sequence
  source 1..45: mol_type = other DNA
atgacagaccccctgctggacagccagcctgccagcagcacctag

SEQ ID NO: 176516 - DNA, 5064 bp, synthetic construct; identical to SEQ ID NO: 176514
  misc_feature 1..5064: note = Description of Artificial Sequence: Synthetic coding sequence
  source 1..5064: mol_type = other DNA

SEQ ID NO: 176517 - DNA, 81 bp, synthetic construct
  misc_feature 1..81: note = Description of Artificial Sequence: Synthetic coding sequence
  source 1..81: mol_type = other DNA
atgacagaccccctgctggacagccagcctgccagcagcactggagagatggatggcctgtgcccagagctgctgctgtag

SEQ ID NO: 176518 - DNA, 1824 bp, synthetic construct
  misc_feature 1..1824: note = Description of Artificial Sequence: Synthetic coding sequence
  source 1..1824: mol_type = other DNA
atgctgctggcccagatcaacagagacagccagggcatgacagagttccctgggggcggcatggaggcccagcacgtgaccctgtgcctgacagaagctgtgacagtggctgatgccaagctgattgatggccaggtgatccagctggaggatggcagcgctgcctacgtgcagcacgtgcccatccccaagagcactggagacagcctgcggctggaggatggccaggccgtgcagctggaggatggcaccacagccttcatccaccacaccagcaaggacagctatgaccagagcgccctgcaggccgtgcagctggaggatggcaccacagcctacatccaccacgctgtgcaggtgccccagagcgacaccatcctggccatccaggctgatggcaccgtggccggcctgcacactggagatgccaccattgatcctgacaccatcagcgccctggagcagtatgctgccaaggtgtccattgatggcagcgagagcgtggccggcaccggcatgattggagaaaatgagcaggagaagaagatgcagatcgtgctgcagggccacgccaccagggtgacagccaagagccagcagagcggggagaaggccttccgctgtgaatatgatggctgcggcaagctgtacaccacagcccaccacctgaaggtgcatgagaggagccacactggagaccggccctaccagtgtgagcacgccggctgcggcaaggcctttgccaccggctacggcctgaagagccacgtgaggacccacactggagagaagccctaccgctgcagcgaggacaactgcaccaagagcttcaagaccagcggggacctgcagaagcacatccgcacccacactggagagcggcccttcaagtgcccctttgagggctgcggccgctccttcaccaccagcaacatcaggaaggtgcacgtgaggacccacactggagagcggccctactactgcacagagcccggctgcggccgggcctttgccagcgccaccaactacaagaaccacgtgcgcatccacactggagagaagccctacgtgtgcaccgtgcccggctgtgacaagcgcttcacagagtacagcagcctgtacaagcaccacgtggtgcacacccacagcaagccctacaactgcaaccactgcggcaagacctacaagcagatcagcaccctggccatgcacaagaggacagcccacaatgacacagagcccatcgaggaggagcaggaggccttctttgagcccccacctggccagggagaagatgtgctgaagggcagccagatcacctacgtgactggagtggagggagatgatgtggtgtccacccaggtggccaccgtgacccagagcggcctgagccagcaggtgaccctcatcagccaggacggcacccagcacgtgaacatcagccaggccgacatgcaggccatcggcaacaccatcaccatggtgacccaggacggcacccccatcaccgtgcctgcccatgatgctgtgatcagcagcgctggcacccacagcgtggccatggtgacagctgagggcacagaaggagagcaggtggccatcgtggcccaggacctggccgccttccacacagccagcagcgagatgggccaccagcagcacagccaccacctggtgaccacagagacccggcccctgaccctggtggccaccagcaatggcacccagattgctgtgcagctgggggagcagcccagcctggaggaggccatcagaattgccagccgcatccagcagggcgagaccccaggcctggatgactag

SEQ ID NO: 176519 - DNA, 1917 bp, synthetic construct
  misc_feature 1..1917: note = Description of Artificial Sequence: Synthetic coding sequence
  source 1..1917: mol_type = other DNA
atgctgctggcccagatcaacagagacagccagggcatgacagagttccctgggggcggcatggaggcccagcacgtgaccctgtgcctgacagaagctgtgacagtggctgatggagacaacctggagaacatggagggcgtgtccctgcaggccgtgaccctggctgatggcagcacagcctacatccagcacaacagcaaggatgccaagctgattgatggccaggtgatccagctggaggatggcagcgctgcctacgtgcagcacgtgcccatccccaagagcactggagacagcctgcggctggaggatggccaggccgtgcagctggaggatggcaccacagccttcatccaccacaccagcaaggacagctatgaccagagcgccctgcaggccgtgcagctggaggatggcaccacagcctacatccaccacgctgtgcaggtgccccagagcgacaccatcctggccatccaggctgatggcaccgtggccggcctgcacactggagatgccaccatcgaccctgacaccatcagcgccctggagcagtatgctgccaaggtgtccattgatggcagcgagagcgtggccggcaccggcatgattggagaaaatgagcaggagaagaagatgcagatcgtgctgcagggccacgccaccagggtgacagccaagagccagcagagcggggagaaggccttccgctgtgaatatgatggctgtgggaagctgtacaccacagcccaccacctgaaggtgcatgagaggagccacactggagaccggccctaccagtgtgaacatgctggctgtgggaaggcctttgccaccggctacggcctgaagagccacgtgaggacccacactggagagaagccctaccgctgcagcgaggacaactgcaccaagagcttcaagaccagcggggacctgcagaagcacatccgcacccacactggagagcggcccttcaagtgcccctttgagggctgcggccgctccttcaccaccagcaacatcaggaaggtgcacgtgaggacccacactggagagcggccctactactgcacagagcccggctgcggccgggcctttgccagcgccaccaactacaagaaccacgtgcgcatccacactggagagaagccctacgtgtgcaccgtgcccggctgtgacaagcgcttcacagagtacagcagcctgtacaagcaccacgtggtgcacacccacagcaagccctacaactgcaaccactgtgggaagacctacaagcagatcagcaccctggccatgcacaagaggacagcccacaatgacacagagcccatcgaggaggagcaggaggccttctttgagcccccacctggccagggagaagatgtgctgaagggcagccagatcacctacgtgactggagtggagggagatgatgtggtgtccacccaggtggccaccgtgacccagagcggcctgagccagcaggtgaccctcatcagccaggacggcacccagcacgtgaacatcagccaggccgacatgcaggccatcggcaacaccatcaccatggtgacccaggacggcacccccatcaccgtgcctgcccatgatgctgtgatcagcagcgctggcacccacagcgtggccatggtgacagctgagggcacagaaggagagcaggtggccatcgtggcccaggacctggccgccttccacacagccagcagcgagatgggccaccagcagcacagccaccacctggtgaccacagagacccggcccctgaccctggtggccaccagcaatggcacccagattgctgtgcagctgggggagcagcccagcctggaggaggccatccgcatcgccagccgcatccagcagggcgagaccccaggcctggatgactag

SEQ ID NO: 176520 - DNA, 429 bp, synthetic construct
  misc_feature 1..429: note = Description of Artificial Sequence: Synthetic coding sequence
  source 1..429: mol_type = other DNA
atgctgctggcccagatcaacagagacagccagggcatgacagagttccctgggggcggcatggaggcccagcacgtgaccctgtgcctgacagaagctgtgacagtggctgatggagacaacctggagaacatggagggcgtgtccctgcaggccgtgaccctggctgatggcagcacagcctacatccagcacaacagcaaggatgccaagctgattgatggccaggtgatccagctggaggatggcagcgctgcctacgtgcagcacgtgcccatccccaagagccgggacagcctgcggctggaggatggccaggccgtgcagctggaggatggcaccacagccttcatccaccacaccagcaaggacagctatgaccagagcgccctgcaggccgtgcagctggaggatggcaccacagcctag

SEQ ID NO: 176521 - DNA, 255 bp, synthetic construct
  misc_feature 1..255: note = Description of Artificial Sequence: Synthetic coding sequence
  source 1..255: mol_type = other DNA
atgctgctggcccagatcaacagagacagccagggcatgacagagttccctgggggcggcatggaggcccagcacgtgaccctgtgcctgacagaagctgtgacagtggctgatggagacaacctggagaacatggagggcgtgtccctgcaggccgtgaccctggctgatggcagcacagcctacatccagcacaacagcaaggatgccaagctgattgatggccaggtgatccagctggaggatggcagctag

SEQ ID NO: 176522 - DNA, 222 bp, synthetic construct
  misc_feature 1..222: note = Description of Artificial Sequence: Synthetic coding sequence
  source 1..222: mol_type = other DNA
atgctgctggcccagatcaacagagacagccagggcatgacagagttccctgggggcggcatggaggcccagcacgtgaccctgtgcctgacagaagctgtgacagtggctgatggagacaacctggagaacatggagggcgtgtccctgcaggccgtgaccctggctgatggcagcacagcctacatccagcacaacagcaaggatgccaagctgatctag

SEQ ID NO: 176523 - DNA, 573 bp, synthetic construct
  misc_feature 1..573: note = Description of Artificial Sequence: Synthetic coding sequence
  source 1..573: mol_type = other DNA
atgctgctggcccagatcaacagagacagccagggcatgacagagttccctgggggcggcatggaggcccagcacgtgaccctgtgcctgacagaagctgtgacagtggctgatggagacaacctggagaacatggagggcgtgtccctgcaggccgtgaccctggctgatggcagcacagcctacatccagcacaacagcaaggatgccaagctgattgatggccaggtgatccagctggaggatggcagcgctgcctacgtgcagcacgtgcccatccccaagagcactggagacagcctgcggctggaggatggccaggccgtgcagctggaggatggcaccacagccttcatccaccacaccagcaaggacagctatgaccagagcgccctgcaggccgtgcagctggaggatggcaccacagcctacatccaccacgctgtgcaggtgccccagagcgacaccatcctggccatccaggctgatggcaccgtggccggcctgcacactggagatgccaccatcgaccctgacaccatcagcgccctggagcagtatgctgccaagtag

SEQ ID NO: 176524 - DNA, 411 bp, synthetic construct
  misc_feature 1..411: note = Description of Artificial Sequence: Synthetic coding sequence
  source 1..411: mol_type = other DNA
atgctgctggcccagatcaacagagacagccagggcatgacagagttccctgggggcggcatggaggcccagcacgtgaccctgtgcctgacagaagctgtgacagtggctgatggagacaacctggagaacatggagggcgtgtccctgcaggccgtgaccctggctgatggcagcacagcctacatccagcacaacagcaaggatgccaagctgattgatggccaggtgatccagctggaggatggcagcgctgcctacgtgcagcacgtgcccatccccaagagcactggagacagcctgcggctggaggatggccaggccgtgcagctggaggatggcaccacagccttcatccaccacaccagcaaggacagctatgaccagagcgccctgcaggccgtgcagtag

SEQ ID NO: 176525 - DNA, 528 bp, synthetic construct
  misc_feature 1..528: note = Description of Artificial Sequence: Synthetic coding sequence
  source 1..528: mol_type = other DNA
atgctgctggcccagatcaacagagacagccagggcatgacagagttccctgggggcggcatggaggcccagcacgtgaccctgtgcctgacagaagctgtgacagtggctgatggagacaacctggagaacatggagggcgtgtccctgcaggccgtgaccctggctgatggcagcacagcctacatccagcacaacagcaaggatgccaagctgattgatggccaggtgatccagctggaggatggcagcgctgcctacgtgcagcacgtgcccatccccaagagcactggagacagcctgcggctggaggatggccaggccgtgcagctggaggatggcaccacagccttcatccaccacaccagcaaggacagctatgaccagagcgccctgcaggccgtgcagctggaggatggcaccacagcctacatccaccacgctgtgcaggtgccccagagcgacaccatcctggccatccaggctgatggcaccgtggccggcctgcacactggagatgccacctag

SEQ ID NO: 176526 - DNA, 879 bp, synthetic construct
  misc_feature 1..879: note = Description of Artificial Sequence: Synthetic coding sequence
  source 1..879: mol_type = other DNA
atgagccacctgagccagcagaggatctacagcggggagaacccctttgcctgcaaggtgtgtgggaaggtgttcagccacaagagcaacctgacagagcacgagcacttccacacccgggagaagccctttgaatgtaatgaatgtgggaaggccttcagccagaagcagtatgtgatcaagcaccagaacacccacactggagagaagctgtttgaatgtaatgaatgtgggaagagcttcagccagaaggagaacctgctgacccaccagaagatccacactggagagaagccctttgagtgcaaggactgtgggaaggccttcatccagaagagcaacctgatccgccaccagaggacccacactggagagaagccctttgtgtgcaaggaatgtgggaagaccttcagcggcaagagcaacctgacagagcacgagaagatccacatcggggagaagcccttcaagtgcagtgaatgtggcacagccttcggccagaagaagtacctgatcaagcaccagaacatccacactggagagaagccctatgaatgtaatgaatgtgggaaggccttcagccagaggaccagcctcatcgtgcacgtgcgcatccacagcggggacaagccctatgaatgtaatgtgtgtgggaaggccttcagccagagcagcagcctgactgtgcacgtgcgcagccacactggagagaagccctacggctgcaatgaatgtgggaaggccttcagccagttcagcaccctggccctgcacctgcgcatccacacaggcaagaagccctaccagtgcagtgaatgtgggaaggccttcagccagaagagccaccacatccgccaccagaagatccacacccactag

SEQ ID NO: 176527 - DNA, 879 bp, synthetic construct; identical to SEQ ID NO: 176526
  misc_feature 1..879: note = Description of Artificial Sequence: Synthetic coding sequence
  source 1..879: mol_type = other DNA

SEQ ID NO: 176528 - DNA, 2385 bp, synthetic construct
  misc_feature 1..2385: note = Description of Artificial Sequence: Synthetic coding sequence
  source 1..2385: mol_type = other DNA
atgaacattgatgacaagctggagggcctcttcctgaagtgtggcggcattgatgagatgcagagcagcaggaccatggtggtgatgggcggcgtgtctggccagagcacagtgtctggagagctgcaggacagcgtgctgcaggaccgctccatgccccaccaggagatcctggccgcagatgaggtgctgcaggagagcgagatgaggcagcaggacatgatcagccatgatgagctgatggtgcatgaggagaccgtgaagaatgatgaggagcagatggagacccatgagcggctgccccagggcctgcagtatgccctgaatgtgcccatctctgtgaagcaggagatcaccttcacagatgtgtctgagcagctgatgagggacaagaagcagatccgggagcctgtggacctgcagaagaagaagaagaggaagcagaggagccctgccaagatcctgaccatcaatgaagatggcagcctgggcctgaagacccccaagagccacgtgtgtgagcactgcaatgctgccttccgcaccaactaccacctgcagagacatgtgttcatccacactggagagaagcccttccagtgcagccagtgtgacatgaggttcatccagaagtacctgctgcagagacatgagaagatccacactggagagaagcccttccgctgtgatgaatgtggcatgaggttcatccagaagtaccacatggagcggcacaagaggacccacagcggggagaagccctaccagtgtgagtactgcctgcagtacttcagcaggacagacagagtgctgaagcacaagaggatgtgccatgaaaatcatgacaagaagctgaacagatgtgccatcaagggcggcctgctgaccagtgaagaagattctggcttcagcaccagccccaaggacaacagcctgcccaagaagaagaggcagaagacagagaagaagagcagcggcatggacaaggagagcgccctggacaagagtgacctgaagaaggacaagaatgactacctgcccctgtacagcagcagcaccaaggtgaaggatgagtacatggtggccgagtatgctgtggagatgccccacagctctgtgggcggcagccacctggaggatgccagcggggagatccacccccccaagctggtgctgaagaagatcaacagcaagaggagcctgaagcagcccctggagcagaaccagaccatcagccccctgagcacctatgaggagagcaaggtgtccaaatatgcctttgagctggtggacaagcaggccctgctggacagcgagggcaatgctgacatcgaccaggtggacaacctgcaggagggccccagcaagcctgtgcacagcagcaccaactatgatgatgccatgcagttcctgaagaagaagcgctacctgcaggccgccagcaacaacagccgggagtatgccctgaatgtgggcaccatcgccagccagcccagcgtgacccaggccgctgtggcctctgtgattgatgagagcaccacagccagcatcctggagagccaggccctgaatgtggagatcaagagcaaccacgacaagaatgtcatcccagatgaggtgctgcagaccctgctggaccactacagccacaaggccaacggccagcacgagatctccttctctgtggccgacacagaggtgaccagcagcatcagcatcaacagcagcgaggtgcctgaggtgacccccagtgaaaatgtgggcagcagcagccaggccagcagcagtgacaaggccaacatgctgcaggagtacagcaagttcctgcagcaggccctggacaggaccagccagaatgatgcctacctgaacagccccagcctgaactttgtgacagacaaccagaccctgcccaaccagcctgccttcagcagcattgacaagcaggtgtatgccaccatgcccatcaacagcttccgcagcggcatgaacagccccctgcggaccaccccagacaagagccacttcggcctgattgtgggggacagccagcacagcttccccttctctggagatgagaccaaccacgccagcgccaccagcacccaggacttcctggaccaggtgaccagccagaagaaggccgaggcccagcctgtgcaccaggcctaccagatgagcagctttgagcagcccttccgggccccctaccacggcagccgggccggcatcgccacccagttcagcacagccaacggccaggtgaacctgcggggccctggcaccagcgctgagttcagcgagttccccctggtgaatgtgaatgacaacagagctggcatgaccagcagcccagatgccaccaccggccagacctttggatag

SEQ ID NO: 176529 - DNA, 252 bp, synthetic construct
  misc_feature 1..252: note = Description of Artificial Sequence: Synthetic coding sequence
  source 1..252: mol_type = other DNA
atgaacattgatgacaagctggagggcctcttcctgaagtgtggcggcattgatgagatgcagagcagcaggaccatggtggtgatgggcggcgtgtctggccagagcacagtgtctggagagctgcaggacagcgtgctgcaggaccgctccatgccccaccaggagatcctggccgcagatgaggtgctgcaggagagcgagatgaggcagcaggacatgatcagccatgatgagctgatggtgcactag

SEQ ID NO: 176530 - DNA, 435 bp, synthetic construct
  misc_feature 1..435: note = Description of Artificial Sequence: Synthetic coding sequence
  source 1..435: mol_type = other DNA
atgaagggggagaagcccttccagtgcagccagtgtgacatgaggttcatccagaagtacctgctgcagagacatgagaagatccacactggagagaagcccttccgctgtgatgaatgtggagatgagaccaaccacgccagcgccaccagcacccaggacttcctggaccaggtgaccagccagaagaaggccgaggcccagcctgtgcaccaggcctaccagatgagcagctttgagcagcccttccgggccccctaccacggcagccgggccggcatcgccacccagttcagcacagccaacggccaggtgaacctgcggggccctggcaccagcgctgagttcagcgagttccccctggtgaatgtgaatgacaacagagctggcatgaccagcagcccagatgccaccaccggccagacctttggatag

SEQ ID NO: 176531 - DNA, 78 bp, synthetic construct
  misc_feature 1..78: note = Description of Artificial Sequence: Synthetic coding sequence
  source 1..78: mol_type = other DNA
atgaacattgatgacaagctggagggcctcttcctgaagtgtggcggcattgatgagatgcagagcagcaggacatag

SEQ ID NO: 176532 - DNA, 2385 bp, synthetic construct; identical to SEQ ID NO: 176528
  misc_feature 1..2385: note = Description of Artificial Sequence: Synthetic coding sequence
  source 1..2385: mol_type = other DNA

SEQ ID NO: 176533 - DNA, 2385 bp, synthetic construct; identical to SEQ ID NO: 176528
  misc_feature 1..2385: note = Description of Artificial Sequence: Synthetic coding sequence
  source 1..2385: mol_type = other DNA

SEQ ID NO: 176534 - DNA, 2385 bp, synthetic construct; identical to SEQ ID NO: 176528
  misc_feature 1..2385: note = Description of Artificial Sequence: Synthetic coding sequence
  source 1..2385: mol_type = other DNA

SEQ ID NO: 176535 - DNA, 228 bp, synthetic construct
  misc_feature 1..228: note = Description of Artificial Sequence: Synthetic coding sequence
  source 1..228: mol_type = other DNA
atgaacattgatgacaagctggagggcctcttcctgaagtgtggcggcattgatgagatgcagagcagcaggaccatggtggtgatgggcggcgtgtctggccagagcacagtgtctggagagctgcaggacagcgtgctgcaggaccgctccatgccccaccaggagatcctggccgcagatgaggtgctgcaggagagcgagatgaggcagcaggacatgatctag

SEQ ID NO: 176536 - DNA, 1365 bp, synthetic construct
  misc_feature 1..1365: note = Description of Artificial Sequence: Synthetic coding sequence
  source 1..1365: mol_type = other DNA
atgaacattgatgacaagctggagggcctcttcctgaagtgtggcggcattgatgagatgcagagcagcaggaccatggtggtgatgggcggcgtgtctggccagagcacagtgtctggagagctgcaggacagcgtgctgcaggaccgctccatgccccaccaggagatcctggccgcagatgaggtgctgcaggagagcgagatgaggcagcaggacatgatcagccatgatgagctgatggtgcatgaggagaccgtgaagaatgatgaggagcagatggagacccatgagcggctgccccagggcctgcagtatgccctgaatgtgcccatctctgtgaagcaggagatcaccttcacagatgtgtctgagcagctgatgagggacaagaagcagatccgggagcctgtggacctgcagaagaagaagaagaggaagcagaggagccctgccaagatcctgaccatcaatgaagatggcagcctgggcctgaagacccccaagagccacgtgtgtgagcactgcaatgctgccttccgcaccaactaccacctgcagagacatgtgttcatccacactggagagaagcccttccagtgcagccagtgtgacatgaggttcatccagaagtacctgctgcagagacatgagaagatccacactggagagaagcccttccgctgtgatgaatgtggcatgaggttcatccagaagtaccacatggagcggcacaagaggacccacagcggggagaagccctaccagtgtgagtactgcctgcagtacttcagcaggacagacagagtgctgaagcacaagaggatgtgccatgaaaatcatgacaagaagctgaacagatgtgccatcaagggcggcctgctgaccagtgaagaagattctggcttcagcaccagccccaaggacaacagcctgcccaagaagaagaggcagaagacagagaagaagagcagcggcatggacaaggagagcgccctggacaagagtgacctgaagaaggacaagaatgactacctgcccctgtacagcagcagcaccaaggtgaaggatgagtacatggtggccgagtatgctgtggagatgccccacagctctgtgggcggcagccacctggaggatgccagcggggagatccacccccccaagctggtgctgaagaagatcaacagcaagaggagcctgaagcagcccctggagcagaaccagaccatcagccccctgagcacctatgaggagagcaagttccagagcatgctgctgaacctgtggatcaaccggctgtactggacccagaaggccatgctgaccctcatccgcctcatcatctgcagaagagcccagtag

SEQ ID NO: 176537 - DNA, 396 bp, synthetic construct
  misc_feature 1..396: note = Description of Artificial Sequence: Synthetic coding sequence
  source 1..396: mol_type = other DNA
atgaggttcatccagaagtacctgctgcagagacatgagaagatccacactggagagaagcccttccgctgtgatgaatgtggagatgagaccaaccacgccagcgccaccagcacccaggacttcctggaccaggtgaccagccagaagaaggccgaggcccagcctgtgcaccaggcctaccagatgagcagctttgagcagcccttccgggccccctaccacggcagcagagctggcatcgccacccagttcagcacagccaacggccaggtgaacctgcggggccctggcaccagcgctgagttcagcgagttccccctggtgaatgtgaatgacaacagagctggcatgaccagcagcccagatgccaccaccggccagaccttcggctag

SEQ ID NO: 176538 - DNA, 432 bp, synthetic construct
  misc_feature 1..432: note = Description of Artificial Sequence: Synthetic coding sequence
  source 1..432: mol_type = other DNA
aagacccactacaactgtggggagcacaccaaggccttcagcggcaagcacaccctggtgcagcagcagaggaccctgaccacagagcgctgctacatctgcagtgaatgtgggaagagcttcagcaacaagagcaacctgatcaagcacagaagagtgcacactggagagcggccctatgaatgttctgaatgtgggaagagcttcagccagaggtctgccctgctgcagcaccggggcgtgcacactggagagcggccctatgaatgttctgaatgtgggaagttcttcacctaccacagcagcctcatcaagcaccagaaggtgcacagcggcagccggccctatgaatgttctgaatgtgggaagagcttcagccagaacagcagcctcatcgagcaccaccgggtgcacactggagagcggccctag

SEQ ID NO: 176539 - DNA, 1314 bp, synthetic construct
  misc_feature 1..1314: note = Description of Artificial Sequence: Synthetic coding sequence
  source 1..1314: mol_type = other DNA
atggctgctgccaccctgcggacccccacccagggcaccgtgacctttgaagatgtggccgtgcacttctcctgggaggagtggggcctgctggatgaggcccagcgctgcctgtacagagatgtgatgctggagaacctggccctgctgaccagcctggatgtgcaccaccagaagcagcacctgggggagaagcacttccgcagcaatgtgggccgggccctgtttgtgaagacctgcaccttccacgtgtctggagagcccagcacctgccgggaggtgggcaaggacttcctggccaagctgggcttcctgcaccagcaggccgcccacactggagagcagagcaacagcaagagtgatggaggagccatcagccaccggggcaagacccactacaactgtggggagcacaccaaggccttcagcggcaagcacaccctggtgcagcagcagaggaccctgaccacagagcgctgctacatctgcagtgaatgtgggaagagcttcagcaagagctacagcctgaatgaccactggaggctgcacactggagagaagccctatgagtgcagagaatgtgggaagagcttccggcagagcagcagcctcatccagcaccggcgggtgcacacagctgtgcggccccatgaatgtgatgaatgtgggaagctgttcagcaacaagagcaacctgatcaagcaccggcgggtgcacactggagagcggccctatgagtgcagtgaatgtgggaagagcttcagccagaggtctgccctgctgcagcacagaggagtgcacactggagagcggccctatgagtgcagtgaatgtgggaagttcttcacctaccacagcagcctcatcaagcaccagaaggtgcacagcggcagccggccctatgagtgcagtgaatgtgggaagagcttcagccagaacagcagcctgattgagcaccaccgggtgcacactggagagcggccctacaagtgcagtgaatgtgggaagagcttcagccagaggtctgccctgctgcagcacagaggagtgcacactggagagcggccctatgagtgcagtgaatgtgggaagttcttcccctacagcagcagcctgaggaagcaccagagggtgcacacaggcagccggccctatgagtgcagtgaatgtgggaagagcttcacccagaacagcggcctcatcaagcaccggcgggtgcacactggagagaagccctatgagtgcacagaatgtgggaagagcttcagccacaacagcagcctcatcaagcaccagaggatccacagcaggtag

SEQ ID NO: 176540 - DNA, 1314 bp, synthetic construct; identical to SEQ ID NO: 176539
  misc_feature 1..1314: note = Description of Artificial Sequence: Synthetic coding sequence
  source 1..1314: mol_type = other DNA

SEQ ID NO: 176541 - DNA, 1617 bp, synthetic construct
  misc_feature 1..1617: note = Description of Artificial Sequence: Synthetic coding sequence
  source 1..1617: mol_type = other DNA
atgaccaccttcaaggaggccgtgaccttcaaggatgtggccgtggtgttcacagaggaggagctgggcctgctggaccctgcccagaggaagctgtacagagatgtgatgctggagaacttcaggaacctgctgtctgtgggccaccagcccttccaccaggacacctgccacttcctgcgggaggagaagttctggatgatgggcacagccacccagcgggagggcaacagcggcggcaagatccagacagagctggagagcgtgcctgaggccggggcccacgaggagtggagctgccagcagatctgggagcagatcgccaaggacctgaccaggagccaggacagcatcatcaacaacagccagttctttgaaaatggagatgtgcccagccaggtggaggccggcctgcccaccatccacacaggccagaagcccagccagggcggcaagtgcaagcagagcatcagtgatgtgcccatctttgacctgccccagcagctgtacagcgaggagaagagctacacctgtgatgaatgtgggaagagcatctgctacatcagcgccctgcacgtgcaccagagggtgcacgtgggggagaagctgttcatgtgtgatgtgtgtgggaaggagttcagccagagcagccacctgcagacccaccagagggtgcacactggagagaagcccttcaagtgtgagcagtgtgggaagggcttcagcagaagaagtgccctgaatgtgcacaggaagctgcacactggagagaagccctacatctgtgaggcctgtgggaaggccttcatccatgacagccagctgaaggagcacaagaggatccacactggagagaagcccttcaagtgtgacatctgtgggaagaccttctacttccgcagccggctgaagagccacagcatggtgcacactggagagaagcccttccgctgtgacacctgtgacaagagcttccaccagaggtctgccctgaacagacactgcatggtgcacactggagagaagccctaccgctgtgagcagtgtgggaagggcttcatcggccgcctggacttctacaagcaccaggtggtgcacactggagagaagccctacaactgcaaggaatgtgggaagagcttccgctggagcagctgcctgctgaaccaccagagggtgcacagcggggagaagagcttcaagtgtgaggagtgtgggaagggcttctacaccaacagccagctgagcagccaccagaggagccacagcggggagaagccctacaagtgtgaggagtgtgggaagggctacgtgaccaagttcaacctggacctgcaccagagggtgcacactggagagcggccctacaactgcaaggaatgtgggaagaacttcagccgggccagcagcatcctgaaccacaagaggctgcactgccagaagaagcccttcaagtgtgaggactgtgggaagaggctggtgcacaggacctacaggaaggaccagccccgggactacagcggggagaaccccagcaaatgtgaggactgtggccgccgctacaagaggcggctgaacctggacatcctgctgagcctcttcctgaatgacacctag

SEQ ID NO: 176542 - DNA, 1650 bp, synthetic construct
  misc_feature 1..1650: note = Description of Artificial Sequence: Synthetic coding sequence
  source 1..1650: mol_type = other DNA
atgatcaagaggagcaaggtgctggtgttctgcagcaagatcatggaggaggccgtgaccttcaaggatgtggccgtggtgttcacagaggaggagctgggcctgctggaccctgcccagaggaagctgtacagagatgtgatgctggagaacttcaggaacctgctgtctgtgggccaccagcccttccaccaggacacctgccacttcctgcgggaggagaagttctggatgatgggcacagccacccagcgggagggcaacagcggcggcaagatccagacagagctggagagcgtgcctgaggccggggcccacgaggagtggagctgccagcagatctgggagcagatcgccaaggacctgaccaggagccaggacagcatcatcaacaacagccagttctttgaaaatggagatgtgcccagccaggtggaggccggcctgcccaccatccacacaggccagaagcccagccagggcggcaagtgcaagcagagcatcagtgatgtgcccatctttgacctgccccagcagctgtacagcgaggagaagagctacacctgtgatgaatgtgggaagagcatctgctacatcagcgccctgcacgtgcaccagagggtgcacgtgggggagaagctgttcatgtgtgatgtgtgtgggaaggagttcagccagagcagccacctgcagacccaccagagggtgcacactggagagaagcccttcaagtgtgagcagtgtgggaagggcttcagccgccgcagcgccctgaatgtgcacaggaagctgcacactggagagaagccctacatctgtgaggcctgtgggaaggccttcatccatgacagccagctgaaggagcacaagaggatccacactggagagaagcccttcaagtgtgacatctgtgggaagaccttctacttccgcagccggctgaagagccacagcatggtgcacactggagagaagcccttccgctgtgacacctgtgacaagagcttccaccagaggtctgccctgaacagacactgcatggtgcacactggagagaagccctaccgctgtgagcagtgtgggaagggcttcatcggccgcctggacttctacaagcaccaggtggtgcacactggagagaagccctacaactgcaaggaatgtgggaagagcttccgctggagcagctgcctgctgaaccaccagagggtgcacagcggggagaagagcttcaagtgtgaagaatgtgggaagggcttctacaccaacagccagctgagcagccaccagaggagccacagcggggagaagccctacaagtgtgaagaatgtgggaagggctacgtgaccaagttcaacctggacctgcaccagagggtgcacactggagagcggccctacaactgcaaggaatgtgggaagaacttcagccgggccagcagcatcctgaaccacaagaggctgcactgccagaagaagcccttcaagtgtgaggactgtgggaagaggctggtgcacaggacctacaggaaggaccagccccgggactacagcggggagaaccccagcaaatgtgaggactgtggccgccgctacaagaggcggctgaacctggacatcctgctgagcctcttcctgaatgacacctag

SEQ ID NO: 176543 - DNA, 693 bp, synthetic construct
  misc_feature 1..693: note = Description of Artificial Sequence: Synthetic coding sequence
  source 1..693: mol_type = other DNA
atggtgatgagccccccccggctgaagcaggactacccccagttcatccaggacaggaacctgccccgggtgggctctgtgaacagccccagcgtgatgttccccagcctcatcttcctgagcagctacacccagaagaggagcctcatccacgtgatgtctgtggagaaggcctctgtgaccagccagctgttcatgttcatccgggagagcacctgggagaggaacagcctgtgtgtgatgtgtgtggccaggaacctggtgaaggcccacatctgcaagctgatccgggagagcaccctggagaggaaccacagcaatgtgtccaatgtgggcaaggtgtctgtggtggaccagcacctgatgttcatcgtgaactacacccaggagaggaacctgacctttgtgcgccacgtgggccggcccagcttcatgatccccagcctgaggaacatccgggagagcatcctgggcaggaaccacagcaatgtcatctacgtggtgcggcccagcatcctgggccaggacctgcgggccatcccctggttcacccaggagaagaaccacctgggcgtcatccacgtgatccgggccttcatccgggaccagcacctgattggcatcgcctggagcacccaggagaggaacagaacagatgtgtcctctgtggagaaggccctgctggtgggctag

SEQ ID NO: 176544 - DNA, 1521 bp, synthetic construct
  misc_feature 1..1521: note = Description of Artificial Sequence: Synthetic coding sequence
  source 1..1521: mol_type = other DNA
atgcctgccaacggcaccagcccccagcgcttccctgccctgatccctggagagcccggccgcagctttgagggctctgtgtcctttgaagatgtggccgtggacttcacccggcaggagtggcaccggctggaccctgcccagaggaccatgcacaaggatgtgatgctggagacctacagcaacctggcctctgtgggcctgtgtgtggccaagccagagatgatcttcaagctggagcggggggaggagctgtggatcctggaggaggagagcagcggccacggctacagcggcagcctgagcctgctgtgtggaaatggatctgtgggggacaatgccctgcggcatgacaatgacctgctgcaccaccagaagatccagaccctggaccagaatgtggagtacaacggctgcaggaaggccttccacgagaagacaggctttgtgcggaggaagaggacccccaggggggacaagaactttgaatgtcatgaatgtgggaaggcctactgcaggaagagcaacctggtggagcacctgcgcatccacactggagagcggccctatgaatgtggggagtgtgccaagaccttcagcgcccggagctacctgattgcccaccagaagacccacactggagagcggccctttgaatgtaatgaatgtgggaagagctttggaaggaagagccagctgatcctgcacaccaggacccacactggagagcggccctatgaatgtacagaatgtgggaagaccttcagcgagaaggccaccctgaccatccaccagaggacccacactggagagaagccctatgaatgttctgaatgtgggaagaccttccgggtgaagatcagcctgacccagcaccacaggacccacactggagagaagccctatgaatgtggggagtgtgggaagaacttccgggccaagaagagcctgaaccagcaccagaggatccacactggagagaagccctatgaatgtggggagtgtgggaagttcttcaggatgaagatgaccctgaacaaccaccagaggacccacactggagagaagccctaccagtgcaatgaatgtgggaagagcttccgggtgcacagcagcctgggcatccaccagaggatccacactggagagaagccctatgaatgtaatgaatgtggaaatgccttctacgtgaaggcccggctcatcgagcaccagaggatgcacagcggggagaagccctatgaatgttctgaatgtgggaagatcttctccatgaagaagagcctgtgccagcacaggaggacccacactggagagaagccctatgaatgttctgaatgtggaaatgccttctacgtgaaggtgcggctcatcgagcaccagaggatccacactggagagcggccctttgagtgccaggagtgtgggaaggccttctgcaggaaggcccacctgacagagcaccagaggacccacatcggctggagctggcgctgcaccatgaagaaggccagccactag

SEQ ID NO: 176545 - DNA, 2049 bp, synthetic construct
  misc_feature 1..2049: note = Description of Artificial Sequence: Synthetic coding sequence
  source 1..2049: mol_type = other DNA
atgcccagcctgcggacccggcgggaggaggccgagatggagctgtctgtgcccggccccagcccctggaccccagctgcccaggcccgggtgagagatgccccagctgtgacccaccctggcagcgctgcctgtggcaccccctgctgcagcgacacagagctggaggccatctgcccccactaccagcagcctgactgtgacaccaggacagaggacaaggagttcctgcacaaggaggacatccacgaggacctggagagccaggccgagatcagcgagaactatgctggagatgtgtcccaggtgcctgagctgggggacctgtgtgatgatgtgtctgagcgggactggggcgtgcctgagggccggcggctgccccagagcctgagccaggagggggacttcaccccagctgccatgggcctgctgcggggccccctgggggagaaggacctggactgcaatggatttgacagccgcttcagcctgagccccaacctgatggcctgccaggagatccccacagaggagcggccccacccctatgacatgggcggccagagcttccagcacagcgtggacctgactggacatgaaggagtgcccacagctgagagccccctcatctgcaatgaatgtgggaagaccttccagggcaacccagacctgatccagaggcagatcgtgcacactggagaggccagcttcatgtgtgatgactgtgggaagaccttcagccagaacagcgtgctgaagaacagacacaggagccacatgtctgagaaggcctaccagtgcagtgaatgtgggaaggccttccggggccacagcgacttcagccgccaccagagccaccacagcagcgagcggccctacatgtgcaatgaatgtgggaaggccttcagccagaacagcagcctgaagaagcaccagaagagccacatgtctgagaagccctatgagtgcaatgaatgtgggaaggccttcagaagaagcagcaacctgatccagcaccagaggatccacagcggggagaagccctacgtgtgcagtgaatgtgggaaggccttcagaagaagcagcaacctgatcaagcaccacaggacccacactggagagaagccctttgaatgtggagaatgtgggaaggccttcagccagagcgcccacctgaggaagcaccagagggtgcacactggagagaagccctatgagtgcaatgactgtgggaagcccttcagccgggtgagcaacctgatcaagcaccaccgggtgcacactggagagaagccctacaagtgcagcgactgtgggaaggccttcagccagagcagcagcctcatccagcaccggcgcatccacactggagagaagccccacgtgtgcaatgtgtgtgggaaggccttctcctacagctctgtgctgaggaagcaccagatcatccacactggagagaagccctaccgctgcagcgtgtgtgggaaggccttcagccacagcagcgccctgatccagcaccagggcgtgcacactggagacaagccctatgcctgccatgaatgtgggaagaccttcggccgcagcagcaacctgatcctgcaccagagggtgcacactggagagaagccctatgagtgcacagaatgtgggaagaccttcagccagagcagcaccctcatccagcaccagaggatccacaacggcctgaagccccatgagtgcaaccagtgtgggaaggccttcaacagaagcagcaacctgatccaccaccagaaggtgcacactggagagaagccctacacctgtgtggagtgtgggaagggcttcagccagagcagccacctgatccagcaccagatcatccacactggagagcggccctacaagtgcagtgaatgtgggaaggccttcagccagaggtctgtgctgatccagcaccagaggatccacactggagtgaagccctatgactgtgccgcctgtgggaaggccttcagccagaggagcaagctgatcaagcaccagctgatccacacccgggagtag

SEQ ID NO: 176546 - DNA, 2049 bp, synthetic construct; identical to SEQ ID NO: 176545
  misc_feature 1..2049: note = Description of Artificial Sequence: Synthetic coding sequence
  source 1..2049: mol_type = other DNA

SEQ ID NO: 176547 - DNA, 444 bp, synthetic construct
  misc_feature 1..444: note = Description of Artificial Sequence: Synthetic coding sequence
  source 1..444: mol_type = other DNA
atggccctgacccaggtgcggctgaccttcagagatgtggccatcgagttcagccaggaggagtggaagtgcctggaccctgcccagaggatcctgtacagagatgtgatgctggagaactactggaacctggtgtccctgggcctgtgccactttgacatgaacatcatctccatgctggaggagggcaaggagccctggacagtgaagagctgtgtgaagatcgccaggaagcccaggaccccagaatgtgtgaagggcgtggtgacagacctgctgcggcgctggaagcactggctgctgctgctgggcatctgctgccccaagccccacggccgggtgagcagccggctgcggctgagccgcagcctgggccacttcttccacagcgcctttgccaccttcatgggcgtgtgtgacaagagggtgggcagcatcttctag

SEQ ID NO: 176548 - DNA, 2457 bp, synthetic construct
  misc_feature 1..2457: note = Description of Artificial Sequence: Synthetic coding sequence
  source 1..2457: mol_type = other DNA
atggccctgacccaggtgcggctgaccttcagagatgtggccatcgagttcagccaggaggagtggaagtgcctggaccctgcccagaggatcctgtacagagatgtgatgctggagaactactggaacctggtgtccctgggcctgtgccactttgacatgaacatcatctccatgctggaggagggcaaggagccctggacagtgaagagctgtgtgaagatcgccaggaagcccaggaccccagaatgtgtgaagggcgtggtgacagacatcccccccaagtgcaccatcaaggacctgctgcccaaggagaagagcagcacagaagctgtgttccacacagtggtgctggagagacatgagagcccagacatcgaggacttctccttcaaggagccccagaagaatgtgcatgactttgagtgccagtggagagatgacaccggcaactacaagggcgtgctgatggcccagaaggagggcaagagggaccagagggacagaagagacatcgagaacaagctgatgaacaaccagctgggcgtgtccttccacagccacctgcctgagctgcagctgttccagggcgagggcaagatgtatgagtgcaaccaggtggagaagagcaccaacaacggcagctctgtgagccccctgcagcagatccccagctctgtgcagacccacaggagcaagaagtaccacgagctgaaccacttcagcctgctgacccagaggaggaaggccaacagctgtgggaagccctacaagtgcaatgaatgtgggaaggccttcacccagaacagcaacctgaccagccaccggcgcatccacagcggggagaagccctacaagtgcagtgaatgtgggaagaccttcaccgtgcgcagcaacctgaccatccaccaggtgatccacactggagagaagccctacaagtgccatgaatgtgggaaggtgttccgccacaacagctacctggccacccaccggcgcatccacactggagagaagccctacaagtgcaatgaatgtgggaaggccttccggggccacagcaacctgaccacccaccagctgatccacactggagagaagcccttcaagtgcaatgaatgtgggaagctgttcacccagaacagccacctgatcagccactggaggatccacactggagagaagccctacaagtgcaatgaatgtgggaaggccttctctgtgcgcagcagcctggccatccaccagaccatccacactggagagaagccctacaagtgcaatgaatgtgggaaggtgttccgctacaacagctacctgggccgccaccggcgggtgcacactggagagaagccctacaagtgcaatgaatgtgggaaggccttctccatgcacagcaacctggccacccaccaggtgatccacacaggcaccaagcccttcaagtgcaatgaatgttccaaggtgttcacccagaacagccagctggccaaccaccggcgcatccacactggagagaagccctacaagtgcaatgaatgtgggaaggccttctctgtgcgcagcagcctgaccacccaccaggccatccacagcggggagaagccctacaagtgcattgaatgtgggaagagcttcacccagaagagccacctgcggagccaccggggcatccacagcggggagaagccctacaagtgcaatgaatgtgggaaggtgtttgcccagaccagccagctggcccggcactggagggtgcacactggagagaagccctacaagtgcaatgactgtggccgggccttcagtgacaggagcagcctgaccttccaccaggccatccacactggagagaagccctacaagtgccatgaatgtgggaaggtgttccgccacaacagctacctggccacccaccggcgcatccacactggagagaagccctacaagtgcaatgaatgtgggaaggccttctccatgcacagcaacctgaccacccacaaggtgatccacactggagagaagccctacaagtgcaaccagtgtgggaaggtgttcacccagaacagccacctggccaaccaccagaggacccacactggagagaagccctaccgctgcaatgaatgtgggaaggccttctctgtgcgcagcagcctgaccacccaccaggccatccacacaggcaagaagccctacaagtgcaatgaatgtgggaaggtgttcacccagaatgcccacctggccaaccaccggcgcatccacactggagagaagccctaccgctgcacagaatgtgggaaggccttccgggtgcgcagcagcctgaccacccacatggccatccacactggagagaagcgctacaagtgcaatgaatgtgggaaggtgttccggcagagcagcaacctggccagccaccacaggatgcacactggagagaagccctacaagtag

SEQ ID NO: 176549 - DNA, 2457 bp, synthetic construct; identical to SEQ ID NO: 176548
  misc_feature 1..2457: note = Description of Artificial Sequence: Synthetic coding sequence
  source 1..2457: mol_type = other DNA

SEQ ID NO: 176550 - DNA, 2457 bp, synthetic construct; identical to SEQ ID NO: 176548
  misc_feature 1..2457: note = Description of Artificial Sequence: Synthetic coding sequence
  source 1..2457: mol_type = other DNA

SEQ ID NO: 176551 - DNA, 1350 bp, synthetic construct
  misc_feature 1..1350: note = Description of Artificial Sequence: Synthetic coding sequence
  source 1..1350: mol_type = other DNA
atggagttcttcatctccatgtctgagaccatcaagtacaatgatgatgaccacaagaccctcttcctgaagaccctgaatgagcagaggctggagggggagttctgtgacatcgccatcgtggtggaggatgtgaagttccgggcccaccgctgtgtgctggccgcctgcagcacctacttcaagaagctgttcaagaagctggaggtggacagcagcagcgtcatcgagattgacttcctgcggagtgacatctttgaggaggtgctgaactacatgtacacagccaagatctctgtgaagaaggaggatgtgaacctgatgatgagcagcggccagatcctgggcatccgcttcctggacaagctgtgcagccagaagagagatgtgagcagcccagatgaaaataatggccagagcaagagcaagtactgcctgaagatcaaccggcccatcggagatgctgctgacacccaggatgatgatgtggaggagatcggggaccaggatgacagccccagtgatgacacagtggagggcaccccacccagccaggaggatggcaagagccccaccaccaccctgcgggtgcaggaggccatcctgaaggagctgggcagcgaggaggtgaggaaggtgaactgctacggccaggaggtggagagcatggagaccccagagagcaaggacctgggcagccagaccccccaggccctgaccttcaatgatggcatgtctgaggtgaaggatgagcagaccccaggctggaccacagctgccagtgacatgaagtttgagtacctgctgtatggccaccaccgggagcagatcgcctgccaggcctgtgggaagaccttcagtgatgagggccgcctgaggaagcatgagaagctgcacacagctgaccggccctttgtgtgtgagatgtgcaccaagggcttcaccacccaggcccacctgaaggagcacctgaagatccacacaggctacaagccctacagctgtgaggtgtgtgggaagagcttcatccgggccccagacctgaagaagcatgagcgggtgcacagcaatgaaagaccatttgcctgccacatgtgtgacaaggccttcaagcacaagagccacctgaaggaccatgaaagaagacacagaggagagaagccctttgtgtgtggcagctgcaccaaggcctttgccaaggccagtgacctgaagagacatgagaacaacatgcacagcgagaggaagcaggtgaccccatctgccatccagagcgagacagagcagctgcaggccgccgccatggctgctgaggccgagcagcagctggagaccatcgcctgcagctag

SEQ ID NO: 176552 - DNA, 1350 bp, synthetic construct; identical to SEQ ID NO: 176551
  misc_feature 1..1350: note = Description of Artificial Sequence: Synthetic coding sequence
  source 1..1350: mol_type = other DNA

SEQ ID NO: 176553 - DNA, 1458 bp, synthetic construct
  misc_feature 1..1458: note = Description of Artificial Sequence: Synthetic coding sequence
  source 1..1458: mol_type = other DNA
atggccacagagcccaagaaggctgctgcccagaacagcccagaagatgagggcctgctgattgtgaagattgaggaggaggagttcatccacggccaggacacctgcctgcagaggtctgagctgctgaagcaggagctgtgccggcagctgttccggcagttctgctaccaggacagccctggcccccgggaggccctgagccggctgcgggagctgtgctgccagtggctgaagccagagatccacaccaaggagcagatcctggagctgctggtgctggagcagttcctgaccatcctgcccggggacctgcaggcctgggtgcatgagcactacccagagagcggggaggaggccgtgaccatcctggaggacctggagcggggcacagatgaggccgtgctgcaggtgcaggcccatgaacatggccaggagatcttccagaagaaggtgagccccccaggccctgccctgaatgtgaagctgcagcctgtggagaccaaggcccactttgacagcagcgagccccagctgctgtgggactgtgacaatgaaagtgagaacagccgctccatgcccaagctggagatctttgagaagattgagagccagaggatcatcagcggccgcatcagcggctacatcagcgaggccagcggggagagccaggacatctgcaagtctgctggccgggtgaagaggcagtgggagaaggagagcggggagagccagaggctgagcagcgcccaggatgagggctttgggaagatcctgacccacaagaacacagtgcggggggagatcatcagccatgatggctgtgaaagaaggctgaacctgaacagcaatgagttcacccaccagaagagctgcaagcacggcacctgtgaccagagcttcaagtggaacagcgacttcatcaaccaccagatcatctatgctggggagaagaaccaccagtatggcaagagcttcaagagccccaagctggccaagcatgctgctgtgttttctggggacaagacccaccagtgcaatgaatgtgggaaggccttccgccacagcagcaagctggcccggcaccagaggatccacactggagagcgctgctatgaatgtaatgaatgtgggaagagctttgctgagagcagtgacctgaccaggcaccggcgcatccacactggagagcggcccttcggctgcaaggaatgtggccgggccttcaacctgaacagccacctgatccgccaccagaggatccacacccgggagaagccctatgaatgttctgaatgtgggaagaccttccgggtgagcagccacctgatccgccacttccgcatccacactggagagaagccctatgaatgttctgaatgtggccgggccttcagccagagcagcaacctgagccagcaccagaggatccacatgagggagaacctgctgatgtag

SEQ ID NO: 176554 - DNA, 1239 bp, synthetic construct
  misc_feature 1..1239: note = Description of Artificial Sequence: Synthetic coding sequence
  source 1..1239: mol_type = other DNA
atgagcctgggcggcagtgacaccatgctgaagggagctgacaccagcgagagcggggccgtcatccggggcaactaccgcctgggcctgagcaagaagagcagcctcttcagccaccagaagcaccacgtgtgcccagaatgtggccggggcttctgccagaggagtgacctgatcaagcaccagaggacccacactggagagaagccctacctgtgcccagaatgtggccgccgcttcagccagaaggccagcctgagcatccaccagaggaagcacagcggggagaagccctacgtgtgcagagaatgtggccgccacttccgctacaccagcagcctgaccaaccacaagaggatccacagcggggagcggccctttgtgtgccaggagtgtggccggggcttccggcagaagatcgccctgctgctgcaccagaggacccacctggaggagaagccctttgtgtgcccagaatgtggccggggcttctgccagaaggccagcctgctgcagcaccagagcagccacactggagagcggcccttcctgtgcctggagtgtggccgctccttccggcagcagagcctgctgctgagccaccaggtgacccacagcggggagaagccctacgtgtgtgctgaatgtggccacagcttccggcagaaggtgaccctcatccgccaccagaggacccacactggagagaagccctacctgtgcccccagtgtggccggggcttcagccagaaggtgaccctgattggccaccagaggacccacactggagagaagccctacctgtgcccagactgtggccggggcttcggccagaaggtgaccctcatccgccaccagaggacccacactggagagaagccctacctgtgccccaagtgtggccgggccttcggcttcaagagcctgctgaccaggcaccagaggacccacagcgaggaggagctgtatgtggacagagtgtgtggccagggcctgggccagaagagccacctgatcagtgaccagaggacccacagcggggagaagccctgcatctgtgatgaatgtggccggggcttcggcttcaagagcgccctgatccgccaccagaggacccacagcggggagaagccctacgtgtgcagagaatgtggccggggcttcagccagaagagccacctgcaccgccacaggaggaccaagagcggccaccagctgctgccccaggaggtgttctag

SEQ ID NO: 176555 - DNA, 291 bp, synthetic construct
  misc_feature 1..291: note = Description of Artificial Sequence: Synthetic coding sequence
  source 1..291: mol_type = other DNA
atgagccctggcctgctgaccaccaggaaggaggccctgatggccttcagagatgtggccgtggccttcacccagaaggagtggaagctgctgagcagcgcccagaggaccctgtaccgggaggtgatgctggagaactacagccacctggtgtccctgggcatcgccttcagcaagcccaagctgattgagcagctggagcagggagatgagccctggagggaggagaatgagcacctgctggacctgtgccctggaagacgcatcaccaggtctggagtgcgggactag

SEQ ID NO: 176556 - DNA, 1812 bp, synthetic construct
  misc_feature 1..1812: note = Description of Artificial Sequence: Synthetic coding sequence
  source 1..1812: mol_type = other DNA
atgagccctggcctgctgaccaccaggaaggaggccctgatggccttcagagatgtggccgtggccttcacccagaaggagtggaagctgctgagcagcgcccagaggaccctgtaccgggaggtgatgctggagaactacagccacctggtgtccctgggcatcgccttcagcaagcccaagctgattgagcagctggagcagggagatgagccctggagggaggagaatgagcacctgctggacctgtgcccagagcccaggacagagttccagcccagcttcccccacctggtggccttcagcagcagccagctgctgcggcagtatgccctgagcggccaccccacccagatcttccccagcagcagcgctggaggagacttccagctggaggccccccgctgcagcagcgagaagggggagagcggggagacagagggccctgacagcagcctgaggaagaggcccagccgcatcagcaggaccttcttcagcccccaccagggcgaccctgtggagtgggtggagggcaaccgggagggcggcacagacctgcggctggcccagaggatgagcctgggcggcagtgacaccatgctgaagggagctgacaccagcgagagcggggctgtgatccggggcaactaccgcctgggcctgagcaagaagagcagcctcttcagccaccagaagcaccacgtgtgcccagaatgtggccggggcttctgccagaggagtgacctgatcaagcaccagaggacccacactggagagaagccctacctgtgcccagaatgtggccgccgcttcagccagaaggccagcctgagcatccaccagaggaagcacagcggggagaagccctacgtgtgccgggagtgtggccgccacttccgctacaccagcagcctgaccaaccacaagaggatccacagcggggagcggccctttgtgtgccaggagtgtggccggggcttccggcagaagatcgccctgctgctgcaccagaggacccacctggaggagaagccctttgtgtgcccagaatgtggccggggcttctgccagaaggccagcctgctgcagcaccagagcagccacactggagagcggcccttcctgtgcctggagtgtggccgctccttccggcagcagagcctgctgctgagccaccaggtgacccacagcggggagaagccctacgtgtgtgccgagtgtggccacagcttccggcagaaggtgaccctcatccgccaccagaggacccacactggagagaagccctacctgtgcccccagtgtggccggggcttcagccagaaggtgaccctcatcggccaccagaggacccacactggagagaagccctacctgtgcccagactgtggccggggcttcggccagaaggtgaccctcatccgccaccagaggacccacactggagagaagccctacctgtgccccaagtgtggccgggccttcggcttcaagagcctgctgaccaggcaccagaggacccacagcgaggaggagctgtatgtggacagagtgtgtggccagggcctgggccagaagagccacctgatcagtgaccagaggacccacagcggggagaagccctgcatctgtgatgaatgtggccggggcttcggcttcaagagcgccctgatccgccaccagaggacccacagcggggagaagccctacgtgtgccgggagtgtggccggggcttcagccagaagagccacctgcaccgccacaggaggaccaagagcggccaccagctgctgccccaggaggtgttctag

SEQ ID NO: 176557 - DNA, 1224 bp, synthetic construct
  misc_feature 1..1224: note = Description of Artificial Sequence: Synthetic coding sequence
  source 1..1224: mol_type = other DNA
atggccgccaagatggagatcaccctgagcagcaacacagaggccagcagcaagcaggagcggcacatcatcgccaagctggaggagaagaggggcccccccctgcagaagaactgcccagaccctgagctgtgccggcagagcttccgccgcttctgctaccaggaggtgtctggcccccaggaggccctgagccagctgcggcagctgtgccggcagtggctgcagcctgagctgcacaccaaggagcagatcctggagctgctggtgatggagcagttcctgaccatcctgcccccagagatccaggcccgggtgcgccaccgctgccccatgagcagcaaggagatcgtgaccctggtggaggacttccaccgggccagcaagaagcccaagcagtgggtggccgtgtgcatgcagggccagaaggtgctgctggagaagacaggcagccagctgggggagcaggagctgcctgacttccagccccagaccccaagaagagacctgcgggagagcagccctgctgagcccagccaggccggggcctatgaccggctgagcccccaccactgggagaagagccccctgctgcaggagcccacccccaagctggccggcacagaggcccccaggatgagaagtgacaacaaggagaacccccagcaggagggcgccaagggggccaagccctgtgctgtgtctgctggccgcagcaaaggaaatggcctgcagaaccctgagcccaggggggccaacatgtctgagccccggctgagccggcggcaggtgagcagccccaatgcccagaagccctttgcccactaccagaggcactgccgggtggagtacatcagcagccccctgaagagccaccccctgcgggagctgaagaagagcaaaggaggcaagaggagcctgagcaaccggctgcagcacctgggccaccagcccaccaggtctgccaagaagccctacaagtgtgatgactgtgggaagagcttcacctggaacagcgagctgaagaggcacaagagggtgcacactggagagcggccctacacctgtggggagtgtggcaactgcttcggccggcagagcaccctgaagctgcaccagaggatccacactggagagaagccctaccagtgtggccagtgtgggaagagcttccggcagagcagcaacctgcaccagcaccaccggctgcaccacggggactag

SEQ ID NO: 176558 - DNA, 705 bp, synthetic construct
  misc_feature 1..705: note = Description of Artificial Sequence: Synthetic coding sequence
  source 1..705: mol_type = other DNA
atggccgccaagatggagatcaccctgagcagcaacacagaggccagcagcaagcaggagcggcacatcatcgccaagctggaggagaagaggggcccccccctgcagaagaactgcccagaccctgagctgtgccggcagagcttccgccgcttctgctaccaggaggtgtctggcccccaggaggccctgagccagctgcggcagctgtgccggcagtggctgcagcctgagctgcacaccaaggagcagatcctggagctgctggtgatggagcagttcctgaccatcctgcccccagagatccaggcccgggtgcgccaccgctgccccatgagcagcaaggagatcgtgaccctggtggaggacttccaccgggccagcaagaagcccaagcagtgggtggccgtgtgcatgcagggccagaaggtgctgctggagaagacaggcagccagctgggggagcaggagctgcctgacttccagccccagaccccaagaagagacctgcgggagagcagccctgctgagcccagccaggccggggcctatgaccggctgagcccccaccactgggagaagagccccctgctgcaggagcccacccccaagctggccggcacagagctgctgattgagaagacagaccccaacatggccacagatgagctgccctgcaagctgtggctgtccttcatcgcctag

SEQ ID NO: 176559 - DNA, 2136 bp, synthetic construct
  misc_feature 1..2136: note = Description of Artificial Sequence: Synthetic coding sequence
  source 1..2136: mol_type = other DNA
atgccagcagatgtgaacctgagccagaagccccaggtgctgggccctgagaagcaggacggcagctgtgaggcctctgtgtcctttgaagatgtgacagtggacttcagccgggaggagtggcagcagctggaccctgcccagcgctgcctgtacagagatgtgatgctggagctgtacagccacctgtttgctgtgggctaccacatccccaaccctgaggtgatcttcaggatgctgaaggagaaggagccccgggtggaggaggccgaggtgagccaccagcgctgccaggagcgggagtttggcctggagatcccccagaaggagatcagcaagaaggccagcttccagaaggacatggtgggggagttcaccagagatggctcctggtgcagcatcctggaggagctgcggctggatgctgacaggaccaagaaggatgagcagaaccagatccagcccatgagccacagcgccttcttcaacaagaagaccctgaacacagagagcaactgtgagtacaaggaccccgggaagatgatccgcacccggccccacctggccagcagccagaagcagccccagaagtgctgcctcttcacagagagcctgaagctgaacctggaggtgaatggccagaatgaaagcaatgacacagagcagctggatgatgtggtgggcagcggccagctgttcagccacagcagcagtgatgcctgcagcaagaacatccacactggagagaccttctgcaagggcaaccagtgcaggaaggtgtgtggccacaagcagagcctgaagcagcaccagatccacacccagaagaagccagatggctgcagtgaatgtggcggcagcttcacccagaagagccacctgtttgcccagcagaggatccacagcgtgggcaacctgcatgaatgtgggaaatgtgggaaggccttcatgccccagctgaagctgtctgtgtacctgacagaccacactggagacatcccctgcatctgcaaggaatgtgggaaggtgttcatccagaggtctgagctgctgacccaccagaagacccacaccaggaagaagccctacaagtgccacgactgtgggaaggccttcttccagatgctgagcctcttccgccaccagaggacccacagccgggagaagctgtatgagtgcagtgaatgtgggaagggcttcagccagaacagcaccctcatcatccaccagaagatccacactggagagcggcagtatgcctgcagtgaatgtgggaaggccttcacccagaagagcaccctgagcctgcaccagaggatccacagcggccagaagagctatgtgtgcattgaatgtggccaggccttcatccagaaggcccacctgattgtgcaccagaggagccacactggagagaagccctaccagtgccacaactgtgggaagagcttcatcagcaagagccagctggacatccaccaccgcatccacactggagagaagccctatgagtgcagcgactgtgggaagaccttcacccagaagagccacctgaacatccaccagaagatccacactggagagcggcaccacgtgtgcagtgaatgtgggaaggccttcaaccagaagagcatcctgtccatgcaccagaggatccacactggagagaagccctacaagtgcagtgaatgtgggaaggccttcaccagcaagagccagttcaaggagcaccagaggatccacactggagagaagccctacgtgtgcacagaatgtgggaaggccttcaacggccgcagcaacttccacaagcaccagatcacccacacccgggagcggccctttgtgtgctacaagtgtgggaaggcctttgtgcagaagtctgagctgatcacccaccagaggacccacatgggagagaagccctatgagtgcctggactgtgggaagagcttcagcaagaagccccagctgaaggtgcaccagaggatccacactggagagcggccctacgtgtgcagtgaatgtgggaaggccttcaacaacagaagcaacttcaacaagcaccagaccacccacacccgggacaagagctacaagtgcagctacagcgtgaagggcttcaccaagcagtag

SEQ ID NO: 176560 - DNA, 966 bp, synthetic construct
  misc_feature 1..966: note = Description of Artificial Sequence: Synthetic coding sequence
  source 1..966: mol_type = other DNA
atggctgctggctggctgaccacctggagccagaacagcgtgaccttccaggaggtggccgtggacttcagccaggaggagtgggccctgctggaccctgcccagaagaacctgtacaaggatgtgatgctggagaacttcaggaacctggcctctgtgggctaccagctgtgccgccacagcctcatcagcaaggtggaccaggagcagctgaagacagatgagcggggcatcctgcagggcgactgtgccgactgggagacccagctgaagcccaaggacaccatcgccatgcagaacatccctgggggcaagaccagcaatggcatcaacaccaactgtgtgaggacccacagcggggagatgccctatgaatgtagtgactgtgggaaggccttcatcttccagagcagcctgaagaagcacatgaggagccacactggagagaagccctatgaatgtgaccactgcggcaagagcttcagccagagcagccacctgaatgtgcacaagaggacccacactggagagaagccctatgactgcaaggaatgtgggaaggccttcaccgtgcccagcagcctgcagaagcacgtgaggacccacactggagagaagccctatgaatgtagtgactgtgggaaggccttcatcgaccagagcagcctgaagaagcacaccaggagccacactggagagaagccctatgagtgcaaccagtgtgggaagagcttcagcacaggcagctacctgattgtgcacaagaggacccacactggagagaagacctatgagtgcaaggaatgtgggaaggccttcaggaacagcagctgcctgcgggtgcacgtgaggacccacactggagagaagccctacaagtgcatccagtgtgagaaggccttcagcaccagcaccaacctgatcatgcacaagaggatccacaacggccagaagctgcacgagtag

SEQ ID NO: 176561 - DNA, 1446 bp, synthetic construct
  misc_feature 1..1446: note = Description of Artificial Sequence: Synthetic coding sequence
  source 1..1446: mol_type = other DNA
atggctgctggctggctgaccacctggagccagaacagcgtgaccttccaggaggtggccgtggacttcagccaggaggagtgggccctgctggaccctgcccagaagaacctgtacaaggatgtgatgctggagaacttcaggaacctggcctctgtgggctaccagctgtgccgccacagcctcatcagcaaggtggaccaggagcagctgaagacagatgagcggggcatcctgcagggcgactgtgccgactgggagacccagctgaagcccaaggacaccatcgccatgcagaacatccctgggggcaagaccagcaatggcatcaacacagctgagaaccagcctggagagcacagcctggagtgcaaccactgcggcaagttcaggaagaacacccgcttcatctgcacccgctactgcaagggggagaagtgctacaagtacatcaagtacagcaaggtgttcaaccaccccagcaccctgcggagccacgtgtccatccacatcggggagaagaccctggagttcacagactgcaggaaggccttcaaccaggagagcagcctgaggaagcacctgcggacccccaccggccagaagttccaggagtatgagcagtgtgacatgtccttcagcctgcacagcagctgcagcgtgcgggagcagatccccactggagagaagggagatgaatgtagtgactatggcaagatcagccccctgtctgtgcacaccaagacaggctctgtggaggagggcctggagtgcaatgaacatgagaagaccttcacagaccccctgagcctgcagaactgtgtgaggacccacagcggggagatgccctatgaatgtagtgactgtgggaaggccttcatcttccagagcagcctgaagaagcacatgaggagccacactggagagaagccctatgaatgtgaccactgcggcaagagcttcagccagagcagccacctgaatgtgcacaagaggacccacactggagagaagccctatgactgcaaggaatgtgggaaggccttcaccgtgcccagcagcctgcagaagcacgtgaggacccacactggagagaagccctatgaatgtagtgactgtgggaaggccttcatcgaccagagcagcctgaagaagcacaccaggagccacactggagagaagccctatgagtgcaaccagtgtgggaagagcttcagcacaggcagctacctgattgtgcacaagaggacccacactggagagaagacctatgagtgcaaggaatgtgggaaggccttcaggaacagcagctgcctgcgggtgcacgtgaggacccacactggagagaagccctacaagtgcatccagtgtgagaaggccttcagcaccagcaccaacctgatcatgcacaagaggatccacaacggccagaagctgcacgagtag

SEQ ID NO: 176562 - DNA, 363 bp, synthetic construct
  misc_feature 1..363: note = Description of Artificial Sequence: Synthetic coding sequence
  source 1..363: mol_type = other DNA
atggctgctggctggctgaccacctggagccagaacagcgtgaccttccaggaggtggccgtggacttcagccaggaggagtgggccctgctggaccctgcccagaagaacctgtacaaggatgtgatgctggagaacttcaggaacctggcctctgtgggctaccagctgtgccgccacagcctcatcagcaaggtggaccaggagcagctgaagacagatgagcggggcatcctgcagggcgactgtgccgactgggagacccagctgaagcccaaggacaccatcgccatgcagaacatccctgggggcaagaccagcaatggcatcaacaccaacccccacggccgggagttcctgtag

SEQ ID NO: 176563 - DNA, 966 bp, synthetic construct; identical to SEQ ID NO: 176560
  misc_feature 1..966: note = Description of Artificial Sequence: Synthetic coding sequence
  source 1..966: mol_type = other DNA

SEQ ID NO: 176564 - DNA, 1650 bp, synthetic construct
  misc_feature 1..1650: note = Description of Artificial Sequence: Synthetic coding sequence
  source 1..1650: mol_type = other DNA
atgcctgtggacctgggccaggccctgggcctgctgcccagcctggccaaggccgaggacagccagttcagcgagagtgatgctgccctgcaggaggagctgagcagccctgagacagcccggcagctgttccggcagttccgctaccaggtgatgagcggcccccatgagaccctgaagcagctgaggaagctgtgcttccagtggctgcagcctgaggtgcacaccaaggagcagatcctggagatcctgatgctggagcagttcctgaccatcctgcccggggagatccagatgtgggtgaggaagcagtgccccggcagcggggaggaggccgtgaccctggtggagagcctgaagggggacccccagaggctgtggcagtggatcagcatccaggtgctgggccaggacatcctgtctgagaagatggagagccccagctgccaggtgggggaggtggagccccacctggaggtggtgccccaggagctgggcctggagaacagcagcagcggccctggagagctgctgagccacatcgtgaaggaggagagtgacacagaggccgagctggccctggccgccagccagcctgcccggctggaggagcggctcatccgggaccaggacctgggcgccagcctgctgcctgctgccccccaggagcagtggaggcagctggacagcacccagaaggagcagtactgggacctgatgctggagacctacggcaagatggtgtctggagctggcatcagccaccccaagagtgacctgaccaacagcattgaatttggagaggagctggccggcatctacctgcacgtgaatgagaagatcccccggcccacctgcattggagaccggcaggagaatgacaaggagaacctgaacctggagaaccaccgggaccaggagctgctgcacgccagctgccaggccagcggggaggtgcccagccaggccagcctgcggggcttcttcacagaagatgagcccggctgctttggagaaggagagaacctgcctgaggccctgcagaacatccaggatgagggcactggagagcagctgagcccccaggagcgcatcagcgagaagcagctgggccagcacctgcccaacccccacagcggggagatgagcaccatgtggctggaggagaagcgggagaccagccagaagggccagccccgggcccccatggcccagaagctgcccacctgccgggagtgtgggaagaccttctacagaaacagccagctgatcttccaccagaggacccacactggagagacctacttccagtgcaccatctgcaagaaggccttcctgcggagcagtgactttgtgaagcaccagaggacccacactggagagaagccctgcaagtgtgactactgtgggaagggcttcagtgacttcagcggcctgcggcaccacgagaagatccacactggagagaagccctacaagtgccccatctgtgagaagagcttcatccagaggagcaacttcaacagacaccagagggtgcacactggagagaagccctacaagtgcagccactgcggcaagagcttctcctggagcagcagcctggacaagcaccagaggagccacctgggcaagaagcccttccagtag

SEQ ID NO: 176565 - DNA, 1650 bp, synthetic construct; identical to SEQ ID NO: 176564
  misc_feature 1..1650: note = Description of Artificial Sequence: Synthetic coding sequence
  source 1..1650: mol_type = other DNA

SEQ ID NO: 176566 - DNA, 1959 bp, synthetic construct
  misc_feature 1..1959: note = Description of Artificial Sequence: Synthetic coding sequence
  source 1..1959: mol_type = other DNA
atgatcaatgcccaggagctgctgaccctggaggatgtgacagtggagttcacctgggaggagtggcagctgctgggccccttccagaaggacctgtacagagatgtgatgctggagatctacagcaacctgctgtccatgggctaccaggtgtccaagccagatgccctgagcaagctggagcggggggaggagccctggaccatggaggatgagcggcacagccgcatctgcccagagaacaatgaggtggatgaccacctgcaggaccacctggagaaccagaggatgctgaagtctgtggagcagtaccacgagcacaatgccttcggcaacacagccagccagaccaagagcctgtgcctcttcagagaaaatcatgacacctttgagctgtacatcaagaccctgaagagcaacctgagcctggtgaaccagaacaagagctgtgagatcaacaacagcaccaagttctctggagatggcaagagcttcctgcacggcaactatgaggagctgtacagcgctgccaagttctctgtgtccaccaaggccaacagcaccaagagccaggtgtccaagcaccagaggacccatgaaattgagaagaaccacgtgtgcagtgaatgtgggaaggcctttgtgaagaagagccagctgacagaccacgagcgggtgcacactggagagaagccctacggctgcaccctgtgtgccaaggtgttcagcaggaagagccggctgaatgagcaccagaggatccacaagcgggagaagagcttcatctgcagtgaatgtgggaaggtgttcaccatgaagagccggctgattgagcaccagaggacccacactggagagaagccctacatctgcaatgaatgtgggaagggcttccctgggaagaggaacctgattgtgcaccagaggaaccacactggagagaagagctacatctgcagtgaatgtgggaagggcttcaccgggaagtccatgctgatcatccaccagaggacccacactggagagaagccctacatctgcagtgaatgtgggaagggcttcaccaccaagcactacgtgatcatccaccagaggaaccacactggagagaagccctacatctgcaatgaatgtgggaagggcttcaccatgaagagcaggatgattgagcaccagaggacccacactggagagaagccctacatctgcagtgaatgtgggaagggcttccccaggaagagcaacctgattgtgcaccagaggaaccacacagtggagaagagctacctgtgcagtgaatgtgggaagggcttcaccgtgaagtccatgctgatcatccaccagaggacccacactggagagaagccctacacctgcagtgaatgtgggaagggcttccccctgaagagccggctgattgtgcaccagaggacccacactggagagaagccctaccgctgcagtgaatgtgggaagggcttcatcgtgaacagcggcctgatgctgcaccagaggacccacactggagagaagccctacatctgcaatgaatgtgggaagggctttgccttcaagagcaacctggtggtgcaccagaggacccacactggagagaagcccttcatgtgcagtgaatgtgggaagggcttcaccatgaagcgctacctgattgtgcaccagcagatccacacagaggagaagagctgcatctgcagtgaatgtggccggggctttgccaaggagacagagctggccctgcacaagcaggtgcacactggagagaagccctacggctgcaatgaatgtgggaagggcttcaccatgaagagccggctgattgtgcaccagaggacccacactggagagaagccctttgtgtgcagtgaatgtaggaaggccttcagcagcaagaggaacctgattgtgcaccagaggacccacaacggcaacaagccctag

SEQ ID NO: 176567 - DNA, 2004 bp, synthetic construct
  misc_feature 1..2004: note = Description of Artificial Sequence: Synthetic coding sequence
  source 1..2004: mol_type = other DNA
atgagggcctgtgccggcagcacccgggaggccggcagcggggcccaggacctgagcaccctgctgtgcctggaggagagcatggaggagcaggatgagaagcccccagagccccccaaggcctgtgcccaggagggcgtgaacttcaagatcgtgacagtggacttcacccgggaggagcagggcacctggaacccagcccagaggaccctggacagagatgtgatcctggagaaccaccgggacctggtgtcctgggacctggccacagctgtgggcaagaaggacagcaccagcaagcagaggatctttgatgaggagcccgccaacggggtgaagattgagcgcttcaccagagatgacccctggctgagcagctgtgaggaggtggatgactgcaaggaccagctggagaagcagcaggagaagcaggagatcctgctgcaggaggtggccttcacccagaggaaggccgtcatccacgagcgggtgtgcaagagtgatgagaccggggagaagagcggcctgaacagcagcctcttcagcagccctgtgatccccatccggaaccacttccacaagcacgtgagccacgccaagaagtggcacctgaatgctgctgtgaacagccaccagaagatcaatgaaaatgagaccctgtatgagaacaatgaatgtgggaagccaccccagagcatccacctgatccagttcaccaggacccagaccaaggacaagtgctacggcttcagtgaccgcatccagagcttctgccacggcacccccctgcacatccacgagaagatccacggcggcggcaagacctttgacttcaaggaatgtggccaggtgctgaaccccaagatcagccacaatgagcagcagaggatcccctttgaggagagccagtacaagtgcagcgagaccagccacagcagcagcctgacccagaacatgaggaacaacagcgaggagaagccctttgagtgcaaccagtgtgggaagagcttctcctggagcagccacctggtggcccaccagaggacccacactggagagaagccctatgaatgttctgaatgtgggaagagcttcagccgcagcagccacctggtgagccaccagaggacccacactggagagaagccctaccgctgcaaccagtgtgggaagagcttcagccagagctatgtgctggtggtgcaccagaggacccacactggagagaagccctatgagtgcaaccagtgtgggaagagcttccggcagagctacaagctgattgcccaccagaggacccacactggagagaagccctatgagtgcaaccagtgtgggaagagcttcatccagagctacaagctgattgcccaccagaggatccacactggagagaagccctatgagtgcaaccagtgtgggaagagcttcagccagagctacaagctggtggcccaccagaggacccacactggagagaagccctttgagtgcaaccagtgtgggaagagcttctcctggagcagccagctggtggcccaccagaggacccacactggagagaagccctatgaatgttctgaatgtgggaagagcttcaacagaagcagccacctggtgatgcaccagaggatccacactggagagaagccctatgagtgcaaccagtgtgggaagagcttcagccagagctatgtgctggtggtgcaccagaggacccacactggagagaagccctatgaatgttcccagtgtgggaagagcttccggcagagcagctgcctgacccagcaccagaggacccacactggagagaagccctttgagtgcaaccagtgtgggaagaccttcagcctgagcgcccggctcatcgtgcaccagaggacccacactggagagaagcccttcacctgcatccagtgtgggaaggccttcatcaacagctacaagctgatccgccaccaggccacccacacagaggagaagctgtatgagtgcaactag

SEQ ID NO: 176568 - DNA, 1848 bp, synthetic construct
  misc_feature 1..1848: note = Description of Artificial Sequence: Synthetic coding sequence
  source 1..1848: mol_type = other DNA
atgccccagctgcagtacccagagggctacctggcccccaaccgctgcctggtgagcaactgtggggtgaacaagatgagcaatgatgagctggtgggccagaaccacggcatggagggggaggcctgcattggaggagatgtgaccttcaatgatgtggccatcgacttcacccatgaggagtggggctggctgagcagcgcccagagggacctgtacaaggatgtgatggtgcagaactatgagaacctggtgtctgtggccggcctgtctgtgaccaagccctacgtgatcaccctgctggaggatggcaaggagccctggatgatggagaagaagctgagcaagggcatgatcccagactgggagagccgctgggagaacaaggagctgagcaccaagaaggacaactatgatgaggacagcccccagaccgtcatcatcgagaaggtggtgaagcagagctatgagttcagcaacagcaagaagaacctggagtacatcgagaagctggagggcaagcacggcagccaggtggaccacttccggcctgccatcctgaccagccgggagagccccacagctgacagcgtgtacaagtacaacatcttccgcagcaccttccacagcaagagcaccctgtctgagccccagaagatctctgctgagggcaacagccacaagtatgacatcctgaagaagaacctgcccaagaagagcgtcatcaagaatgagaaggtgaatggaggcaagaagctgctgaacagcaacaagtctggagctgccttcagccagggcaagagcctgaccctgccccagacctgcaaccgggagaagatctacacctgcagtgaatgtgggaaggccttcggcaagcagagcatcctgaacagacactggaggatccacactggagagaagccctatgagtgcagagaatgtgggaagaccttcagccacggcagcagcctgaccaggcacctgatcagccacagcggggagaagccctacaagtgcattgaatgtgggaaggccttcagccacgtgagcagcctgaccaaccaccagagcacccacactggagagaagccctatgagtgcatgaactgtgggaagagcttcagccgggtgagccacctgattgagcacctgcgcatccacacccaggagaagctgtatgagtgccgcatctgtgggaaggccttcatccacaggagcagcctcatccaccaccagaagatccacactggagagaagccctatgagtgcagagaatgtgggaaggccttctgctgcagcagccacctgaccaggcaccagaggatccacaccatggagaagcagtatgagtgcaacaagtgcctgaaggtgttcagcagcctgtccttcctggtgcagcaccagagcatccacacagaggagaagccctttgagtgccagaagtgcaggaagagcttcaaccagctggagagcctgaacatgcacctgaggaaccacatccggctgaagccctatgagtgcagcatctgtgggaaggccttcagccacaggagcagcctgctgcagcaccaccgcatccacactggagagaagccctatgagtgcatcaagtgtgggaagaccttcagctgcagcagcaacctgactgtgcaccagaggatccacactggagagaagccctacaagtgcaatgaatgtgggaaggccttcagcaagggcagcaacctgacagcccaccagagggtgcacaacggggagaagcccaacagcgtggtgtctgtggagaagcccctggactacatgaaccactacacctgtgagaagagctacagaagagagaccgtgtag

SEQ ID NO: 176569 - DNA, 1404 bp, synthetic construct
  misc_feature 1..1404: note = Description of Artificial Sequence: Synthetic coding sequence
  source 1..1404: mol_type = other DNA
atgccccaggtgaccttcaatgatgtggccatcgacttcacccatgaggagtggggctggctgagcagcgcccagagggacctgtacaaggatgtgatggtgcagaactatgagaacctggtgtctgtgggcctgtctgtgaccaagccctacgtgatcaccctgctggaggatggcaaggagccctggatgatggagaagaagctgagcaagggcatgatcccagactgggagagccgctgggagaacaaggagctgagcaccaagaaggacaactatgatgaggacagcccccagaccgtcatcatcgagaaggtggtgaagcagagctatgagttcagcaacagcaagaagaacctggagtacatcgagaagctggagggcaagcacggcagccaggtggaccacttccggcctgccatcctgaccagccgggagagccccacagctgacagcgtgtacaagtacaacatcttccgcagcaccttccacagcaagagcaccctgtctgagccccagaagatctctgctgagggcaacagccacaagtatgacatcctgaagaagaacctgcccaagaagagcgtcatcaagaatgagaaggtgaatggaggcaagaagctgctgaacagcaacaagagcggggccgccttcagccagggcaagagcctgaccctgccccagacctgcaaccgggagaagatctacacctgcagtgaatgtgggaaggccttcggcaagcagagcatcctgaacagacactggaggatccacactggagagaagccctatgaatgtcgggagtgtgggaagaccttcagccacggcagcagcctgaccaggcacctgatcagccacagcggggagaagccctacaagtgcattgaatgtgggaaggccttcagccacgtgagcagcctgaccaaccaccagagcacccacactggagagaagccctatgagtgcatgaactgtgggaagagcttcagccgggtgagccacctgattgagcacctgcgcatccacacccaggagaagctgtatgaatgtcgcatctgtgggaaggccttcatccacaggagcagcctcatccaccaccagaagatccacactggagagaagccctatgaatgtcgggagtgtgggaaggccttctgctgcagcagccacctgaccaggcaccagaggatccacaccatggagaagcagtatgagtgcaacaagtgcctgaaggtgttcagcagcctgtccttcctggtgcagcaccagagcatccacacagaggagaagccctttgagtgccagaagtgcaggaagagcttcaaccagctggagagcctgaacatgcacctgaggaaccacatcgagaccctgaggatgcagtacatgtgggagagcctgtag

SEQ ID NO: 176570 - DNA, 1713 bp, synthetic construct
  misc_feature 1..1713: note = Description of Artificial Sequence: Synthetic coding sequence
  source 1..1713: mol_type = other DNA
atgccccaggtgaccttcaatgatgtggccatcgacttcacccatgaggagtggggctggctgagcagcgcccagagggacctgtacaaggatgtgatggtgcagaactatgagaacctggtgtctgtgggcctgtctgtgaccaagccctacgtgatcaccctgctggaggatggcaaggagccctggatgatggagaagaagctgagcaagggcatgatcccagactgggagagccgctgggagaacaaggagctgagcaccaagaaggacaactatgatgaggacagcccccagaccgtcatcatcgagaaggtggtgaagcagagctatgagttcagcaacagcaagaagaacctggagtacatcgagaagctggagggcaagcacggcagccaggtggaccacttccggcctgccatcctgaccagccgggagagccccacagctgacagcgtgtacaagtacaacatcttccgcagcaccttccacagcaagagcaccctgtctgagccccagaagatctctgctgagggcaacagccacaagtatgacatcctgaagaagaacctgcccaagaagagcgtcatcaagaatgagaaggtgaatggaggcaagaagctgctgaacagcaacaagagcggggccgccttcagccagggcaagagcctgaccctgccccagacctgcaaccgggagaagatctacacctgcagtgaatgtgggaaggccttcggcaagcagagcatcctgaacagacactggaggatccacactggagagaagccctatgaatgtcgggagtgtgggaagaccttcagccacggcagcagcctgaccaggcacctgatcagccacagcggggagaagccctacaagtgcattgaatgtgggaaggccttcagccacgtgagcagcctgaccaaccaccagagcacccacactggagagaagccctatgagtgcatgaactgtgggaagagcttcagccgggtgagccacctgattgagcacctgcgcatccacacccaggagaagctgtatgaatgtcgcatctgtgggaaggccttcatccacaggagcagcctcatccaccaccagaagatccacactggagagaagccctatgaatgtcgggagtgtgggaaggccttctgctgcagcagccacctgaccaggcaccagaggatccacaccatggagaagcagtatgagtgcaacaagtgcctgaaggtgttcagcagcctgtccttcctggtgcagcaccagagcatccacacagaggagaagccctttgagtgccagaagtgcaggaagagcttcaaccagctggagagcctgaacatgcacctgaggaaccacatccggctgaagccctatgaatgttccatctgtgggaaggccttcagccacaggagcagcctgctgcagcaccaccgcatccacactggagagaagccctatgagtgcatcaagtgtgggaagaccttcagctgcagcagcaacctgactgtgcaccagaggatccacactggagagaagccctacaagtgcaatgaatgtgggaaggccttcagcaagggcagcaacctgacagcccaccagagggtgcacaatggagagaagcccaacagcgtggtgtctgtggagaagcccctggactacatgaaccactacacctgtgagaagagctaccgccgggagaccgtgtag

SEQ ID NO: 176571 - DNA, 1716 bp, synthetic construct
  misc_feature 1..1716: note = Description of Artificial Sequence: Synthetic coding sequence
  source 1..1716: mol_type = other DNA
atgccccaggtgaccttcaatgatgtggccatcgacttcacccatgaggagtggggctggctgagcagcgcccagagggacctgtacaaggatgtgatggtgcagaactatgagaacctggtgtctgtggccggcctgtctgtgaccaagccctacgtgatcaccctgctggaggatggcaaggagccctggatgatggagaagaagctgagcaagggcatgatcccagactgggagagccgctgggagaacaaggagctgagcaccaagaaggacaactatgatgaggacagcccccagaccgtcatcatcgagaaggtggtgaagcagagctatgagttcagcaacagcaagaagaacctggagtacatcgagaagctggagggcaagcacggcagccaggtggaccacttccggcctgccatcctgaccagccgggagagccccacagctgacagcgtgtacaagtacaacatcttccgcagcaccttccacagcaagagcaccctgtctgagccccagaagatctctgctgagggcaacagccacaagtatgacatcctgaagaagaacctgcccaagaagagcgtcatcaagaatgagaaggtgaatggaggcaagaagctgctgaacagcaacaagtctggagctgccttcagccagggcaagagcctgaccctgccccagacctgcaaccgggagaagatctacacctgcagtgaatgtgggaaggccttcggcaagcagagcatcctgaacagacactggaggatccacactggagagaagccctatgagtgcagagaatgtgggaagaccttcagccacggcagcagcctgaccaggcacctgatcagccacagcggggagaagccctacaagtgcattgaatgtgggaaggccttcagccacgtgagcagcctgaccaaccaccagagcacccacactggagagaagccctatgagtgcatgaactgtgggaagagcttcagccgggtgagccacctgattgagcacctgcgcatccacacccaggagaagctgtatgagtgccgcatctgtgggaaggccttcatccacaggagcagcctcatccaccaccagaagatccacactggagagaagccctatgagtgcagagaatgtgggaaggccttctgctgcagcagccacctgaccaggcaccagaggatccacaccatggagaagcagtatgagtgcaacaagtgcctgaaggtgttcagcagcctgtccttcctggtgcagcaccagagcatccacacagaggagaagccctttgagtgccagaagtgcaggaagagcttcaaccagctggagagcctgaacatgcacctgaggaaccacatccggctgaagccctatgagtgcagcatctgtgggaaggccttcagccacaggagcagcctgctgcagcaccaccgcatccacactggagagaagccctatgagtgcatcaagtgtgggaagaccttcagctgcagcagcaacctgactgtgcaccagaggatccacactggagagaagccctacaagtgcaatgaatgtgggaaggccttcagcaagggcagcaacctgacagcccaccagagggtgcacaacggggagaagcccaacagcgtggtgtctgtggagaagcccctggactacatgaaccactacacctgtgagaagagctacagaagagagaccgtgtag

SEQ ID NO: 176572 - DNA, 1920 bp, synthetic construct
  misc_feature 1..1920: note = Description of Artificial Sequence: Synthetic coding sequence
  source 1..1920: mol_type = other DNA
atgaccccagccagcgccagcggagaagattctggcagcttctacagctggcagaaggccaagcgggagcagggcctggtgacctttgaagatgtggccgtggacttcacccaggaggagtggcagtacctgaaccccccccagaggaccctgtacagagatgtgatgctggagacctacagcaacctggtgtttgtgggccagcaggtgaccaagcccaacctgatcctgaagctggaggtggaggagtgcccagctgagggcaagatccccttctggaacttccctgaggtgtgccaggtggatgagcagatcgagcggcagcaccaggatgaccaggacaagtgcctgctgatgcaggtgggcttcagtgacaagaagaccatcatcaccaagagcgcccgggactgccacgagtttggaaacatcctgcacctgagcaccaacctggtggccagcatccagaggccagacaagcatgagagctttggaaacaacatggtggacaacctggacctcttcagccgcagcagcgctgagaacaagtatgacaatggctgtgccaagctgttcttccacacagaatatgagaagaccaaccctggcatgaagccctacggctacaaggaatgtgggaagggcctgcggaggaagaagggcctgagcctgcaccagaggatcaagaatggagagaagccctttgaatgtacagcctgcaggaagaccttcagcaagaagagccacctgattgtgcactggaggacccacactggagagaagcccttcggctgcacagaatgtgggaaggccttcagccagaagagccagctgatcatccacctgcggacccacactggagagcggccctttgaatgtccagaatgtgggaaggccttccgggagaagagcaccgtcatcatccactaccgcacccacactggagagaagccctatgaatgtaatgaatgtgggaaggccttcacccagaagagcaacctgattgtgcaccagaagacccacactggagagaagacctatgaatgtaccaagtgtggggagagcttcatccagaagctggacctgatcatccaccacagcacccacacaggcaagaagccccatgaatgtaatgaatgcaagaagaccttcagtgacaagagcaccctcatcatccaccagaggacccacactggagagaagccccacaagtgcacagaatgtgggaagagcttcaatgagaagagcaccctcatcgtgcaccagaggacccacactggagagaagccctatgaatgtgatgtgtgtgggaagaccttcacccagaagagcaacctgggcgtgcaccagaggacccacagcggggagaagccctttgaatgtaatgaatgtgagaaggccttcagccagaagagctacctgatgctgcaccagaggggccacactggagagaagccctatgaatgtaatgaatgtgagaaggccttcagccagaagagctacctgatcatccaccagaggacccacacagaggagaagccctacaagtgcaatgaatgtgggaaggccttccgggagaagagcaagctgatcatccaccagaggatccacactggagagaagccctatgaatgtcctgtgtgctggaaggccttcagccagaagagccagctgatcatccaccagaggacccacactggagagaagccctatgcctgcacagaatgtgggaaggccttccgggagaagagcaccttcaccgtgcaccagaggacccacactggagagaagccctacaagtgcacagaatgtgggaaggccttcacccagaagagcaacctgattgtgcaccagaggacccatgctgggaagaaggcccacggccggggccacaccaggaagagcaagttcatggcccactag

SEQ ID NO: 176573 - DNA, 1863 bp, synthetic construct
  misc_feature 1..1863: note = Description of Artificial Sequence: Synthetic coding sequence
  source 1..1863: mol_type = other DNA
atggccaagccccagggcctggtgacctttgaagatgtggccgtggacttcacccaggaggagtggcagtacctgaaccccccccagaggaccctgtacagagatgtgatgctggagacctacagcaacctggtgtttgtgggccagcaggtgaccaagcccaacctgatcctgaagctggaggtggaggagtgcccagctgagggcaagatccccttctggaacttccctgaggtgtgccaggtggatgagcagatcgagcggcagcaccaggatgaccaggacaagtgcctgctgatgcaggtgggcttcagtgacaagaagaccatcatcaccaagagcgcccgggactgccatgaatttggaaacatcctgcacctgagcaccaacctggtggccagcatccagaggccagacaagcatgagagctttggaaacaacatggtggacaacctggacctcttcagccgcagcagcgctgagaacaagtatgacaatggctgtgccaagctgttcttccacacagaatatgagaagaccaaccctggcatgaagccctacggctacaaggaatgtgggaagggcctgcggaggaagaagggcctgagcctgcaccagaggatcaagaatggagagaagccctttgagtgcacagcctgcaggaagaccttcagcaagaagagccacctgattgtgcactggaggacccacactggagagaagcccttcggctgcacagaatgtgggaaggccttcagccagaagagccagctgatcatccacctgcggacccacactggagagcggccctttgagtgcccagaatgtgggaaggccttccgggagaagagcaccgtcatcatccactaccgcacccacactggagagaagccctatgagtgcaatgaatgtgggaaggccttcacccagaagagcaacctgattgtgcaccagaagacccacactggagagaagacctatgagtgcaccaagtgtggggagagcttcatccagaagctggacctgatcatccaccacagcacccacacaggcaagaagccccatgagtgcaatgaatgcaagaagaccttcagtgacaagagcaccctcatcatccaccagaggacccacactggagagaagccccacaagtgcacagaatgtgggaagagcttcaatgagaagagcaccctgattgtgcaccagaggacccacactggagagaagccctatgaatgtgatgtgtgtgggaagaccttcacccagaagagcaacctgggcgtgcaccagaggacccacagcggggagaagccctttgagtgcaatgaatgtgagaaggccttcagccagaagagctacctgatgctgcaccagaggggccacactggagagaagccctatgagtgcaatgaatgtgagaaggccttcagccagaagagctacctgatcatccaccagaggacccacacagaggagaagccctacaagtgcaatgaatgtgggaaggccttccgggagaagagcaagctgatcatccaccagaggatccacactggagagaagccctatgagtgccctgtgtgctggaaggccttcagccagaagagccagctgatcatccaccagaggacccacactggagagaagccctatgcctgcacagaatgtgggaaggccttccgggagaagagcaccttcaccgtgcaccagaggacccacactggagagaagccctacaagtgcacagaatgtgggaaggccttcacccagaagagcaacctgattgtgcaccagaggacccacgccggcaagaaggcccacggccggggccacaccaggaagagcaagttcatggcccactag

SEQ ID NO: 176574 - DNA, 1920 bp, synthetic construct; identical to SEQ ID NO: 176572
  misc_feature 1..1920: note = Description of Artificial Sequence: Synthetic coding sequence
  source 1..1920: mol_type = other DNA

SEQ ID NO: 176575 - DNA, 921 bp, synthetic construct
  misc_feature 1..921: note = Description of Artificial Sequence: Synthetic coding sequence
  source 1..921: mol_type = other DNA
atgagcagcgagaagagcggcctgcctgattctgtgccccacaccagccccccaccctacaatgccccccagcccccagctgagcccccagcccccccaccccaggccgcccccagcagccaccaccaccaccaccaccactaccaccagagcggcacagccaccctgccccggctgggcgccggcggcctggccagcagcgctgccacagcccagaggggccccagcagcagcgccaccctgccccggcccccccaccacgcccctcctggccctgctgctggggcccctcctcctggctgtgccaccctgcccaggatgcccccagacccctacctgcaggagaccaggtttgagggccccctgcccccacctcctcctgctgctgctgcccctcctcctccagccccagcccagacagcccaggcccctggctttgtggtgcccacccacgccggcaccgtgggcaccctgcccctgggcggctacgtggcccctggctaccccctgcagctgcagccctgcacagcctacgtgcctgtgtaccctgtgggcaccccctatgccggcggcaccccaggcggcaccggggtgaccagcaccctgcccccaccaccccagggccctggcctggccctgctggagcccaggaggcctcctcatgactacatgcccatcgctgtgctgaccaccatctgctgcttctggcccaccggcatcatcgccatcttcaaggctgtgcaggtgaggacagccctggcccggggggacatggtgtctgctgagatcgccagccgggaggccaggaacttctccttcatcagcctggccgtgggcattgctgccatggtgctgtgcaccatcctgactgtggtgatcatcatcgccgcccagcaccacgagaactactgggacccctag

SEQ ID NO: 176576 - DNA, 2004 bp, synthetic construct
  misc_feature 1..2004: note = Description of Artificial Sequence: Synthetic coding sequence
  source 1..2004: mol_type = other DNA
atggaggacctgagcagcccagacagcaccctgctgcagggcggccacaacctgctgagcagcgccagcttccaggaggccgtgaccttcaaggatgtgattgtggacttcacccaggaggagtggaagcagctggaccccggccagagggacctcttcagagatgtgaccctggagaactacacccacctggtgtccatcggcctgcaggtgtccaagccagatgtgatcagccagctggagcagggcacagagccctggatcatggagcccagcatccctgtgggcacctgtgccgactgggagacccggctggagaacagcgtgtctgcccctgagccagacatcagcgaggaggagctgagccctgaggtgattgtggagaagcacaagagagatgacagctggagcagcaacctgctggagagctgggagtatgagggcagcctggagcggcagcaggccaaccagcagaccctgcccaaggagatcaaggtgacagagaagaccatccccagctgggagaagggccctgtgaacaatgaatttgggaagtctgtgaatgtgagcagcaacctggtgacccaggagcccagccctgaggagaccagcaccaagaggagcatcaagcagaacagcaaccctgtgaagaaggagaagagctgcaagtgcaatgaatgtgggaaggccttctcctactgcagcgccctgatccgccaccagaggacccacactggagagaagccctacaagtgcaatgaatgtgagaaggccttcagccgctcagaaaatctcatcaaccaccagaggatccacactggagacaagccctacaagtgtgaccagtgtgggaagggcttcatcgagggccccagcctgacccagcaccagaggatccacactggagagaagccctacaagtgtgatgaatgtgggaaggccttcagccagaggacccacctggtgcagcaccagaggatccacactggagagaagccctacacctgcaatgaatgtgggaaggccttcagccagaggggccacttcatggagcaccagaagatccacactggagagaagcccttcaagtgtgatgaatgtgacaagaccttcaccaggagcacccacctgacccagcaccagaagatccacactggagagaagacctacaagtgcaatgaatgtgggaaggccttcaacggccccagcaccttcatccgccaccacatgatccacactggagagaagccctatgaatgtaatgaatgtgggaaggccttcagccagcacagcaacctgacccagcaccagaagacccacacccaggagaaggcctatgagtgcaaggaatgtgggaaggccttcatccgcagcagcagcctggccaagcatgagcgcatccacactggagagaagccctaccagtgccatgaatgtgggaagaccttctcctatggcagcagcctcatccagcacaggaagatccacactggagagcggccctacaagtgcaatgaatgtggccgggccttcaaccagaacatccacctgacccagcacaagaggatccacactggagccaagccctatgaatgtgccgagtgtgggaaggccttccgccactgcagcagcctggcccagcaccagaagacccacacagaggagaagccctaccagtgcaacaagtgtgagaagaccttcagccagagcagccacctgacccagcaccagaggatccacactggagagaagccctacaagtgcaatgaatgtgacaaggccttcagccgcagcacccacctgacagagcaccagaacacccacactggagagaagccctacaactgcaatgaatgtaggaagaccttcagccagagcacctacctgatccagcaccagaggatccacagcggggagaagcccttcggctgcaatgactgtgggaagagcttccgctacagaagtgccctgaacaagcaccagaggctgcaccctggcatctag

SEQ ID NO: 176577 - DNA, 2256 bp, synthetic construct
  misc_feature 1..2256: note = Description of Artificial Sequence: Synthetic coding sequence
  source 1..2256: mol_type = other DNA
atggaggacctgagcagcccagacagcaccctgctgcagggcggccacaacctgctgagcagcgccagcttccaggaggccgtgaccttcaaggatgtgattgtggacttcacccaggaggagtggaagcagctggaccccggccagagggacctcttcagagatgtgaccctggagaactacacccacctggtgtccatcggcctgcaggtgtccaagccagatgtgatcagccagctggagcagggcacagagccctggatcatggagcccagcatccctgtgggcacctgtgccgactgggagacccggctggagaacagcgtgtctgcccctgagccagacatcagcgaggaggagctgagccctgaggtgattgtggagaagcacaagagagatgacagctggagcagcaacctgctggagagctgggagtatgagggcagcctggagcggcagcaggccaaccagcagaccctgcccaaggagatcaaggtgacagagaagaccatccccagctgggagaagggccctgtgaacaatgaatttgggaagtctgtgaatgtgagcagcaacctggtgacccaggagcccagccctgaggagaccagcaccaagaggagcatcaagcagaacagcaaccctgtgaagaaggagaagagctgcaagtgcaatgaatgtgggaaggccttctcctactgcagcgccctgatccgccaccagaggacccacactggagagaagccctacaagtgcaatgaatgtgagaaggccttcagccgctcagaaaatctcatcaaccaccagaggatccacactggagacaagccctacaagtgtgaccagtgtgggaagggcttcatcgagggccccagcctgacccagcaccagaggatccacactggagagaagccctacaagtgtgatgaatgtgggaaggccttcagccagaggacccacctggtgcagcaccagaggatccacactggagagaagccctacacctgcaatgaatgtgggaaggccttcagccagaggggccacttcatggagcaccagaagatccacactggagagaagcccttcaagtgtgatgaatgtgacaagaccttcaccaggagcacccacctgacccagcaccagaagatccacactggagagaagacctacaagtgcaatgaatgtgggaaggccttcaacggccccagcaccttcatccgccaccacatgatccacactggagagaagccctatgaatgtaatgaatgtgggaaggccttcagccagcacagcaacctgacccagcaccagaagacccacactggagagaagccctatgactgtgccgagtgtgggaagagcttctcctactggagcagcctggcccagcacctgaagatccacactggagagaagccctacaagtgcaatgaatgtgggaaggccttctcctactgcagcagcctgacccagcaccggcgcatccacacccgggagaagccctttgaatgttctgaatgtgggaaggccttctcctacctgagcaacctgaaccagcaccagaagacccacacccaggagaaggcctatgagtgcaaggaatgtgggaaggccttcatccgcagcagcagcctggccaagcatgagcgcatccacactggagagaagccctaccagtgccatgaatgtgggaagaccttctcctatggcagcagcctcatccagcacaggaagatccacactggagagcggccctacaagtgcaatgaatgtggccgggccttcaaccagaacatccacctgacccagcacaagaggatccacactggagccaagccctatgaatgtgccgagtgtgggaaggccttccgccactgcagcagcctggcccagcaccagaagacccacacagaggagaagccctaccagtgcaacaagtgtgagaagaccttcagccagagcagccacctgacccagcaccagaggatccacactggagagaagccctacaagtgcaatgaatgtgacaaggccttcagccgcagcacccacctgacagagcaccagaacacccacactggagagaagccctacaactgcaatgaatgtaggaagaccttcagccagagcacctacctgatccagcaccagaggatccacagcggggagaagcccttcggctgcaatgactgtgggaagagcttccgctacagaagtgccctgaacaagcaccagaggctgcaccctggcatctag

SEQ ID NO: 176578 - DNA, 234 bp, synthetic construct
  misc_feature 1..234: note = Description of Artificial Sequence: Synthetic coding sequence
  source 1..234: mol_type = other DNA
aaggccttcagccagaggacccacctggtgcagcaccagaggatccacactggagagaagccctacacctgcaatgaatgtgggaaggccttcagccagaggggccacttcatggagcaccagaagatccacactggagagaagcccttcaagtgtgatgaatgtgacaagaccttcaccaggagcacccacctgaccaccagcaagaacagctactggaggaagaacctgtag

SEQ ID NO: 176579 - DNA, 1755 bp, synthetic construct
  misc_feature 1..1755: note = Description of Artificial Sequence: Synthetic coding sequence
  source 1..1755: mol_type = other DNA
atgatggagaactacggcaacctggtgtccctggatgtgctgaacagagacaaggatgaggagcccaccgtgaagcaggagattgaggagattgaggaggaggtggagccccagggcgtgattgtgacccgcatcaagtcagaaattgaccaggaccccatgggccgggagacctttgagctggtgggccgcctggacaagcagaggggcatcttcctgtgggagatcccccgggagagcctgacccaggagcagaggatgttccgggagaacaccaacatcatcaggaagaggcccaacagcgaggagaagtgccacaagtgtgaggagtgtgggaaaggatttgtgaggaaggcccacttcatccagcaccagagggtgcacactggagagaagcccttccagtgcaatgaatgtgggaagagcttcagccgcagcagctttgtgattgagcaccagaggatccacactggagagcggccctatgagtgcaactactgcggcaagaccttctctgtgagcagcaccctcatccgccaccagaggatccacactggagagcggccctaccagtgcaaccagtgcaagcagagcttcagccagaggaggagcctggtgaagcaccagaggatccacactggagagaagccccacaagtgcagcgactgtgggaaggccttctcctggaagagccacctgattgagcaccagaggacccacactggagagaagccctaccactgcaccaagtgcaagaagagcttcagcaggaacagcctgctggtggagcaccagaggatccacactggagagcggccccacaagtgtggggagtgtgggaaggccttccggctgagcacctacctgatccagcaccagaagatccacactggagagaagcccttcctgtgcattgaatgtgggaagagcttcagccgcagcagcttcctgattgagcaccagaggatccacactggagagcggccctaccagtgcaaggaatgtgggaagagcttcagccagctgtgcaacctgaccaggcaccagaggatccacactggagacaagccccacaagtgtgaggagtgtgggaaggccttcagccgcagcagcggcctcatccagcaccagaggatccacacccgggagaagacctacccctacaatgagaccaaggagagctttgaccccaactgcagcctggtgatccagcaggaggtgtaccccaaggagaagagctacaagtgtgatgaatgtgggaagaccttctctgtgtctgcccacctggtgcagcaccagaggatccacactggagagaagccctacctgtgcaccgtgtgtgggaagagcttcagccgcagcagcttcctgattgagcaccagaggatccacactggagagcggccctacctgtgccggcagtgtgggaagagcttcagccagctgtgcaacctgatccgccaccagggcgtgcacactggaaacaagccccacaagtgtgatgaatgtgggaaggccttcagcagaaattctggcctcatccagcaccagaggatccacactggagagaagccctacaagtgtgagaagtgtgacaagagcttcagccagcagaggagcctggtgaaccaccagaagatccatgctgaggtgaagacccaggagacccatgaatgtgatgcctgtggggaggccttcaactgccgcatcagcctcatccagcaccagaagctgcacacagcctggatgcagtag

SEQ ID NO: 176580 - DNA, 1881 bp, synthetic construct
  misc_feature 1..1881: note = Description of Artificial Sequence: Synthetic coding sequence
  source 1..1881: mol_type = other DNA
atggccagccccagccccccacctgagagcaagggcctgctgacctttgaagatgtggccgtgttcttcacccaggaggagtgggactacctggaccctgcccagaggagcctgtacaaggatgtgatgatggagaactacggcaacctggtgtccctggatgtgctgaacagagacaaggatgaggagcccaccgtgaagcaggagattgaggagattgaggaggaggtggagccccagggcgtgattgtgacccgcatcaagtcagaaattgaccaggaccccatgggccgggagacctttgagctggtgggccgcctggacaagcagaggggcatcttcctgtgggagatcccccgggagagcctgacccaggagcagaggatgttccgggagaacaccaacatcatcaggaagaggcccaacagcgaggagaagtgccacaagtgtgaggagtgtgggaaaggatttgtgaggaaggcccacttcatccagcaccagagggtgcacactggagagaagcccttccagtgcaatgaatgtgggaagagcttcagccgcagcagctttgtgattgagcaccagaggatccacactggagagcggccctatgagtgcaactactgcggcaagaccttctctgtgagcagcaccctcatccgccaccagaggatccacactggagagcggccctaccagtgcaaccagtgcaagcagagcttcagccagaggaggagcctggtgaagcaccagaggatccacactggagagaagccccacaagtgcagcgactgtgggaaggccttctcctggaagagccacctgattgagcaccagaggacccacactggagagaagccctaccactgcaccaagtgcaagaagagcttcagcaggaacagcctgctggtggagcaccagaggatccacactggagagcggccccacaagtgtggggagtgtgggaaggccttccggctgagcacctacctgatccagcaccagaagatccacactggagagaagcccttcctgtgcattgaatgtgggaagagcttcagccgcagcagcttcctgattgagcaccagaggatccacactggagagcggccctaccagtgcaaggaatgtgggaagagcttcagccagctgtgcaacctgaccaggcaccagaggatccacactggagacaagccccacaagtgtgaggagtgtgggaaggccttcagccgcagcagcggcctcatccagcaccagaggatccacacccgggagaagacctacccctacaatgagaccaaggagagctttgaccccaactgcagcctggtgatccagcaggaggtgtaccccaaggagaagagctacaagtgtgatgaatgtgggaagaccttctctgtgtctgcccacctggtgcagcaccagaggatccacactggagagaagccctacctgtgcaccgtgtgtgggaagagcttcagccgcagcagcttcctgattgagcaccagaggatccacactggagagcggccctacctgtgccggcagtgtgggaagagcttcagccagctgtgcaacctgatccgccaccagggcgtgcacactggaaacaagccccacaagtgtgatgaatgtgggaaggccttcagcagaaattctggcctcatccagcaccagaggatccacactggagagaagccctacaagtgtgagaagtgtgacaagagcttcagccagcagaggagcctggtgaaccaccagaagatccatgctgaggtgaagacccaggagacccatgaatgtgatgcctgtggggaggccttcaactgccgcatcagcctcatccagcaccagaagctgcacacagcctggatgcagtag

SEQ ID NO: 176581 - DNA, 1839 bp, synthetic construct
  misc_feature 1..1839: note = Description of Artificial Sequence: Synthetic coding sequence
  source 1..1839: mol_type = other DNA
atggccagccccagccccccacctgagagcaaggaggagtgggactacctggaccctgcccagaggagcctgtacaaggatgtgatgatggagaactacggcaacctggtgtccctggatgtgctgaacagagacaaggatgaggagcccaccgtgaagcaggagattgaggagattgaggaggaggtggagccccagggcgtgattgtgacccgcatcaagtcagaaattgaccaggaccccatgggccgggagacctttgagctggtgggccgcctggacaagcagaggggcatcttcctgtgggagatcccccgggagagcctgacccaggagcagaggatgttccgggagaacaccaacatcatcaggaagaggcccaacagcgaggagaagtgccacaagtgtgaggagtgtgggaaaggatttgtgaggaaggcccacttcatccagcaccagagggtgcacactggagagaagcccttccagtgcaatgaatgtgggaagagcttcagccgcagcagctttgtgattgagcaccagaggatccacactggagagcggccctatgagtgcaactactgcggcaagaccttctctgtgagcagcaccctcatccgccaccagaggatccacactggagagcggccctaccagtgcaaccagtgcaagcagagcttcagccagaggaggagcctggtgaagcaccagaggatccacactggagagaagccccacaagtgcagcgactgtgggaaggccttctcctggaagagccacctgattgagcaccagaggacccacactggagagaagccctaccactgcaccaagtgcaagaagagcttcagcaggaacagcctgctggtggagcaccagaggatccacactggagagcggccccacaagtgtggggagtgtgggaaggccttccggctgagcacctacctgatccagcaccagaagatccacactggagagaagcccttcctgtgcattgaatgtgggaagagcttcagccgcagcagcttcctgattgagcaccagaggatccacactggagagcggccctaccagtgcaaggaatgtgggaagagcttcagccagctgtgcaacctgaccaggcaccagaggatccacactggagacaagccccacaagtgtgaggagtgtgggaaggccttcagccgcagcagcggcctcatccagcaccagaggatccacacccgggagaagacctacccctacaatgagaccaaggagagctttgaccccaactgcagcctggtgatccagcaggaggtgtaccccaaggagaagagctacaagtgtgatgaatgtgggaagaccttctctgtgtctgcccacctggtgcagcaccagaggatccacactggagagaagccctacctgtgcaccgtgtgtgggaagagcttcagccgcagcagcttcctgattgagcaccagaggatccacactggagagcggccctacctgtgccggcagtgtgggaagagcttcagccagctgtgcaacctgatccgccaccagggcgtgcacactggaaacaagccccacaagtgtgatgaatgtgggaaggccttcagcagaaattctggcctcatccagcaccagaggatccacactggagagaagccctacaagtgtgagaagtgtgacaagagcttcagccagcagaggagcctggtgaaccaccagaagatccatgctgaggtgaagacccaggagacccatgaatgtgatgcctgtggggaggccttcaactgccgcatcagcctcatccagcaccagaagctgcacacagcctggatgcagtag

SEQ ID NO: 176582 - DNA, 1377 bp, synthetic construct
  misc_feature 1..1377: note = Description of Artificial Sequence: Synthetic coding sequence
  source 1..1377: mol_type = other DNA
atggccgccatgcccctgaaggcccagtaccaggagatggtgacctttgaagatgtggccgtgcacttcaccaagacagagtggacaggcctgagccctgcccagagggccctgtacagatctgtgatgctggagaactttggaaacctgacagccctgggctaccctgtgcccaagccagccctgatcagcctgctggagcggggggacatggcctggggcctggaggcccaggatgatcctcctgctgagaggaccaagaatgtgtgcaaggatgtggagaccaacattgattctgagagcaccctcatccagggcatcagcgaggagagagatggcatgatgagccacggccagctgaagtctgtgccccagaggacagacttccctgagaccagaaatgtggagaagcaccaggacatccccaccgtgaagaacatccagggcaaggtgccccgcatcccctgtgccaggaagcccttcatctgtgaagaatgtgggaagagcttctcctacttctcctactatgcccggcaccagaggatccacactggagagaagccctttgagtgcagtgaatgtgggaaggccttcaatggaaacagcagcctcatccgccaccagaggatccacactggagagcggccctaccagtgtgaagaatgtggccgggccttcaatgacaatgccaacctgatccgccaccagaggatccacagcggggaccggccctactactgcacagaatgtggcaacagcttcaccagcagcagcgagtttgtgatccaccagaggatccacactggagagaagccctatgagtgcaatgaatgtgggaaggcctttgtgggcaacagccccctgctgcggcaccagaagatccacactggagagaagccctatgagtgcaatgaatgtgggaagagctttggccgcaccagccacctgagccagcaccagaggatccacactggagagaagccctacagctgcaaggtgtgtggccaggccttcaacttccacaccaagctgaccaggcaccagaggatccacagcgaggagaagccctttgactgtgtggactgtgggaaggccttcagcgcccaggagcagctgaagaggcacctgcgcatccacacccaggagagcagctatgtgtgtgatgaatgtgggaaggccctgaccagcaagaggaacctgcaccagcaccagaggatccacactggagagaagccctatgagtgcagcaaatatgagaaggccttcggcaccagcagccagctgggccacctggagcacgtgtacagcggggagaagcctgtgctggacatctgccgcttcggcctgcctgagttcttcacccccttctactggtag

SEQ ID NO: 176583 - DNA, 1737 bp, synthetic construct
  misc_feature 1..1737: note = Description of Artificial Sequence: Synthetic coding sequence
  source 1..1737: mol_type = other DNA
atggccgaggagagcaggaagcccagcgcccccagccccccagaccagaccccagaggaggacctggtgattgtgaaggtggaggaggaccacggctgggaccaggagagcagcctgcacgagagcaaccccctgggccaggaggtgttccggctgcgcttccggcagctgcgctaccaggagaccctgggcccccgggaggccctgatccagctgcgggccctgtgccaccagtggctgcggccagacctgaacaccaaggagcagatcctggagctgctggtgctggagcagttcctgaccatcctgcctgaggagctgcagaccctggtgaaggagcaccagctggagaatggagaggaggtggtgaccctgctggaggacctggagcggcagattgacatcctgggccggcctgtgtctgcccgggtgcacggccaccgggtgctgtgggaggaggtggtgcacagcgccagcgcccctgagccccccaacacccagctgcagagcgaggccacccagcacaagagccctgtgccccaggagagccaggagcgggccatgagcaccagccagagccccaccaggagccagaagggcagcagcggggaccaggagatgacagccaccctgctgacagctggcttccagaccctggagaagattgaggacatggctgtgtccctcatccgggaggagtggctgctggaccccagccagaaggacctgtgccgggacaacagacctgagaacttcaggaacatgttcagcctgggcggggagaccaggagtgaaaatcgggagctggccagcaagcaggtgatcagcacaggcatccagccccacggggagacagctgccaagtgcaatggagatgtgatccggggcctggagcacgaggaggcccgggacctgctgggccgcctggagcggcagaggggcaaccccacccaggagcggcggcacaagtgtgatgaatgtgggaagagctttgcccagagcagcggcctggtgcgccactggaggatccacactggagagaagccctaccagtgcaatgtgtgtgggaaggccttctcctacagaagtgccctgctgagccaccaggacatccacaacaaggtgaagcgctaccactgcaaggaatgtgggaaggccttcagccagaacacaggcctcatcctgcaccagaggatccacactggagagaagccctaccagtgcaaccagtgtgggaaggccttcagccagagcgctggcctcatcctgcaccagaggatccacagcggggagcggccctatgaatgtaatgaatgtgggaaggccttcagccacagcagccacctgattggccaccagaggatccacactggagagaagccctatgaatgtgatgaatgtgggaagaccttccgccgcagcagccacctgattggccaccagaggagccacactggagagaagccctacaagtgcaatgaatgtggccgggccttcagccagaagagcggcctcatcgagcaccagaggatccacactggagagcggccctacaagtgcaaggaatgtgggaaggccttcaacggcaacacaggcctcatccagcacctgcgcatccacactggagagaagccctaccagtgcaatgaatgtgggaaggccttcatccagaggagcagcctcatccgccaccagaggatccacagcggggagaagtctgagagcatctctgtgtag

SEQ ID NO: 176584 - DNA, 1737 bp, synthetic construct; identical to SEQ ID NO: 176583
  misc_feature 1..1737: note = Description of Artificial Sequence: Synthetic coding sequence
  source 1..1737: mol_type = other DNA

SEQ ID NO: 176585 - DNA, 477 bp, synthetic construct
  misc_feature 1..477: note = Description of Artificial Sequence: Synthetic coding sequence
  source 1..477: mol_type = other DNA
atggccgaggagagcaggaagcccagcgcccccagccccccagaccagaccccagaggaggacctggtgattgtgaaggtggaggaggaccacggctgggaccaggagagcagcctgcacgagagcaaccccctgggccaggaggtgttccggctgcgcttccggcagctgcgctaccaggagaccctgggcccccgggaggccctgatccagctgcgggccctgtgccaccagtggctgcggccagacctgaacaccaaggagcagatcctggagctgctggtgctggagcagttcctgaccatcctgcctgaggagctgcagaccctggtgaaggagcaccagctggagaatggagaggaggtggtgaccctgctggaggacctggagcggcagattgacatcctgggccggcctgtgtccagaagaagaagccagctggcctacatggacatcggctacagcggcagaagatag

SEQ ID NO: 176586 - DNA, 1185 bp, synthetic construct
  misc_feature 1..1185: note = Description of Artificial Sequence: Synthetic coding sequence
  source 1..1185: mol_type = other DNA
atgaacaccaacagcaaggaggtgctgagcctgggcgtgcaggtgcctgaggcctgggaggagctgctgaccatgaaggtggaggccaagagccacctgcagtggcaggagagccggctgaagaggagcaaccccctggcccgggagatcttccgccgccacttccggcagctgtgctaccaggagaccccaggcccccgggaggccctgacccggctgcaggagctgtgctaccagtggctgcggccccacgtgtccaccaaggagcagatcctggacctgctggtgctggagcagttcctgagcatcctgcccaaggagctgcagggctgggtgcgggagcactgcccagagagcggggaggaggccgtcatcctgctggaggacctggagcgggagctggatgagccccagcacgagatggtggcccaccgccaccggcaggaggtgctgtgcaaggagatggtgcccctggccgagcagacccccctgaccctgcagagccagcccaaggagccccagctgacctgtgacagcgcccagaagtgccacagcatcggggagacagatgaggtgaccaagacagaggaccgggagctggtgctgaggaaggactgccccaagatcgtggagccccacggcaagatgtttaatgagcagacctgggaggtgtcccagcaggaccccagccatggagaggtgggggagcacaaggacagaattgagcggcagtggggcaacctgctgggggagggccagcacaagtgtgatgaatgtgggaagagcttcacccagagcagcggcctcatccgccaccagaggatccacactggagagcggccctatgaatgtaatgaatgtgggaaggccttcagccgcagcagcggcctcttcaaccaccggggcatccacaacatccagaagcgctaccactgcaaggaatgtgggaaggtgttcagccagagcgctggcctcatccagcaccagaggatccacaagggggagaagccctaccagtgcagccagtgcagcaagagctacagcagaagaagcttcctgattgagcaccagaggagccacactggagagcggccccaccagtgcattgaatgtgggaagagcttcaacagacactgcaacctgatccgccaccagaagatccacacagtggccgagctggtgtag

SEQ ID NO: 176587 - DNA, 126 bp, synthetic construct
  misc_feature 1..126: note = Description of Artificial Sequence: Synthetic coding sequence
  source 1..126: mol_type = other DNA
atgaacaccaacagcaaggaggtgctgagcctgggcgtgcaggtgcctgaggcctgggaggagctgctgaccatgaaggtggaggccaagagccacctgcagtggcaggagagccggctgaagtag

SEQ ID NO: 176588 - DNA, 1185 bp, synthetic construct; identical to SEQ ID NO: 176586
  misc_feature 1..1185: note = Description of Artificial Sequence: Synthetic coding sequence
  source 1..1185: mol_type = other DNA

SEQ ID NO: 176589 - DNA, 1338 bp, synthetic construct
  misc_feature 1..1338: note = Description of Artificial Sequence: Synthetic coding sequence
  source 1..1338: mol_type = other DNA
atgaacaccaacagcaaggaggtgctgagcctgggcgtgcaggtgcctgaggcctgggaggagctgctgaccatgaaggtggaggccaagagccacctgcagtggcaggagagccggctgaagaggagcaaccccctggcccgggagatcttccgccgccacttccggcagctgtgctaccaggagaccccaggcccccgggaggccctgacccggctgcaggagctgtgctaccagtggctgcggccccacgtgtccaccaaggagcagatcctggacctgctggtgctggagcagttcctgagcatcctgcccaaggagctgcagggctgggtgcgggagcactgcccagagagcggggaggaggccgtcatcctgctggaggacctggagcgggagctggatgagccccagcacgagatggtggcccaccgccaccggcaggaggtgctgtgcaaggagatggtgcccctggccgagcagacccccctgaccctgcagagccagcccaaggagccccagctgacctgtgacagcgcccagaagtgccacagcatcggggagacagacctgatccgcagcctgcggaggagagctgtgctgatccccctgggcgcccacctgttcagcacagacaccttcctgttcagcaagcctgtggtgatcccccagctgaagggcggcggggagacctggcccaacaacagaggagtgctgagagatgaggtgaccaagacagaagatcgggagctggtgctgaggaaggactgccccaagatcgtggagccccacggcaagatgtttaatgagcagacctgggaggtgtcccagcaggaccccagccacggggaggtgggggagcacaaggaccgcatcgagcggcagtggggcaacctgctgggggagggccagcacaagtgtgatgaatgtgggaagagcttcacccagagcagcggcctcatccgccaccagaggatccacactggagagcggccctatgagtgcaatgaatgtgggaaggccttcagccgcagcagcggcctcttcaaccaccggggcatccacaacatccagaagcgctaccactgcaaggaatgtgggaaggtgttcagccagagcgctggcctcatccagcaccagaggatccacaagggggagaagccctaccagtgcagccagtgcagcaagagctacagccgccgctccttcctgattgagcaccagaggagccacactggagagcggccccaccagtgcattgaatgtgggaagagcttcaacagacactgcaacctgatccgccaccagaagatccacacagtggccgagctggtgtag

SEQ ID NO: 176590 - DNA, 1821 bp, synthetic construct
  misc_feature 1..1821: note = Description of Artificial Sequence: Synthetic coding sequence
  source 1..1821: mol_type = other DNA
atgaccctgctgaccttcagagatgtggccatcgagttcagcctggaggagtggaagtgcctggacctggcccagcagaacctgtacagagatgtgatgctggagaactacagaaacctcttctctgtgggcctgactgtgtgcaagccaggcctcatcacctgcctggagcagaggaaggagccctggaatgtgaagaggcaggaggccgcagatggccaccctgagatgggcttccaccacgccacccaggcctgcctggagctgctgggcagcagtgacctgcctgccagcgccagccagagcgctggcatcaccggggtgaaccaccgggcccagcccggcctgaatgtgtctgtggacaagttcaccgccatgagcagccacttcacccaggacctgctgcctgagcagggcatccaggatgccttccccaagaggatcctgcggggctacggcaactgtggcctggacaacctgtacctgaggaaggactgggagagcctggatgagtgcaagctgcagaaggactacaacggcctgaaccagtgcagcagcaccacccacagcaagatcttccagtacaacaagtatgtgaagatctttgacaacttcagcaacctgcacagaagaaacatcagcaacacaggagagaagcccttcaagtgccaggagtgtgggaagagcttccagatgctgtccttcctgacagagcaccagaagatccacacaggcaagaagttccagaagtgtggagaatgtgggaagaccttcatccagtgcagccacttcacagagcctgagaacatcgacaccggggagaagccctacaagtgccaggagtgcaacaacgtcatcaagacctgcagcgtgctgaccaagaaccgcatctatgccggcggggagcactaccgctgtgaggagtttgggaaggtgttcaaccagtgcagccacctgacagagcacgagcacggcacagaggagaagccctgcaagtatgaagaatgtagcagcgtcttcatcagctgcagcagcctgagcaaccagcagatgatcctggccggggagaagctgagcaaatgtgagacctggtacaagggcttcaaccacagccccaaccccagcaagcaccagagaaatgagatcggcggcaagcccttcaagtgtgaagaatgtgacagcatcttcaagtggttcagtgacctgaccaagcacaagaggatccacactggagagaagccctacaagtgtgatgaatgtgggaaggcctacacccagagcagccacctgtctgagcaccggcgcatccacactggagagaagccctaccagtgtgaagaatgtgggaaggtgttccgcacctgcagcagcctgagcaaccacaagaggacccacagcgaggagaagccctacacctgtgaagaatgtggcaacatcttcaagcagctgagtgacctgaccaagcacaagaagacccacactggagagaagccctacaagtgtgatgaatgtgggaagaacttcacccagagcagcaacctgattgtgcacaagaggatccacactggagagaagccctacaagtgtgaagaatgtggccgggtcttcatgtggttcagtgacatcaccaagcacaagaagacccacactggagagaagccctacaagtgtgatgaatgtgggaagaacttcacccagagcagcaacctgattgtgcacaagaggatccacactggagagaagccctacaagtgtgagaagtgtgggaaggccttcacccagttcagccacctgactgtgcatgagagcatccacacctag

SEQ ID NO: 176591 - DNA, 1686 bp, synthetic construct
  misc_feature 1..1686: note = Description of Artificial Sequence: Synthetic coding sequence
  source 1..1686: mol_type = other DNA
atggccggggcccagaccctgctgaccttcagagatgtggccatcgagttcagcctggaggagtggaagtgcctggacctggcccagcagaacctgtacagagatgtgatgctggagaactacagaaacctcttctctgtgggcctgactgtgtgcaagccaggcctcatcacctgcctggagcagaggaaggagccctggaatgtgaagaggcaggaggccgcagatggccacccagccatgagcagccacttcacccaggacctgctgcctgagcagggcatccaggatgccttccccaagaggatcctgcggggctacggcaactgtggcctggacaacctgtacctgaggaaggactgggagagcctggatgagtgcaagctgcagaaggactacaacggcctgaaccagtgcagcagcaccacccacagcaagatcttccagtacaacaagtatgtgaagatctttgacaacttcagcaacctgcacagaagaaacatcagcaacacaggagagaagcccttcaagtgccaggagtgtgggaagagcttccagatgctgtccttcctgacagagcaccagaagatccacacaggcaagaagttccagaagtgtggggagtgtgggaagaccttcatccagtgcagccacttcacagagccagaaaatattgacacaggagagaagccctacaagtgccaggagtgcaacaacgtcatcaagacctgcagcgtgctgaccaagaaccgcatctatgctggaggagagcactaccgctgtgaggagtttgggaaggtgttcaaccagtgcagccacctgacagaacatgaacatggaacagaggagaagccctgcaagtatgaggagtgcagctctgtgttcatcagctgcagcagcctgagcaaccagcagatgatcctggccggggagaagctgagcaaatgtgagacctggtacaagggcttcaaccacagccccaaccccagcaagcaccagagaaatgaaattggaggcaagcccttcaagtgtgaggagtgtgacagcatcttcaagtggttcagtgacctgaccaagcacaagaggatccacactggagagaagccctacaagtgtgatgaatgtgggaaggcctacacccagagcagccacctgtctgagcaccggcgcatccacactggagagaagccctaccagtgtgaggagtgtgggaaggtgttccgcacctgcagcagcctgagcaaccacaagaggacccacagcgaggagaagccctacacctgtgaggagtgtggcaacatcttcaagcagctgagtgacctgaccaagcacaagaagacccacactggagagaagccctacaagtgtgatgaatgtgggaagaacttcacccagagcagcaacctgattgtgcacaagaggatccacactggagagaagccctacaagtgtgaggagtgtggccgggtcttcatgtggttcagtgacatcaccaagcacaagaagacccacactggagagaagccctacaagtgtgatgaatgtgggaagaacttcacccagagcagcaacctgattgtgcacaagaggatccacactggagagaagccctacaagtgtgagaagtgtgggaaggccttcacccagttcagccacctgactgtgcatgagagcatccacacctag

SEQ ID NO: 176592 - DNA, 1674 bp, synthetic construct
  misc_feature 1..1674: note = Description of Artificial Sequence: Synthetic coding sequence
  source 1..1674: mol_type = other DNA
atgaccctgctgaccttcagagatgtggccatcgagttcagcctggaggagtggaagtgcctggacctggcccagcagaacctgtacagagatgtgatgctggagaactacagaaacctcttctctgtgggcctgactgtgtgcaagccaggcctcatcacctgcctggagcagaggaaggagccctggaatgtgaagaggcaggaggccgcagatggccacccagccatgagcagccacttcacccaggacctgctgcctgagcagggcatccaggatgccttccccaagaggatcctgcggggctacggcaactgtggcctggacaacctgtacctgaggaaggactgggagagcctggatgagtgcaagctgcagaaggactacaacggcctgaaccagtgcagcagcaccacccacagcaagatcttccagtacaacaagtatgtgaagatctttgacaacttcagcaacctgcacagaagaaacatcagcaacacaggagagaagcccttcaagtgccaggagtgtgggaagagcttccagatgctgtccttcctgacagagcaccagaagatccacacaggcaagaagttccagaagtgtggggagtgtgggaagaccttcatccagtgcagccacttcacagagccagaaaatattgacacaggagagaagccctacaagtgccaggagtgcaacaacgtcatcaagacctgcagcgtgctgaccaagaaccgcatctatgctggaggagagcactaccgctgtgaggagtttgggaaggtgttcaaccagtgcagccacctgacagaacatgaacatggaacagaggagaagccctgcaagtatgaggagtgcagctctgtgttcatcagctgcagcagcctgagcaaccagcagatgatcctggccggggagaagctgagcaaatgtgagacctggtacaagggcttcaaccacagccccaaccccagcaagcaccagagaaatgaaattggaggcaagcccttcaagtgtgaggagtgtgacagcatcttcaagtggttcagtgacctgaccaagcacaagaggatccacactggagagaagccctacaagtgtgatgaatgtgggaaggcctacacccagagcagccacctgtctgagcaccggcgcatccacactggagagaagccctaccagtgtgaggagtgtgggaaggtgttccgcacctgcagcagcctgagcaaccacaagaggacccacagcgaggagaagccctacacctgtgaggagtgtggcaacatcttcaagcagctgagtgacctgaccaagcacaagaagacccacactggagagaagccctacaagtgtgatgaatgtgggaagaacttcacccagagcagcaacctgattgtgcacaagaggatccacactggagagaagccctacaagtgtgaggagtgtggccgggtcttcatgtggttcagtgacatcaccaagcacaagaagacccacactggagagaagccctacaagtgtgatgaatgtgggaagaacttcacccagagcagcaacctgattgtgcacaagaggatccacactggagagaagccctacaagtgtgagaagtgtgggaaggccttcacccagttcagccacctgactgtgcatgagagcatccacacctag

SEQ ID NO: 176593 - DNA, 1890 bp, synthetic construct
  misc_feature 1..1890: note = Description of Artificial Sequence: Synthetic coding sequence
  source 1..1890: mol_type = other DNA
atgaccctgctgaccttcagagatgtggccatcgagttcagcctggaggagtggaagtgcctggacctggcccagcagaacctgtacagagatgtgatgctggagaactacagaaacctcttctctgtgggcctgactgtgtgcaagccaggcctcatcacctgcctggagcagaggaaggagccctggaatgtgaagaggcaggaggccgcagatggccaccctgagatgggcttccaccacgccacccaggcctgcctggagctgctgggcagcagtgacctgcctgccagcgccagccagagcgctggcatcaccggggtgaaccaccgggcccagcccggcctgaatgtgtctgtggacaagttcaccgccctgtgcagccctggggtgctgcagacagtgaagtggttcctggagttccgctgcatcttcagcctggccatgagcagccacttcacccaggacctgctgcctgagcagggcatccaggatgccttccccaagaggatcctgcggggctacggcaactgtggcctggacaacctgtacctgaggaaggactgggagagcctggatgagtgcaagctgcagaaggactacaacggcctgaaccagtgcagcagcaccacccacagcaagatcttccagtacaacaagtatgtgaagatctttgacaacttcagcaacctgcacagaagaaacatcagcaacacaggagagaagcccttcaagtgccaggagtgtgggaagagcttccagatgctgtccttcctgacagagcaccagaagatccacacaggcaagaagttccagaagtgtggggagtgtgggaagaccttcatccagtgcagccacttcacagagccagaaaatattgacacaggagagaagccctacaagtgccaggagtgcaacaacgtcatcaagacctgcagcgtgctgaccaagaaccgcatctatgctggaggagagcactaccgctgtgaggagtttgggaaggtgttcaaccagtgcagccacctgacagaacatgaacatggaacagaggagaagccctgcaagtatgaggagtgcagctctgtgttcatcagctgcagcagcctgagcaaccagcagatgatcctggccggggagaagctgagcaaatgtgagacctggtacaagggcttcaaccacagccccaaccccagcaagcaccagagaaatgaaattggaggcaagcccttcaagtgtgaggagtgtgacagcatcttcaagtggttcagtgacctgaccaagcacaagaggatccacactggagagaagccctacaagtgtgatgaatgtgggaaggcctacacccagagcagccacctgtctgagcaccggcgcatccacactggagagaagccctaccagtgtgaggagtgtgggaaggtgttccgcacctgcagcagcctgagcaaccacaagaggacccacagcgaggagaagccctacacctgtgaggagtgtggcaacatcttcaagcagctgagtgacctgaccaagcacaagaagacccacactggagagaagccctacaagtgtgatgaatgtgggaagaacttcacccagagcagcaacctgattgtgcacaagaggatccacactggagagaagccctacaagtgtgaggagtgtggccgggtcttcatgtggttcagtgacatcaccaagcacaagaagacccacactggagagaagccctacaagtgtgatgaatgtgggaagaacttcacccagagcagcaacctgattgtgcacaagaggatccacactggagagaagccctacaagtgtgagaagtgtgggaaggccttcacccagttcagccacctgactgtgcatgagagcatccacacctag

SEQ ID NO: 176594 - DNA, 1686 bp, synthetic construct; identical to SEQ ID NO: 176591
  misc_feature 1..1686: note = Description of Artificial Sequence: Synthetic coding sequence
  source 1..1686: mol_type = other DNA

SEQ ID NO: 176595 - DNA, 1833 bp, synthetic construct
  misc_feature 1..1833: note = Description of Artificial Sequence: Synthetic coding sequence
  source 1..1833: mol_type = other DNA
atggccggggcccagaccctgctgaccttcagagatgtggccatcgagttcagcctggaggagtggaagtgcctggacctggcccagcagaacctgtacagagatgtgatgctggagaactacagaaacctcttctctgtgggcctgactgtgtgcaagccaggcctcatcacctgcctggagcagaggaaggagccctggaatgtgaagaggcaggaggccgcagatggccaccctgagatgggcttccaccacgccacccaggcctgcctggagctgctgggcagcagtgacctgcctgccagcgccagccagagcgctggcatcaccggggtgaaccaccgggcccagcccggcctgaatgtgtctgtggacaagttcaccgccatgagcagccacttcacccaggacctgctgcctgagcagggcatccaggatgccttccccaagaggatcctgcggggctacggcaactgtggcctggacaacctgtacctgaggaaggactgggagagcctggatgagtgcaagctgcagaaggactacaacggcctgaaccagtgcagcagcaccacccacagcaagatcttccagtacaacaagtatgtgaagatctttgacaacttcagcaacctgcacagaagaaacatcagcaacacaggagagaagcccttcaagtgccaggagtgtgggaagagcttccagatgctgtccttcctgacagagcaccagaagatccacacaggcaagaagttccagaagtgtggagaatgtgggaagaccttcatccagtgcagccacttcacagagcctgagaacatcgacaccggggagaagccctacaagtgccaggagtgcaacaacgtcatcaagacctgcagcgtgctgaccaagaaccgcatctatgccggcggggagcactaccgctgtgaggagtttgggaaggtgttcaaccagtgcagccacctgacagagcacgagcacggcacagaggagaagccctgcaagtatgaagaatgtagcagcgtcttcatcagctgcagcagcctgagcaaccagcagatgatcctggccggggagaagctgagcaaatgtgagacctggtacaagggcttcaaccacagccccaaccccagcaagcaccagagaaatgagatcggcggcaagcccttcaagtgtgaagaatgtgacagcatcttcaagtggttcagtgacctgaccaagcacaagaggatccacactggagagaagccctacaagtgtgatgaatgtgggaaggcctacacccagagcagccacctgtctgagcaccggcgcatccacactggagagaagccctaccagtgtgaagaatgtgggaaggtgttccgcacctgcagcagcctgagcaaccacaagaggacccacagcgaggagaagccctacacctgtgaagaatgtggcaacatcttcaagcagctgagtgacctgaccaagcacaagaagacccacactggagagaagccctacaagtgtgatgaatgtgggaagaacttcacccagagcagcaacctgattgtgcacaagaggatccacactggagagaagccctacaagtgtgaagaatgtggccgggtcttcatgtggttcagtgacatcaccaagcacaagaagacccacactggagagaagccctacaagtgtgatgaatgtgggaagaacttcacccagagcagcaacctgattgtgcacaagaggatccacactggagagaagccctacaagtgtgagaagtgtgggaaggccttcacccagttcagccacctgactgtgcatgagagcatccacacctag

SEQ ID NO: 176596 - DNA, 396 bp, synthetic construct
  misc_feature 1..396: note = Description of Artificial Sequence: Synthetic coding sequence
  source 1..396: mol_type = other DNA
atggccggggcccagaccctgctgaccttcagagatgtggccatcgagttcagcctggaggagtggaagtgcctggacctggcccagcagaacctgtacagagatgtgatgctggagaactacagaaacctcttctctgtgggcctgactgtgtgcaagccaggcctcatcacctgcctggagcagaggaaggagccctggaatgtgaagaggcaggaggccgcagatggccacccagccatgagcagccacttcacccaggacctgctgcctgagcagggcatccaggatgccttccccaagaggatcctgcggggctacggcaactgtggcctggacaacctgtacctgaggaaggactgggagagcctggatgagtgcaagctgcagaagtag

SEQ ID NO: 176597 - DNA, 348 bp, synthetic construct
  misc_feature 1..348: note = Description of Artificial Sequence: Synthetic coding sequence
  source 1..348: mol_type = other DNA
atggccggggcccagaccctgctgaccttcagagatgtggccatcgagttcagcctggaggagtggaagtgcctggacctggcccagcagaacctgtacagagatgtgatgctggagaactacagaaacctcttctctgtgggcctgactgtgtgcaagccaggcctcatcacctgcctggagcagaggaaggagccctggaatgtgaagaggcaggaggccgcagatggccaccctgagatgggcttccaccacgccacccaggcctgcctggagctgctgggcagcagtgacctgcctgccagcgccagccagagcgctggcatcaccggggtgaaccacaggtag

SEQ ID NO: 176598 - DNA, 1281 bp, synthetic construct
  misc_feature 1..1281: note = Description of Artificial Sequence: Synthetic coding sequence
  source 1..1281: mol_type = other DNA
atggctgctgtgagccccaccacccgctgccaggagagcgtgacctttgaagatgtggccgtggtgttcacagatgaggagtggagccggctggtgcccatccagagggacctgtacaaggaggtgatgctggagaactacaacagcatcgtgtccctgggcctgcctgtgccccagccagatgtgatcttccagctgaagagaggagacaagccctggatggtggacctgcacggcagcgaggagcgggagtggccagagagcgtgtccctggactgggagaccaagccagagatccatgatgccagtgacaagaagtctgagggcagcctgagagaatgtctgggccggcagagccccctgtgccccaagtttgaggtgcacaccccaaatggaaggatgggcacagagaagcagagccccagcggggagaccaggaagaagagcctgagccgggacaagggcctgcggaggagaagaagtgccctgagccgggagatcctgaccaaggagcggcaccaggagtgcagcgactgtgggaagaccttctttgaccacagcagcctgaccaggcaccagaggacccacactggagagaagccctatgactgccgggagtgtgggaaggccttcagccacaggagcagcctgagccgccacctgatgagccacactggagagagcccctatgaatgttctgtgtgcagcaaggccttctttgacaggagcagcctgactgtgcaccagaggatccacactggagagaagcccttccagtgcaatgaatgtgggaaggccttctttgacaggagcagcctgaccaggcaccagaggatccacactggagagagcccctatgagtgccaccagtgtgggaaggccttcagccagaagagcatcctgaccaggcaccagctgatccacactggaaggaagccctatgaatgtaatgaatgtgggaaggccttctacggcgtgagcagcctgaacagacaccagaaggcccatgctggggacccccgctaccagtgcaatgaatgtgggaaggccttctttgacaggagcagcctgacccagcaccagaagatccacactggagacaagccctatgaatgttctgaatgtgggaaggccttcagccagcgctgccgcctgaccaggcaccagagggtgcacactggagagaagccctttgaatgtactgtgtgtgggaaggtgttcagcagcaagagcagcgtcatccagcaccagaggagatatgccaagcagggcattgattag

SEQ ID NO: 176599 - DNA, 1155 bp, synthetic construct
  misc_feature 1..1155: note = Description of Artificial Sequence: Synthetic coding sequence
  source 1..1155: mol_type = other DNA
atgctggagaactacaacagcatcgtgtccctgggcctgcctgtgccccagccagatgtgatcttccagctgaagagaggagacaagccctggatggtggacctgcacggcagcgaggagcgggagtggccagagagcgtgtccctggactgggagaccaagccagagatccatgatgccagtgacaagaagtctgagggcagcctgagagaatgtctgggccggcagagccccctgtgccccaagtttgaggtgcacaccccaaatggaaggatgggcacagagaagcagagccccagcggggagaccaggaagaagagcctgagccgggacaagggcctgcggaggagaagaagtgccctgagccgggagatcctgaccaaggagcggcaccaggagtgcagcgactgtgggaagaccttctttgaccacagcagcctgaccaggcaccagaggacccacactggagagaagccctatgactgccgggagtgtgggaaggccttcagccacaggagcagcctgagccgccacctgatgagccacactggagagagcccctatgaatgttctgtgtgcagcaaggccttctttgacaggagcagcctgactgtgcaccagaggatccacactggagagaagcccttccagtgcaatgaatgtgggaaggccttctttgacaggagcagcctgaccaggcaccagaggatccacactggagagagcccctatgagtgccaccagtgtgggaaggccttcagccagaagagcatcctgaccaggcaccagctgatccacactggaaggaagccctatgaatgtaatgaatgtgggaaggccttctacggcgtgagcagcctgaacagacaccagaaggcccatgctggggacccccgctaccagtgcaatgaatgtgggaaggccttctttgacaggagcagcctgacccagcaccagaagatccacactggagacaagccctatgaatgttctgaatgtgggaaggccttcagccagcgctgccgcctgaccaggcaccagagggtgcacactggagagaagccctttgaatgtactgtgtgtgggaaggtgttcagcagcaagagcagcgtcatccagcaccagaggagatatgccaagcagggcattgattag

SEQ ID NO: 176600 - DNA, 1041 bp, synthetic construct
  misc_feature 1..1041: note = Description of Artificial Sequence: Synthetic coding sequence
  source 1..1041: mol_type = other DNA
atgctggagaactacaacagcatcgtgtccctggactgggagaccaagccagagatccatgatgccagtgacaagaagtctgagggcagcctgagagaatgtctgggccggcagagccccctgtgccccaagtttgaggtgcacaccccaaatggaaggatgggcacagagaagcagagccccagcggggagaccaggaagaagagcctgagccgggacaagggcctgcggaggagaagaagtgccctgagccgggagatcctgaccaaggagcggcaccaggagtgcagcgactgtgggaagaccttctttgaccacagcagcctgaccaggcaccagaggacccacactggagagaagccctatgactgccgggagtgtgggaaggccttcagccacaggagcagcctgagccgccacctgatgagccacactggagagagcccctatgaatgttctgtgtgcagcaaggccttctttgacaggagcagcctgactgtgcaccagaggatccacactggagagaagcccttccagtgcaatgaatgtgggaaggccttctttgacaggagcagcctgaccaggcaccagaggatccacactggagagagcccctatgagtgccaccagtgtgggaaggccttcagccagaagagcatcctgaccaggcaccagctgatccacactggaaggaagccctatgaatgtaatgaatgtgggaaggccttctacggcgtgagcagcctgaacagacaccagaaggcccatgctggggacccccgctaccagtgcaatgaatgtgggaaggccttctttgacaggagcagcctgacccagcaccagaagatccacactggagacaagccctatgaatgttctgaatgtgggaaggccttcagccagcgctgccgcctgaccaggcaccagagggtgcacactggagagaagccctttgaatgtactgtgtgtgggaaggtgttcagcagcaagagcagcgtcatccagcaccagaggagatatgccaagcagggcattgattag

SEQ ID NO: 176601 - DNA, 1320 bp, synthetic construct
  misc_feature 1..1320: note = Description of Artificial Sequence: Synthetic coding sequence
  source 1..1320: mol_type = other DNA
atggctgctgtgagccccaccacccgctgccaggagagcgtgacctttgaagatgtggccgtggtgttcacagatgaggagtggagccggctggtgcccatccagagggacctgtacaaggaggtgatgctggagaactacaacagcatcgtgtccctgggcctgcctgtgccccagccagatgtgatcttccagctgaagagaggagacaagccctggatggtggacctgcacggcagcgaggagcgggagtggccagagagcgtgtccctggcccaggagaagaactgcatctgcttcctgtttgtgcctgactgggagaccaagccagagatccatgatgccagtgacaagaagtctgagggcagcctgcgggagtgcctgggccggcagagccccctgtgccccaagtttgaggtgcacacccccaacggccgcatgggcacagagaagcagagccccagcggggagaccaggaagaagagcctgagccgggacaagggcctgcggcggcggcgcagcgccctgagccgggagatcctgaccaaggagcggcaccaggagtgcagcgactgtgggaagaccttctttgaccacagcagcctgaccaggcaccagaggacccacactggagagaagccctatgactgcagagaatgtgggaaggccttcagccacaggagcagcctgagccgccacctgatgagccacactggagagagcccctatgagtgcagcgtgtgcagcaaggccttctttgacaggagcagcctgactgtgcaccagaggatccacactggagagaagcccttccagtgcaatgaatgtgggaaggccttctttgacaggagcagcctgaccaggcaccagaggatccacactggagagagcccctatgagtgccaccagtgtgggaaggccttcagccagaagagcatcctgaccaggcaccagctgatccacacaggcaggaagccctatgagtgcaatgaatgtgggaaggccttctatggagtgagcagcctgaacagacaccagaaggcccacgccggggacccccgctaccagtgcaatgaatgtgggaaggccttctttgacaggagcagcctgacccagcaccagaagatccacactggagacaagccctatgagtgcagtgaatgtgggaaggccttcagccagcgctgccgcctgaccaggcaccagagggtgcacactggagagaagccctttgagtgcaccgtgtgtgggaaggtgttcagcagcaagagcagcgtcatccagcaccagaggagatatgccaagcagggcatcgactag

SEQ ID NO: 176602 - DNA, 1611 bp, synthetic construct
  misc_feature 1..1611: note = Description of Artificial Sequence: Synthetic coding sequence
  source 1..1611: mol_type = other DNA
atgatgttccaggacagcgtggcctttgaagatgtggccgtgtccttcacccaggaggagtgggccctgctggaccccagccagaagaacctgtacagagatgtgatgcaggagaccttcaagaacctgacctctgtgggcaagacctggaaggtgcagaacattgaagatgagtacaagaaccccaggaggaacctgagcctgatgagggagaagctgtgtgagagcaaggagagccaccactgtggggagagcttcaaccagattgctgatgacatgctgaacaggaagaccctgcccggcatcaccccctgtgagagctctgtgtgtggggaggtgggcaccggccacagcagcctgaacacccacatccgggctgacaccggccacaagagcagcgagtaccaggagtatggagagaacccctacagaaacaaggagtgcaagaaggccttctcctacctggacagcttccagagccatgacaaggcctgcaccaaggagaagccctatgatggcaaggaatgtacagagaccttcatcagccacagctgcatccagaggcaccgggtgatgcacagcggagatggcccctacaagtgcaagttctgtgggaaggccttctacttcctgaacctgtgcctgattcatgagcgcatccacactggagtgaagccctacaagtgcaagcagtgtgggaaggccttcaccaggagcaccaccctgcctgtgcatgagaggacccacactggagtgaatgctgatgagtgcaaggaatgtggaaatgccttctccttccccagcgagatcagaagacacaagaggagccacactggagagaagccctatgagtgcaagcagtgtgggaaggtgttcatctccttcagcagcatccagtaccacaagatgacccacactggagagaagccctatgagtgcaagcagtgtgggaaggccttccgctgtggcagccacctgcagaagcacggccgcacccacactggagagaagccctatgagtgccggcagtgtgggaaggccttccgctgcaccagtgacctgcagagacatgagaagacccacacagaggacaagccctacggctgcaagcagtgtgggaagggcttccgctgtgccagccagctgcagatccacgagaggacccacagcggggagaagccccatgagtgcaaggaatgtgggaaggtgttcaagtacttcagcagcctgcgcatccacgagaggacccacactggagagaagccccatgagtgcaagcagtgtgggaaggccttccgctacttcagcagcctgcacatccacgagaggacccacactggagacaagccctatgagtgcaaggtgtgtgggaaggccttcacctgcagcagcagcatccgctaccacgagaggacccacactggagagaagccctatgagtgcaagcactgtgggaaggccttcatcagcaactacatccgctaccacgagaggacccacactggagagaagccctaccagtgcaagcagtgtgggaaggccttcatcgtgcctgtgcacgtggagaacatgaaggagctgatccccctgattgatgagaagagcttctag

SEQ ID NO: 176603 - DNA, 1599 bp, synthetic construct
  misc_feature 1..1599: note = Description of Artificial Sequence: Synthetic coding sequence
  source 1..1599: mol_type = other DNA
atgatgttccaggacagcgtggcctttgaagatgtggccgtgtccttcacccaggaggagtgggccctgctggaccccagccagaagaacctgtacagagatgtgatgcaggagaccttcaagaacctgacctctgtgggcaagacctggaaggtgcagaacattgaagatgagtacaagaaccccaggaggaacctgagcctgatgagggagaagctgtgtgagagcaaggagagccaccactgtggggagagcttcaaccagattgctgatgacatgctgaacaggaagaccctgcccggcatcaccccctgtgagagctctgtgtgtggggaggtgggcaccggccacagcagcctgaacacccacatccgggctgacaccggccacaagagcagcgagtaccaggagtatggagagaacccctacagaaacaaggagtgcaagaaggccttctcctacctggacagcttccagagccatgacaaggcctgcaccaaggagaagccctatgatggcaaggaatgtacagagaccttcatcagccacagctgcatccagaggcaccgggtgatgcacagcggagatggcccctacaagtgcaagttctgtgggaaggccttctacttcctgaacctgtgcctgattcatgagcgcatccacactggagtgaagccctacaagtgcaagcagtgtgggaaggccttcaccaggagcaccaccctgcctgtgcatgagaggacccacactggagtgaatgctgatgagtgcaaggaatgtggaaatgccttctccttccccagcgagatcagaagacacaagaggagccacactggagagaagccctatgagtgcaagcagtgtgggaaggtgttcatctccttcagcagcatccagtaccacaagatgacccacactggagagaagccctatgagtgcaagcagtgtgggaaggccttccgctgtggcagccacctgcagaagcacggccgcacccacactggagagaagccctatgagtgccggcagtgtgggaaggccttccgctgcaccagtgacctgcagagacatgagaagacccacacagaggacaagccctacggctgcaagcagtgtgggaagggcttccgctgtgccagccagctgcagatccacgagaggacccacagcggggagaagccccatgagtgcaaggaatgtgggaaggtgttcaagtacttcagcagcctgcgcatccacgagaggacccacactggagagaagccccatgagtgcaagcagtgtgggaaggccttccgctacttcagcagcctgcacatccacgagaggacccacactggagacaagccctatgagtgcaaggtgtgtgggaaggccttcacctgcagcagcagcatccgctaccacgagaggacccacactggagagaagccctatgagtgcaagcactgtgggaaggccttcatcagcaactacatccgctaccacgagaggacccacactggagagaagccctaccagtgcaagcagtgtgggaaggccttcatccgggccagcagctgccgggagcacgagaggacccacaccatcaacagatag

SEQ ID NO: 176604 - DNA, 1185 bp, synthetic construct
  misc_feature 1..1185: note = Description of Artificial Sequence: Synthetic coding sequence
  source 1..1185: mol_type = other DNA
atgatggccgccaaggtggtgcccatgccacccaagcccaagcagagcttcatcctgcgggtgcccccagacagcaagctgggccaggacctgctgagagatgccaccaacggccccaagaccatccaccagctggtgctggagcacttcctgaccttcctgcccaagcccagcctggtgcagcccagccagaaggtgaaggagaccctggtgatcatgaaggatgtgagcagcagcctgcagaacagagtgcacccccggcccctggtgaagctgctgcccaagggcgtgcagaaggagcaggagaccgtgtccctgtacctgaaggccaaccctgagctggtggtgtttgaggacctgaatgtgttccactgccaggaggagtgtgtgtccctggaccccacccagcagctgaccagcgagaaggaggatgacagctctgtgggggagatgatgctgctggccgtgaatggcagcaaccctgagggggaggaccctgagcgggagcctgtggagaatgaagactaccgggagaagagcagtgatgatgatgagatggacagcagcctggtgtcccagcagcccccagacaaccaggagaaggagcggctgaacaccagcatcccccagaagaggaagatgaggaacctgctggtgaccattgaaaatgacacccccctggaggagctgagcaaatatgtggacatcagcatcatcgccctgaccaggaacagaaggacccggcgctggtacacctgccccctgtgtgggaagcagttcaatgaaagcagctacctgatcagccaccagaggacccacactggagagaagccctatgactgcaaccactgtgggaagagcttcaaccacaagaccaacctgaacaagcatgagcgcatccacactggagagaagccctacagctgcagccagtgtgggaagaacttccggcagaacagccacaggagcagacatgagggcatccacatccgggagaagatcttcaagtgcccagaatgtgggaagaccttccccaagaatgaggagtttgtgctgcacctgcagagccatgaagctgagcggccctacggctgcaagaagtgtggccgccgcttcggccgcctgagcaactgcaccaggcatgagaagacccacagcgcctgcaagaccaggaagcagaagtag

SEQ ID NO: 176605 - DNA, 1188 bp, synthetic construct
  misc_feature 1..1188: note = Description of Artificial Sequence: Synthetic coding sequence
  source 1..1188: mol_type = other DNA
atgatggccgccaaggtggtgcccatgccacccaagcccaagcagagcttcatcctgcgggtgcccccagacagcaagctgggccaggacctgctgagagatgccaccaacggccccaagaccatccaccagctggtgctggagcacttcctgaccttcctgcccaagcccagcctggtgcagcccagccagaaggtgaaggagaccctggtgatcatgaaggatgtgagcagcagcctgcagaacagagtgcacccccggcccctggtgaagctgctgcccaagggcgtgcagaaggagcaggagaccgtgtccctgtacctgaaggccaaccctgaggagctggtggtgtttgaggacctgaatgtgttccactgccaggaggagtgtgtgtccctggaccccacccagcagctgaccagcgagaaggaggatgacagctctgtgggggagatgatgctgctggccgtgaatggcagcaacccagaaggagaagatcctgagcgggagcctgtggagaatgaagactaccgggagaagagcagtgatgatgatgagatggacagcagcctggtgtcccagcagcccccagacaaccaggagaaggagcggctgaacaccagcatcccccagaagaggaagatgaggaacctgctggtgaccattgaaaatgacacccccctggaggagctgagcaaatatgtggacatcagcatcatcgccctgaccaggaacagaaggacccggcgctggtacacctgccccctgtgtgggaagcagttcaatgaaagcagctacctgatcagccaccagaggacccacactggagagaagccctatgactgcaaccactgcggcaagagcttcaaccacaagaccaacctgaacaagcatgagcgcatccacactggagagaagccctacagctgcagccagtgtgggaagaacttccggcagaacagccacaggagcagacatgagggcatccacatccgggagaagatcttcaagtgcccagaatgtgggaagaccttccccaagaatgaggagtttgtgctgcacctgcagagccatgaggccgagcggccctacggctgcaagaagtgtggcagaagatttggccgcctgagcaactgcaccaggcatgagaagacccacagcgcctgcaagaccaggaagcagaagtag

SEQ ID NO: 176606 - DNA, 1185 bp, synthetic construct
  misc_feature 1..1185: note = Description of Artificial Sequence: Synthetic coding sequence
  source 1..1185: mol_type = other DNA
atgatggccgccaaggtggtgcccatgccacccaagcccaagcagagcttcatcctgcgggtgcccccagacagcaagctgggccaggacctgctgagagatgccaccaacggccccaagaccatccaccagctggtgctggagcacttcctgaccttcctgcccaagcccagcctggtgcagcccagccagaaggtgaaggagaccctggtgatcatgaaggatgtgagcagcagcctgcagaacagagtgcacccccggcccctggtgaagctgctgcccaagggcgtgcagaaggagcaggagaccgtgtccctgtacctgaaggccaaccctgaggagctggtggtgtttgaggacctgaatgtgttccactgccaggaggagtgtgtgtccctggaccccacccagcagctgaccagcgagaaggaggatgacagctctgtgggggagatgatgctgctggtgaatggcagcaaccctgagggggaggaccctgagcgggagcctgtggagaatgaagactaccgggagaagagcagtgatgatgatgagatggacagcagcctggtgtcccagcagcccccagacaaccaggagaaggagcggctgaacaccagcatcccccagaagaggaagatgaggaacctgctggtgaccattgaaaatgacacccccctggaggagctgagcaaatatgtggacatcagcatcatcgccctgaccaggaacagaaggacccggcgctggtacacctgccccctgtgtgggaagcagttcaatgaaagcagctacctgatcagccaccagaggacccacactggagagaagccctatgactgcaaccactgtgggaagagcttcaaccacaagaccaacctgaacaagcatgagcgcatccacactggagagaagccctacagctgcagccagtgtgggaagaacttccggcagaacagccacaggagcagacatgagggcatccacatccgggagaagatcttcaagtgcccagaatgtgggaagaccttccccaagaatgaggagtttgtgctgcacctgcagagccatgaagctgagcggccctacggctgcaagaagtgtggccgccgcttcggccgcctgagcaactgcaccaggcatgagaagacccacagcgcctgcaagaccaggaagcagaagtag

SEQ ID NO: 176607 - DNA, 1185 bp, synthetic construct; identical to SEQ ID NO: 176606
  misc_feature 1..1185: note = Description of Artificial Sequence: Synthetic coding sequence
  source 1..1185: mol_type = other DNA

SEQ ID NO: 176608 - DNA, 1188 bp, synthetic construct; identical to SEQ ID NO: 176605
  misc_feature 1..1188: note = Description of Artificial Sequence: Synthetic coding sequence
  source 1..1188: mol_type = other DNA

SEQ ID NO: 176609 - DNA, 1947 bp, synthetic construct
  misc_feature 1..1947: note = Description of Artificial Sequence: Synthetic coding sequence
  source 1..1947: mol_type = other DNA
atggccacagctgtggagcctgaggaccaggacctgtgggaggaggagggcatcctgatggtgaagctggaggatgacttcacctgcaggcctgagagcgtgctgcagagagatgatcctgtgctggagaccagccaccagaacttccgccgcttccgctaccaggaggccgccagcccccgggaggccctgatccggctgcgggagctgtgccaccagtggctgcggcctgagaggaggaccaaggagcagatcctggagctgctggtgctggagcagttcctgactgtgctgcctggagagctgcagagctgggtgcggggccagaggcctgagagcggggaggaggccgtgaccctggtggagggcctgcagaagcagccccggcggccccggcgctgggtgacagtgcacgtgcacggccaggaggtgctgtctgaggagaccgtgcacctgggcgtggagcctgagagccccaatgagctgcaggaccctgtgcagagcagcaccccagagcagagccctgaggagaccacccagagcccagacctgggcgccccagctgagcagaggccccaccaggaggaggagctgcagaccctgcaggagagcgaggtgcctgtgcctgaggaccctgacctgcctgctgagaggagcagcggggacagcgagatggtggccctgctgacagccctgagccagggcctggtgaccttcaaggatgtggccgtgtgcttcagccaggaccagtggagcgacctggaccccacccagaaggagttctacggggagtatgtgctggaggaggactgtggcatcgtggtgtccctgtccttccccatccccaggccagatgagatcagccaggtgcgggaggaggagccctgggtgcctgacatccaggagccccaggagacccaggagcctgagatcctgtccttcacctacacaggagacaggagcaaggatgaggaggagtgcctggagcaggaggacctgagcctggaggacatccacaggcctgtgctgggggagcctgagatccaccagaccccagactgggagatcgtgtttgaggacaaccctggccgcctgaatgaaagacgcttcggcaccaacatcagccaggtgaacagctttgtgaacctgcgggagaccacccctgtgcaccccctgctgggccgccaccacgactgcagcgtgtgtgggaagagcttcacctgcaacagccacctggtgcgccacctgcggacccacactggagagaagccctacaagtgcatggagtgtgggaagagctacaccaggagcagccacctggcccggcaccagaaggtgcacaagatgaatgccccctacaagtaccccctgaacaggaagaacctggaggagaccagccctgtgacccaggccgagaggacccccagcgtggagaagccctaccgctgtgatgactgtgggaagcacttccgctggaccagtgacctggtgcgccaccagaggacccacactggagagaagcccttcttctgcaccatctgtgggaagagcttcagccagaagtctgtgctgaccacccaccagaggatccacctgggcggcaagccctacctgtgtggagaatgtggggaggacttcagcgagcaccggcgctacctggcccacaggaagacccacgccgctgaggagctgtacctgtgcagtgaatgtggccgctgcttcacccacagcgctgcctttgccaagcacctgcggggccacgcctctgtgcggccctgccgctgcaatgaatgtgggaagagcttcagccggcgggaccacctggtgcgccaccagaggacccacactggagagaagcccttcacctgccccacctgtgggaagagcttcagccggggctaccacctgatccgccaccagaggacccacagcgagaagaccagctag

SEQ ID NO: 176610 - DNA, 1947 bp, synthetic construct; identical to SEQ ID NO: 176609
  misc_feature 1..1947: note = Description of Artificial Sequence: Synthetic coding sequence
  source 1..1947: mol_type = other DNA

SEQ ID NO: 176611 - DNA, 1947 bp, synthetic construct; identical to SEQ ID NO: 176609
  misc_feature 1..1947: note = Description of Artificial Sequence: Synthetic coding sequence
  source 1..1947: mol_type = other DNA

SEQ ID NO: 176612 - DNA, 399 bp, synthetic construct
  misc_feature 1..399: note = Description of Artificial Sequence: Synthetic coding sequence
  source 1..399: mol_type = other DNA
atgacagctgctgccagcctgctggccagcctgctgcctgccctgccccccctgaacctgcaggatgccaagtttgtggaggagaggaggaagcagctgcagaactacctgcggtctgtgatgaacaaggtgatccagatggtgcctgagtttgctgccagccccaagaaggagaccctcatccagctgatgcccttctttgtgatgggcctgcaggtgggcatgtatggcctcttccactttggagtgatgatggaccagccccagcccagcctgaccagggcagatgagagcccctgtgacagagtgctgagcccctgtgccgcccacaggaagcagagggactgctgcctgtcctggaaggccgagcctgagcgcttcctggtgaagaagaagtag

SEQ ID NO: 176613 - DNA, 1665 bp, synthetic construct; identical to SEQ ID NO: 162821
  misc_feature 1..1665: note = Description of Artificial Sequence: Synthetic coding sequence
  source 1..1665: mol_type = other DNA

SEQ ID NO: 176614 - DNA, 840 bp, synthetic construct
  misc_feature 1..840: note = Description of Artificial Sequence: Synthetic coding sequence
  source 1..840: mol_type = other DNA
atgtctgcagatggcggcggcatccaggacacccaggacaaggagaccccacctgaggtgcctgaccggggccacccccaccaggagatgcccagcaagctgggggaggccgtgcccagcggggacacccaggagagcctgcacatcaagatggagcctgaggagccccacagcgagggcgccagccaggaggatggagcccagggcgcctggggctgggcccccctgagccacggcagcaaggagaaggccctcttcctgcccggcggggccctgcccagcccccgcatccctgtgctgagccgggagggccgcacccgggaccggcagatggctgctgccctgctgacagcctggagccagatgcctgtgacctttgaagatgtggccctgtacctgagccgggaggagtggggccgcctggaccacacccagcagaacttctacagagatgtgctgcagaagaagaatggcctgagcctgggcttccccttcagccggcccttctgggccccccaggcccatggaaaaggagaggccagcggcagcagccggcaggccggagatgagaaggagtggaggggggcctgcaccggggctgtggaggtgggccagagggtgcagaccagctctgtggccgccctgggcaatgtgaagcccttccgcaccagggctggccgggtgcagtggggcgtgccccagtgtgcccaggaggccgcctgtggccgcagcagcggccctgccaaggacagcggccagcctgctgagccagacaggaccccagatgctgcccccccagaccccagccccacagagccccaggagtacagagtgccctag

SEQ ID NO: 176615 - DNA, 357 bp, synthetic construct
  misc_feature 1..357: note = Description of Artificial Sequence: Synthetic coding sequence
  source 1..357: mol_type = other DNA
atgtctgcagatggcggcggcatccaggacacccaggacaaggagaccccacctgaggtgcctgaccggggccacccccaccaggagatgcccagcaagctgggggaggccgtgcccagcggggacacccaggagagcctgcacatcaagatggagcctgaggagccccacagcgagggcgccagccaggaggatggagcccagggcgcctggggctgggcccccctgagccacggcagcaaggagaaggccctcttcctgcccggcggggccctgcccagcccccgcatccctgtgctgagccgggagggccgcacccgggaccggcagatggctgctgccctgctgacagcctag

SEQ ID NO: 176616 - DNA, 1392 bp, synthetic construct
  misc_feature 1..1392: note = Description of Artificial Sequence: Synthetic coding sequence
  source 1..1392: mol_type = other DNA
atgggcaggaagaagaagaagcagctgaagccctggtgctggtactgcaacagagactttgatgatgagaagatcctgatccagcaccagaaggccaagcacttcaagtgccacatctgccacaagaagctgtacacaggccctggcctggccatccactgcatgcaggtgcacaaggagaccattgatgctgtgcccaatgccatccctggccgcacagacatcgagctggagatctacggcatggagggcatccctgagaaggacatggatgaaagaagaaggctgctggagcagaagacccaggagagccagaagaagaagcagcaggatgacagtgatgaatatgatgatgatgattctgctgccagcaccagcttccagccccagcctgtgcagccccagcagggctacatcccccccatggcccagcccggcctgccccctgtgcctggggcccctggcatgcctcctggcatcccccccctgatgcctggggtgccccccctgatgcctggcatgcctcctgtgatgcctggcatgcctcctggcctgcaccaccagaggaagtacacccagagcttctgtggggagaacatcatgatgcccatgggcggcatgatgcctcctggccctggcatcccccccctgatgcctggcatgcctcctggcatgcctcctcctgtgccccggcccggcatcccccccatgacccaggcccaggccgtgtctgcccctggcatcctgaaccggcccccagcccccacagccaccgtgcctgccccccagccccctgtgaccaagcccctcttccccagcgctggccaggcccaggccgctgtgcagggccctgtgggcacagacttcaagcccctgaacagcaccccagccaccaccacagagccccccaagcccaccttccctgcctacacccagagcacagccagcaccaccagcaccaccaacagcacagctgccaagccagctgccagcatcaccagcaagccagccaccctgaccaccaccagcgccaccagcaagctgatccacccagatgaggacatcagcctggaggagcggcgggcccagctgcccaagtaccagaggaacctgccccggcccggccaggcccccatcggcaacccccctgtgggccccatcggcggcatgatgccaccccagcccggcatcccccagcagcagggcatgaggcctcccatgccaccccacggccagtatggaggccaccaccagggcatgcctggctacctgcccggggccatgccaccctacggccagggcccccccatggtgcccccctaccagggcggccccccccggccccccatgggcatgaggcctcctgtgatgagccagggcggccgctactag

SEQ ID NO: 176617 - DNA, 1188 bp, synthetic construct
  misc_feature 1..1188: note = Description of Artificial Sequence: Synthetic coding sequence
  source 1..1188: mol_type = other DNA
atgggcaggaagaagaagaagcagctgaagccctggtgctggtactgcaacagagactttgatgatgagaagatcctgatccagcaccagaaggccaagcacttcaagtgccacatctgccacaagaagctgtacacaggcctgccccctgtgcctggggcccctggcatgcctcctggcatcccccccctgatgcctggggtgccccccctgatgcctggcatgcctcctgtgatgcctggcatgcctcctggcctgcaccaccagaggaagtacacccagagcttctgtggggagaacatcatgatgcccatgggcggcatgatgcctcctggccctggcatcccccccctgatgcctggcatgcctcctggcatgcctcctcctgtgcccaggcctggcatcccccccatgacccaggcccaggccgtgtctgcccctggcatcctgaacagacctccagcccccacagccaccgtgcctgccccccagccccctgtgaccaagcccctcttccccagcgctggccagatgggcacccctgtgaccagcagcagcacagccagcagcaacagcgagagcctgagcgccagcagcaaggccctcttccccagcacagcccaggcccaggccgctgtgcagggccctgtgggcacagacttcaagcccctgaacagcaccccagccaccaccacagagccccccaagcccaccttccctgcctacacccagagcacagccagcaccaccagcaccaccaacagcacagctgccaagccagctgccagcatcaccagcaagccagccaccctgaccaccaccagcgccaccagcaagctgatccacccagatgaggacatcagcctggaggagcggcgggcccagctgcccaagtaccagaggaacctgccccggcccggccaggcccccatcggcaacccccctgtgggccccatcggcggcatgatgccaccccagcccggcatcccccagcagcagggcatgaggcctcccatgccaccccacggccagtatggaggccaccaccagggcatgcctggctacctgcccggggccatgccaccctacggccagggcccccccatggtgcccccctaccagggcggccccccccggccccccatgggcatgaggcctcctgtgatgagccagggcggccgctactag

SEQ ID NO: 176618 - DNA, 1437 bp, synthetic construct
  misc_feature 1..1437: note = Description of Artificial Sequence: Synthetic coding sequence
  source 1..1437: mol_type = other DNA
atgggcaggaagaagaagaagcagctgaagccctggtgctggtactgcaacagagactttgatgatgagaagatcctgatccagcaccagaaggccaagcacttcaagtgccacatctgccacaagaagctgtacacaggccctggcctggccatccactgcatgcaggtgcacaaggagaccattgatgctgtgcccaatgccatccctggccgcacagacatcgagctggagatctacggcatggagggcatccctgagaaggacatggatgaaagaagaaggctgctggagcagaagacccaggagagccagaagaagaagcagcaggatgacagtgatgaatatgatgatgatgattctgctgccagcaccagcttccagccccagcctgtgcagccccagcagggctacatcccccccatggcccagcccggcctgccccctgtgcctggggcccctggcatgcctcctggcatcccccccctgatgcctggggtgccccccctgatgcctggcatgcctcctgtgatgcctggcatgcctcctggcatgatgcccatgggcggcatgatgcctcctggccctggcatcccccccctgatgcctggcatgcctcctggcatgcctcctcctgtgccccggcccggcatcccccccatgacccaggcccaggccgtgtctgcccctggcatcctgaaccggcccccagcccccacagccaccgtgcctgccccccagccccctgtgaccaagcccctcttccccagcgctggccagatgggcacccctgtgaccagcagcagcacagccagcagcaacagcgagagcctgagcgccagcagcaaggccctcttccccagcacagcccaggcccaggccgctgtgcagggccctgtgggcacagacttcaagcccctgaacagcaccccagccaccaccacagagccccccaagcccaccttccctgcctacacccagagcacagccagcaccaccagcaccaccaacagcacagctgccaagccagctgccagcatcaccagcaagccagccaccctgaccaccaccagcgccaccagcaagctgatccacccagatgaggacatcagcctggaggagcggcgggcccagctgcccaagtaccagaggaacctgcccaggcctggccaggcccccatcggcaacccccctgtgggccccatcggcggcatgatgccaccccagcccggcatcccccagcagcagggcatgaggcctcccatgcctcctcatggccagtatggaggccaccaccagggcatgcctggctacctgcccggggccatgccaccctacggccagggcccccccatggtgcccccctaccagggcggcccccccaggcctcccatgggcatgaggcctcctgtgatgagccagggcggccgctactag

SEQ ID NO: 176619 - DNA, 1485 bp, synthetic construct
  misc_feature 1..1485: note = Description of Artificial Sequence: Synthetic coding sequence
  source 1..1485: mol_type = other DNA
atgggcaggaagaagaagaagcagctgaagccctggtgctggtactgcaacagagactttgatgatgagaagatcctgatccagcaccagaaggccaagcacttcaagtgccacatctgccacaagaagctgtacacaggccctggcctggccatccactgcatgcaggtgcacaaggagaccattgatgctgtgcccaatgccatccctggccgcacagacatcgagctggagatctacggcatggagggcatccctgagaaggacatggatgaaagaagaaggctgctggagcagaagacccaggagagccagaagaagaagcagcaggatgacagtgatgaatatgatgatgatgattctgctgccagcaccagcttccagccccagcctgtgcagccccagcagggctacatcccccccatggcccagcccggcctgccccctgtgcctggggcccctggcatgcctcctggcatcccccccctgatgcctggggtgccccccctgatgcctggcatgcctcctgtgatgcctggcatgcctcctggcctgcaccaccagaggaagtacacccagagcttctgtggggagaacatcatgatgcccatgggcggcatgatgcctcctggccctggcatcccccccctgatgcctggcatgcctcctggcatgcctcctcctgtgccccggcccggcatcccccccatgacccaggcccaggccgtgtctgcccctggcatcctgaaccggcccccagcccccacagccaccgtgcctgccccccagccccctgtgaccaagcccctcttccccagcgctggccagatgggcacccctgtgaccagcagcagcacagccagcagcaacagcgagagcctgagcgccagcagcaaggccctcttccccagcacagcccaggcccaggccgctgtgcagggccctgtgggcacagacttcaagcccctgaacagcaccccagccaccaccacagagccccccaagcccaccttccctgcctacacccagagcacagccagcaccaccagcaccaccaacagcacagctgccaagccagctgccagcatcaccagcaagccagccaccctgaccaccaccagcgccaccagcaagctgatccacccagatgaggacatcagcctggaggagcggcgggcccagctgcccaagtaccagaggaacctgcccaggcctggccaggcccccatcggcaacccccctgtgggccccatcggcggcatgatgccaccccagcccggcatcccccagcagcagggcatgaggcctcccatgcctcctcatggccagtatggaggccaccaccagggcatgcctggctacctgcccggggccatgccaccctacggccagggcccccccatggtgcccccctaccagggcggcccccccaggcctcccatgggcatgaggcctcctgtgatgagccagggcggccgctactag

SEQ ID NO: 176620 - DNA, 1344 bp, synthetic construct
  misc_feature 1..1344: note = Description of Artificial Sequence: Synthetic coding sequence
  source 1..1344: mol_type = other DNA
atgggcaggaagaagaagaagcagctgaagccctggtgctggtactgcaacagagactttgatgatgagaagatcctgatccagcaccagaaggccaagcacttcaagtgccacatctgccacaagaagctgtacacaggccctggcctggccatccactgcatgcaggtgcacaaggagaccattgatgctgtgcccaatgccatccctggccgcacagacatcgagctggagatctacggcatggagggcatccctgagaaggacatggatgaaagaagaaggctgctggagcagaagacccaggagagccagaagaagaagcagcaggatgacagtgatgaatatgatgatgatgattctgctgccagcaccagcttccagccccagcctgtgcagccccagcagggctacatcccccccatggcccagcccggcctgccccctgtgcctggggcccctggcatgcctcctggcatcccccccctgatgcctggggtgccccccctgatgcctggcatgcctcctgtgatgcctggcatgcctcctggcatgatgcccatgggcggcatgatgcctcctggccctggcatcccccccctgatgcctggcatgcctcctggcatgcctcctcctgtgccccggcccggcatcccccccatgacccaggcccaggccgtgtctgcccctggcatcctgaaccggcccccagcccccacagccaccgtgcctgccccccagccccctgtgaccaagcccctcttccccagcgctggccaggcccaggccgctgtgcagggccctgtgggcacagacttcaagcccctgaacagcaccccagccaccaccacagagccccccaagcccaccttccctgcctacacccagagcacagccagcaccaccagcaccaccaacagcacagctgccaagccagctgccagcatcaccagcaagccagccaccctgaccaccaccagcgccaccagcaagctgatccacccagatgaggacatcagcctggaggagcggcgggcccagctgcccaagtaccagaggaacctgccccggcccggccaggcccccatcggcaacccccctgtgggccccatcggcggcatgatgccaccccagcccggcatcccccagcagcagggcatgaggcctcccatgccaccccacggccagtatggaggccaccaccagggcatgcctggctacctgcccggggccatgccaccctacggccagggcccccccatggtgcccccctaccagggcggccccccccggccccccatgggcatgaggcctcctgtgatgagccagggcggccgctactag

SEQ ID NO: 176621 - DNA, 1491 bp, synthetic construct
  misc_feature 1..1491: note = Description of Artificial Sequence: Synthetic coding sequence
  source 1..1491: mol_type = other DNA
aacacagtgatgggcaggaagaagaagaagcagctgaagccctggtgctggtactgcaacagagactttgatgatgagaagatcctgatccagcaccagaaggccaagcacttcaagtgccacatctgccacaagaagctgtacacaggccctggcctggccatccactgcatgcaggtgcacaaggagaccattgatgctgtgcccaatgccatccctggccgcacagacatcgagctggagatctacggcatggagggcatccctgagaaggacatggatgagcggcggcggctgctggagcagaagacccaggagagccagaagaagaagcagcaggatgacagtgatgaatatgatgatgatgacagcgctgccagcaccagcttccagccccagcctgtgcagccccagcagggctacatcccccccatggcccagcccggcctgccccctgtgcctggggcccctggcatgcctcctggcatcccccccctgatgcctggggtgccccccctgatgcctggcatgcctcctgtgatgcctggcatgcctcctggcctgcaccaccagaggaagtacacccagagcttctgtggggagaacatcatgatgcccatgggcggcatgatgcctcctggccctggcatcccccccctgatgcctggcatgcctcctggcatgcctcctcctgtgcccaggcctggcatcccccccatgacccaggcccaggccgtgtctgcccctggcatcctgaacagacctccagcccccacagccaccgtgcctgccccccagccccctgtgaccaagcccctcttccccagcgctggccagatgggcacccctgtgaccagcagcagcacagccagcagcaacagcgagagcctgagcgccagcagcaaggccctcttccccagcacagcccaggcccaggccgctgtgcagggccctgtgggcacagacttcaagcccctgaacagcaccccagccaccaccacagagccccccaagcccaccttccctgcctacacccagagcacagccagcaccaccagcaccaccaacagcacagctgccaagccagctgccagcatcaccagcaagccagccaccctgaccaccaccagcgccaccagcaagctgatccacccagatgaggacatcagcctggaggagcggcgggcccagctgcccaagtaccagaggaacctgccccggcccggccaggcccccatcggcaacccccctgtgggccccatcggcggcatgatgccaccccagcccggcatcccccagcagcagggcatgaggcctcccatgccaccccacggccagtatggaggccaccaccagggcatgcctggctacctgcccggggccatgccaccctacggccagggcccccccatggtgcccccctaccagggcggccccccccggccccccatgggcatgaggcctcctgtgatgagccagggcctgccctag

SEQ ID NO: 176622 - DNA, 3843 bp, synthetic construct
  misc_feature 1..3843: note = Description of Artificial Sequence: Synthetic coding sequence
  source 1..3843: mol_type = other DNA
atgggcagcctgaccttcagagatgtggccatcgagttcagcctggaggagtggcagtgcctggacacagcccagcagaacctgtacagaaatgtgatgctggagaactacagaaacctggtgttcctgggcattgctgccttcaagccagacctgatcatcttcctggaggagggcaaggagagctggaacatgaagagacatgagatggtggaggagagccctgtgatctgcagccactttgcccaggacctgtggccagagcagggcatcgaggacagcttccagaaggtgatcctgcggcgctatgaaaaatgtggccacgagaacctgcacctgaagattggctacaccaacgtggatgagtgcaaggtgcacaaggagggctacaacaagctgaaccagagcctgaccaccacccagagcaaggtgttccagaggggcaagtatgccaacgtgttccacaagtgcagcaacagcaacagacacaagatccgccacacaggcaagaagcacctgcagtgcaaggagtatgtgcgctccttctgcatgctgagccacctgagccagcacaagaggatctacacccgggagaacagctacaagtgtgaggagggcggcaaggccttcaactggagcagcaccctgacctactacaagagcgcccacactggagagaagccctaccgctgcaaggaatgtgggaaggccttcagcaagttcagcatcctgaccaagcacaaggtgatccacactggagagaagagctacaagtgtgaagaatgtgggaaggccttcaaccagagcgccatcctgaccaagcacaagatcatccacactggagagaagcccaacaagtgtgaagaatgtgggaaggccttcagcaaggtgtccaccctgaccacccacaaggccatccacgccggggagaagccctacaagtgcaaggaatgtgggaaggccttcagcaaggtgtccaccctcatcacccacaaggccatccacgccggggagaagccctacaagtgcaaggaatgtgggaaggccttcagcaagttcagcatcctgaccaagcacaaggtgatccacactggagagaagccctacaagtgtgaagaatgtgggaaggcctacaagtggcccagcaccctgagctaccacaagaagatccacactggagagaagccctacaagtgtgaagaatgtgggaagggcttctccatgttcagcatcctgaccaagcatgaagtcatccacactggagagaagccctacaagtgtgaagaatgtgggaaggccttcaactggagcagcaacctgatggagcacaagaagatccacactggagagaccccctacaagtgtgaagaatgtgggaagggcttctccatgttcagcatcctgaccaagcacaaggtgatccacaacggggagaagccctacaagtgtgaagaatgtgacaaggccacccacgccggggagaagccctacaagtgtgaagaatgtgggaaggccttcaactggagcagcaacctgatggagcacaagaggatccacactggagagaagccctacaagtgtgaagaatgtgggaagagcttcagcaccttcagcatcctgaccaagcacaaggtgatccacactggagagaagccctacaagtgtgaagaatgtgggaaggcctacaagtggagcagcaccctgagctaccacaagaagatccacacagtggagaagccctacaagtgtgaagaatgtgggaaggccttcaaccagagcgccatcctgatcaagcacaagaggatccacactggagagaagccctacaagtgtgaagaatgtgggaagaccttcagcaaggtgtccaccctgaccacccacaaggccatccacgccggggagaagccctacaagtgcaaggaatgtgggaagaccttcatcaaggtgtccaccctgaccacccacaaggccatccacgccggggagaagccctacaagtgcaaggaatgtgggaaggccttcagcaagttcagcatcctgaccaagcacaaggtgatccacactggagagaagccctacaagtgtgaagaatgtgggaaggccttcaactggagcagcaacctgatggagcacaagaggatccacactggagagaagccctacaagtgtgaagaatgtgggaagagcttcagcaccttctctgtgctgaccaagcacaaggtgatccacactggagagaagccctacaagtgtgaagaatgtgggaaggcctacaagtggagcagcaccctgagctaccacaagaagatccacacagtggagaagccctacaagtgtgaagaatgtgggaaggccttcaacagaagtgccatcctgatcaagcacaagaggatccacacagatgagaagccctacaagtgtgaagaatgtgggaagaccttcagcaaggtgtccaccctgaccacccacaaggccatccacgccggggagaagccctacaagtgcaaggaatgtgggaaggccttcagcaagttcagcatcctgaccaagcacaaggtgatccacactggagagaagccctacaagtgtgaagaatgtgggaaggcctacaagtggcccagcaccctgagctaccacaagaagatccacactggagagaagccctacaagtgtgaagaatgtgggaagggcttctccatgttcagcatcctgaccaagcatgaagtcatccacactggagagaagccctacaagtgtgaagaatgtgggaaggccttctcctggctgagcgtcttcagcaagcacaagaagacccacgccggggagaagttctacaagtgtgaggcctgtgggaaggcctacaagagcagcagcaccctgagctaccacaagaagatccacacagaggagaagccctacaagtatgaagaatgtgggaagggcttcagcaccttcagcatcctgaccaagcacaaggtgatccacactggagagaagccctacaagtgtgaagaatgtgggaaggccttcaactggagcagcaacctgatggagcacaagaagatccacactggagagaccccctacaagtgtgaagaatgtgacaaggccttctcctggcccagcagcctgacagagcacaaggccacccacgccggggagaagccctacaagtgtgaagaatgtgggaaggccttctcctggcccagccggctgacagagcacaaggccacccacgccggggaggagccctacaagtgtgaagaatgtgggaaggccttcaactggagcagcaacctgatggagcacaagaggatccacactggagagaagccctacaagtgtgaagaatgtgggaagagcttcagcaccttcagcatcctgaccaagcacaaggtgatccacactggagagaagccctacaagtgtgaagaatgtgggaaggcctacaagtggagcagcaccctgagctaccacaagaagatccacacagtggagaagccctacaagtgtgaagaatgtgggaagggctttgtgatgttcagcatcctggccaagcacaaggtgatccacactggagagaagctgtacaagtgtgaagaatgtgggaaggcctacaagtggcccagcaccctgcgctaccacaagaagatccacactggagagaagccctacaagtgtgaagaatgtgggaaggccttcagcaccttcagcatcctgaccaagcacaaggtgatccacactggagagaagccctacaagtgtgaagaatgtgggaaggccttctcctggctgagcgtcttcagcaagcacaagaagatccacactggagagaagctgtag

SEQ ID NO: 176623 - DNA, 123 bp, synthetic construct
  misc_feature 1..123: note = Description of Artificial Sequence: Synthetic coding sequence
  source 1..123: mol_type = other DNA
gggaagggcttctccatgttcagcatcctgaccaagcacaaggccacccacgccggggagaagccctacaagtgtgaagaatgtgggaaggccttcaactggagcagcaacctgatggagtag

SEQ ID NO: 176624 - DNA, 3504 bp, synthetic construct
  misc_feature 1..3504: note = Description of Artificial Sequence: Synthetic coding sequence
  source 1..3504: mol_type = other DNA
atgggcagcctgaccttcagagatgtggccatcgagttcagcctggaggagtggcagtgcctggacacagcccagcagaacctgtacagaaatgtgatgctggagaactacagaaacctggtgttcctgggcattgctgccttcaagccagacctgatcatcttcctggaggagggcaaggagagctggaacatgaagagacatgagatggtggaggagagccctgtgatctgcagccactttgcccaggacctgtggccagagcagggcatcgaggacagcttccagaaggtgatcctgcggcgctatgaaaaatgtggccacgagaacctgcacctgaagattggctacaccaacgtggatgagtgcaaggtgcacaaggagggctacaacaagctgaaccagagcctgaccaccacccagagcaaggtgttccagaggggcaagtatgccaacgtgttccacaagtgcagcaacagcaacagacacaagatccgccacacaggcaagaagcacctgcagtgcaaggagtatgtgcgctccttctgcatgctgagccacctgagccagcacaagaggatctacacccgggagaacagctacaagtgtgaggagggcggcaaggccttcaactggagcagcaccctgacctactacaagagcgcccacactggagagaagccctaccgctgcaaggaatgtgggaaggccttcagcaagttcagcatcctgaccaagcacaaggtgatccacactggagagaagagctacaagtgtgaagaatgtgggaaggccttcaaccagagcgccatcctgaccaagcacaagatcatccacactggagagaagcccaacaagtgtgaagaatgtgggaaggccttcagcaaggtgtccaccctgaccacccacaaggccatccacgccggggagaagccctacaagtgcaaggaatgtgggaaggccttcagcaaggtgtccaccctcatcacccacaaggccatccacgccggggagaagccctacaagtgcaaggaatgtgggaaggccttcagcaagttcagcatcctgaccaagcacaaggtgatccacactggagagaagccctacaagtgtgaagaatgtgggaaggcctacaagtggcccagcaccctgagctaccacaagaagatccacactggagagaagccctacaagtgtgaagaatgtgggaagggcttctccatgttcagcatcctgaccaagcatgaagtcatccacactggagagaagccctacaagtgtgaagaatgtgggaaggccttcaactggagcagcaacctgatggagcacaagaagatccacactggagagaccccctacaagtgtgaagaatgtgggaagggcttcaagtggagcagcaccctgagctaccacaagaagatccacacagtggagaagccctacaagtgtgaagaatgtgggaaggccttcaaccagagcgccatcctgatcaagcacaagaggatccacactggagagaagccctacaagtgtgaagaatgtgggaagaccttcagcaaggtgtccaccctgaccacccacaaggccatccacgccggggagaagccctacaagtgcaaggaatgtgggaagaccttcatcaaggtgtccaccctgaccacccacaaggccatccacgccggggagaagccctacaagtgcaaggaatgtgggaaggccttcagcaagttcagcatcctgaccaagcacaaggtgatccacactggagagaagccctacaagtgtgaagaatgtgggaaggccttcaactggagcagcaacctgatggagcacaagaggatccacactggagagaagccctacaagtgtgaagaatgtgggaagagcttcagcaccttctctgtgctgaccaagcacaaggtgatccacactggagagaagccctacaagtgtgaagaatgtgggaaggcctacaagtggagcagcaccctgagctaccacaagaagatccacacagtggagaagccctacaagtgtgaagaatgtgggaaggccttcaacagaagtgccatcctgatcaagcacaagaggatccacacagatgagaagccctacaagtgtgaagaatgtgggaagaccttcagcaaggtgtccaccctgaccacccacaaggccatccacgccggggagaagccctacaagtgcaaggaatgtgggaaggccttcagcaagttcagcatcctgaccaagcacaaggtgatccacactggagagaagccctacaagtgtgaagaatgtgggaaggcctacaagtggcccagcaccctgagctaccacaagaagatccacactggagagaagccctacaagtgtgaagaatgtgggaagggcttctccatgttcagcatcctgaccaagcatgaagtcatccacactggagagaagccctacaagtgtgaagaatgtgggaaggccttctcctggctgagcgtcttcagcaagcacaagaagacccacgccggggagaagttctacaagtgtgaggcctgtgggaaggcctacaacaccttcagcatcctgaccaagcacaaggtgatccacactggagagaagccctacaagtgtgaagaatgtgggaaggccttcaactggagcagcaacctgatggagcacaagaagatccacactggagagaccccctacaagtgtgaagaatgtgacaaggccttctcctggcccagcagcctgacagagcacaaggccacccacgccggggagaagccctacaagtgtgaagaatgtgggaaggccttctcctggcccagccggctgacagagcacaaggccacccacgccggggaggagccctacaagtgtgaagaatgtgggaaggccttcaactggagcagcaacctgatggagcacaagaggatccacactggagagaagccctacaagtgtgaagaatgtgggaagagcttcagcaccttcagcatcctgaccaagcacaaggtgatccacactggagagaagccctacaagtgtgaagaatgtgggaaggcctacaagtggagcagcaccctgagctaccacaagaagatccacacagtggagaagccctacaagtgtgaagaatgtgggaagggctttgtgatgttcagcatcctggccaagcacaaggtgatccacactggagagaagctgtacaagtgtgaagaatgtgggaaggcctacaagtggcccagcaccctgcgctaccacaagaagatccacactggagagaagccctacaagtgtgaagaatgtgggaaggccttcagcaccttcagcatcctgaccaagcacaaggtgatccacactggagagaagccctacaagtgtgaagaatgtgggaaggccttctcctggctgagcgtcttcagcaagcacaagaagatccacactggagtgcccaacccccccacccacaagaagatccatgctggggagaagctgtacaagtag

SEQ ID NO: 176625 - DNA, 1488 bp, synthetic construct
  misc_feature 1..1488: note = Description of Artificial Sequence: Synthetic coding sequence
  source 1..1488: mol_type = other DNA
atggccgagagcgccccagcccggcacaggaggaagagaagaagcacccccctgaccagcagcaccctgcccagccaggccacagagaagagcagctacttccagaccacagagatcagcctgtggacagtggtggccgccatccaggccgtggagaagaagatggagagccaggccgcccggctgcagagcctggagggccgcactggaacagctgagaagaagctggccgactgtgagaagatggctgtggagtttggaaaccagctggagggcaagtgggccgtgctgggcaccctgctgcaggagtatggcctgctgcagaggcggctggagaatgtggagaacctgctgaggaacagaaacttctggatcctgcggctgcccccaggcagcaaaggagaggcccccaaggtgagccgcagcctggagaatgatggagtgtgcttcacagagcaggagtgggagaacctggaggactggcagaaggagctgtacagaaatgtgatggagagcaactatgagaccctggtgtccctgaaggtgctgggccagacagaaggagaggccgagctgggcacagagatgctgggggacctggaggaggagggccctggaggagcccaccctgctggaggagtgatgatcaagcaggagctgcagtacacccaggagggccctgctgacctgcctggagagttcagctgcatcgccgaggagcaggccttcctgagccctgagcagacagagctgtggggcggccagggcagctctgtgctgctggagactggacctggggacagcaccctggaggagcctgtgggcagccgggtgcccagcagcagcaggacagtgggctgccccaagcagaagagccaccggcaggtgcagctggaccaggagtgtggccagggcctgaagctgaagaaggacaccagccggccctatgaatgttctgaatgtgagatcaccttccgctacaagcagcagctggccacccacctgcggagccacagcggctggggcagctgcaccccagaggagcctgaggagagcctgcggccccggccccggctgaagccccagaccaagaaggccaagctgcaccagtgtgatgtgtgcctgcgctccttcagctgcaaggtgtccctggtgacccaccagcgctgccacctgcaggagggccccagcgctggccagcacgtgcaggagcgcttcagccccaacagcctggtggccctgcccggccacatcccctggaggaagagccgcagcagcctcatctgtggctactgtgggaagagcttcagccaccccagcgacctggtgcgccaccagaggatccacactggagagcggccctacagctgcacagaatgtgagaagagctttgtgcagaagcagcacctgctgcagcaccagaagatccaccagcgggagcggggcggcctggccctggagcccggccggcccaacggcctgctgtag

SEQ ID NO: 176626 - DNA, 1380 bp, synthetic construct
  misc_feature 1..1380: note = Description of Artificial Sequence: Synthetic coding sequence
  source 1..1380: mol_type = other DNA
atggccgcccccctggaggcccaggaccaggcccctggagagggggagggcctgctgattgtgaaggtggaggacagctcctgggagcaggagagcgcccagcatgaagatggccgggacagcgaggcctgccggcagcgcttccggcagttctgctatggagatgtgcacggcccccatgaggccttcagccagctgtgggagctgtgctgccgctggctgcggcctgagctgcggaccaaggagcagatcctggagctgctggtgctggagcagttcctgactgtgctgcccggggagatccagggctgggtgcgggagcagcaccctggcagcggggaggaggccgtggccctggtggaggacctgcagaagcagcctgtgaaggcctggaggcaggatgtgcccagcgaggaggccgagcctgaggccgccggccggggcagccaggccaccggccccccacccaccgtgggcgcccggcggcggcccagcgtgccccaggagcagcacagccacagcgcccagcccccagccctgctgaaggagggccggcctggagagaccacagacacctgctttgtgtctggagtgcacggccctgtggccctgggggacatccccttctacttcagccgggaggagtggggcaccctggaccctgcccagagggacctcttctgggacatcaagcgggagaacagcaggaacaccaccctgggcttcggcctgaagggccagagcgagaagagcctgctgcaggagatggtgcctgtggtgcccggccagacaggcagtgatgtgacagtgtcctggagccctgaggaggccgaggcctgggagagtgaaaatcggccccgggccgccctgggccctgtggtgggcgcccggcggggccggccccccacccggcggcggcagttccgggacctggccgctgagaagccccacagctgtggccagtgtgggaagcgcttccgctggggcagtgacctggcccggcaccagaggacccacactggagagaagccccacaagtgcccagaatgtgacaagagcttccgcagcagcagtgacctggtgcgccaccagggcgtgcacactggagagaagcccttcagctgcagtgaatgtgggaagagcttcagccgcagcgcctacctggccgaccaccagaggatccacactggagagaagcccttcggctgcagcgactgtgggaagagcttcagcctgcggagctacctgctggaccaccggcgggtgcacactggagagcggcccttcggctgtggagaatgtgacaagagcttcaagcagagggcccacctgattgcccaccagagcctgcacgccaagatggcccagcctgtgggctag

SEQ ID NO: 176627 - DNA, 906 bp, synthetic construct
  misc_feature 1..906: note = Description of Artificial Sequence: Synthetic coding sequence
  source 1..906: mol_type = other DNA
atgtgccccaggagaagaagaaacccccggctgcaggccggggacccccggccccggggcctgccccggcgctggggccatggaggcggccgcctcttccccaggagcagcacagccatcgccggccctgtggccctgggggacatccccttctacttcagccgggaggagtggggcaccctggaccctgcccagagggacctcttctgggacatcaagcgggagaacagcaggaacaccaccctgggcttcggcctgaagggccagagcgagaagagcctgctgcaggagatggtgcctgtggtgcccggccagacaggcagtgatgtgacagtgtcctggagccctgaggaggccgaggcctgggagagtgaaaatcggccccgggccgccctgggccctgtggtgggcgcccggcggggccggccccccacccggcggcggcagttccgggacctggccgctgagaagccccacagctgtggccagtgtgggaagcgcttccgctggggcagtgacctggcccggcaccagaggacccacactggagagaagccccacaagtgcccagaatgtgacaagagcttccgcagcagcagtgacctggtgcgccaccagggcgtgcacactggagagaagcccttcagctgcagtgaatgtgggaagagcttcagccgcagcgcctacctggccgaccaccagaggatccacactggagagaagcccttcggctgcagcgactgtgggaagagcttcagcctgcggagctacctgctggaccaccggcgggtgcacactggagagcggcccttcggctgtggagaatgtgacaagagcttcaagcagagggcccacctgattgcccaccagagcctgcacgccaagatggcccagcctgtgggctag

SEQ ID NO: 176628 - DNA, 1821 bp, synthetic construct
  misc_feature 1..1821: note = Description of Artificial Sequence: Synthetic coding sequence
  source 1..1821: mol_type = other DNA
atggctgtgacctttgaagatgtgaccatcatcttcacctgggaggagtggaagttcctggacagcagccagaagaggctgtaccgggaggtgatgtgggagaactacaccaacgtgatgtctgtggagaactggaatgaaagctacaagagccaggaggagaagttccgctacctggagtatgagaacttctcctactggcagggctggtggaatgctggggcccagatgtatgagaaccagaactatggagagaccgtgcagggcacagacagcaaggacctgacccagcaggacaggagccagtgccaggagtggctgatcctgagcacccaggtgcccggctacggcaactatgagctgacctttgagagcaagagcctgaggaacctgaagtacaagaacttcatgccctggcagagcctggagaccaagaccacccaggactatggccgggagatctacatgagcggcagccacggcttccagggcggccgctaccgcctgggcatcagcaggaagaacctgtccatggagaaggagcagaagctgattgtgcagcacagctacatccctgtggaggaggccctgccccagtatgtgggcgtcatctgccaggaggacctgctgcgggacagcatggaggagaagtactgcggctgcaacaagtgcaagggcatctactactggaacagccgctgtgtgttccacaagaggaaccagcccggggagaacctgtgccagtgcagcatctgcaaggcctgcttcagccagaggagtgacctgtaccgccaccccaggaaccacatcggcaagaagctgtatggctgtgatgaggtggatggcaacttccaccagagcagcggcgtgcacttccaccagagggtgcacatcggggaggtgccctacagctgcaatgcctgtgggaagagcttcagccagatcagcagcctgcacaaccaccagagggtgcacacagaggagaagttctacaagattgaatgtgacaaggacctgagcaggaacagcctgctgcacatccaccagaggctgcacatcggggagaagcccttcaagtgcaaccagtgtgggaagagcttcaacagaagctctgtgctgcacgtgcaccagagggtgcacactggagagaagccctacaagtgtgatgaatgtgggaagggcttcagccagagcagcaacctgcgcatccaccagctggtgcacactggagagaagagctacaagtgtgaggactgtgggaagggcttcacccagaggagcaacctgcagatccaccagagggtgcacactggagagaagccctacaagtgtgatgactgtgggaaggacttcagccacagcagtgacctgcgcatccaccagagggtgcacactggagagaagccctacacctgcccagaatgtgggaagggcttcagcaagagcagcaagctgcacacccaccagagggtgcacactggagagaagccctacaagtgtgaggagtgtgggaagggcttcagccagaggagccacctgctgatccaccagagggtgcacactggagagaagccctacaagtgccacgactgtgggaagggcttcagccacagcagcaacctgcacatccaccagagggtgcacactggagagaagccctaccagtgtgccaagtgtgggaagggcttcagccacagcagcgccctgcgcatccaccagagggtgcatgctggggagaagccctacaagtgccgggagtactacaagggctttgaccacaacagccacctgcacaacaaccaccggcggggcaacctgtag

SEQ ID NO: 176629 - DNA, 1821 bp, synthetic construct; identical to SEQ ID NO: 176628
  misc_feature 1..1821: note = Description of Artificial Sequence: Synthetic coding sequence
  source 1..1821: mol_type = other DNA

SEQ ID NO: 176630 - DNA, 1554 bp, synthetic construct
  misc_feature 1..1554: note = Description of Artificial Sequence: Synthetic coding sequence
  source 1..1554: mol_type = other DNA
atgcagcccctgagcaagctgatggccatcagcaagcccaggaacctgagcctgcgggagcagcgggaggtgctgcgggctgacatgtcctggcagcaggagaccaaccctgtggtggagacccatgacagcgaggccagccggcagaagttccgccacttccagtacctgaaggtgtctggcccccatgaggccctgagccagctgtgggagctgtgcctgcagtggctgcggcctgagatccacaccaagaagcagatcatcgagctgctggtgctggagcagttcctggccatcctgcctgaggaggtgaggacctgggtgaacctgcagcaccccaacaacagcaaggacatggtgaccctgattgaagatgtgattgagatgctggaggatgaggacatgccctgcaaggacagcgccctgcagatgggcagcatcaaggagaagatgaaggccggcagcaggacaggcaagccccaggagcctgtgaccttcaaggatgtggtggtggagttcagcaaggaggagtggggccagctggacagcgctgtgaagaacctgtacagaaatgtgatgctggagaacttcaggaacctgaacagcctgaggaaggcccacctgctgagcaagccctttgagagcctgaagctggagagcaagaagaagcgctggatcatggagaaggagatccccaggaagaccatctttgacatgaagagcatctctggagaggagagcagccatggagtcatcatgacccggctgacagaaagtggccaccccagcagtgatgcctggaagggggagaactggctgtacagaaaccagaagaagtgggacatcaacctgccccaggaggccttcatccctgagaccatctacacagaggaggaggactttgagtgcagcgagaacaagaagagctttgacatcaacagcgtgagcagcatctgtgccatccaggtgggcatccccagcaggaagggcagccccaagtgtgacaagttcaagacctacttcaagttcaacctggacagcgtgggcaagcagcacagtgaatatgaatatggaaatgacctgagcctgagcacagacatccgccaccagaagagccacaccaccatgaacagctatgagtgctaccagtgtgggaaggccttctgccgcagcagcagcctcatccgccaccagatcatccacactggagagaagccctacaagtgcagtgaatgtggccgcttcttcaacagaaggaccaacctgaccaagcaccagaagctgcacgccgaggccaaggcctgcaccagcaacaagtgtgggaaggccttcagcaagtctgaggacagcaacaaccccaccctgcactttggaaacaacttctaccagtgtgtgaactgtgggaagagcttcaacagaagcagcagcctcatccgccaccagatgatccacactggagagaagcccttcaagtgcaaggagtgcagcaaggccttcaacagaagcagcaacctggtgaagcaccagaagctgcacacccgggacaagagctag

SEQ ID NO: 176631 - DNA, 1554 bp, synthetic construct; identical to SEQ ID NO: 176630
  misc_feature 1..1554: note = Description of Artificial Sequence: Synthetic coding sequence
  source 1..1554: mol_type = other DNA

SEQ ID NO: 176632 - DNA, 915 bp, synthetic construct
  misc_feature 1..915: note = Description of Artificial Sequence: Synthetic coding sequence
  source 1..915: mol_type = other DNA
atgcagcccctgagcaagctgatggccatcagcaagcccaggaacctgagcctgcgggagcagcgggaggtgctgcgggctgacatgtcctggcagcaggagaccaaccctgtggtggagacccatgacagcgaggccagccggcagaagttccgccacttccagtacctgaaggtgtctggcccccatgaggccctgagccagctgtgggagctgtgcctgcagtggctgcggcctgagatccacaccaagaagcagatcatcgagctgctggtgctggagcagttcctggccatcctgcctgaggaggtgaggacctgggtgaacctgcagcaccccaacaacagcaaggacatggtgaccctgattgaagatgtgattgagatgctggaggatgaggacatgccctgcaaggacagcgccctgcagatgggcagcatcaaggagaagatgaaggccggcagcaggacaggcaagccccaggagcctgtgaccttcaaggatgtggtggtggagttcagcaaggaggagtggggccagctggacagcgctgtgaagaacctgtacagaaatgtgatgctggagaacttcaggaacctgaacagcctgaggaaggcccacctgctgagcaagccctttgagagcctgaagctggagagcaagaagaagcgctggatcatggagaaggagatccccaggaagaccatctttgacatgaagagcatctctggagaggagagcagccatggagtcatcatgacccggctgacagaaagtggccaccccagcagtgatgcctggaaggatggagtgtccctgctgctgccccggctggagtacaatgatgctgtgtctgcccactgcaacctgcacctgtgggtgcaggtgatcctgctgccccagcccccagagtag

SEQ ID NO: 176633 - DNA, 3147 bp, synthetic construct
  misc_feature 1..3147: note = Description of Artificial Sequence: Synthetic coding sequence
  source 1..3147: mol_type = other DNA
atgcagagcaaggtgacaggcaacatgcccacccagagcctgctgatgtacatggatggccctgaggtgattggcagcagcctgggcagccccatggagatggaggatgccctgtccatgaagggcacagctgtggtgcccttccgggccacccaggagaagaatgtcatccagatcgagggctacatgcccctggactgcatgttctgcagccagaccttcacccacagcgaggacctgaacaagcacgtgctgatgcagcaccggcccaccctgtgtgagcctgctgtgctgcgggtggaggccgagtacctgagccccctggacaagagccaggtgaggacagagccccccaaggagaagaactgcaaggaaaatgagttcagctgtgaggtgtgtggccagaccttccgggtggcctttgatgtggagatccacatgaggacccacaaggacagcttcacctacggctgcaacatgtgtggccgccgcttcaaggagccctggttcctgaagaaccacatgaggacccacaacgggaagagcggggcccggagcaagctgcagcagggcctggagagcagccctgccaccatcaatgaggtggtgcaggtgcatgctgctgagagcatcagcagcccctacaagatctgcatggtgtgtggcttcctgttccccaacaaggagagcctcatcgagcacaggaaggtgcacaccaagaagacagccttcggcaccagcagcgcccagacagacagcccccagggcggcatgcccagcagccgggaggacttcctgcagctgttcaacctgcggcccaagagccaccctgagaccgggaagaagcctgtgcgctgcatcccccagctggaccccttcaccaccttccaggcctggcagctggccaccaagggcaaggtggccatctgccaggaggtgaaggagagcggccaggagggcagcacagacaatgatgacagcagcagcgagaaggagctgggggagaccaacaagggcagctgtgccggcctgagccaggagaaggagaagtgcaagcacagccatggagaggcccccagcgtggatgctgaccccaagctgcccagcagcaaggagaagcccacccactgcagtgaatgtgggaaggccttccgcacctaccaccagctggtgctgcacagccgggtgcacaagaaggacagaagagctggagctgagagccccaccatgtctgtggatggccggcagcccggcacctgcagcccagacctggccgcccccctggatgaaaatggagctgtggacagaggagagggcggctctgaagatggctctgaagatggcctgcctgagggcatccacctggacaagaatgatgatggcggcaagatcaagcacctgaccagcagccgggagtgcagctactgtgggaagttcttccgcagcaactactacctgaacatccacctgcggacccacactggagagaagccctacaagtgtgagttctgtgaatatgctgctgcccagaagaccagcctgcgctaccacctggagcggcaccacaaggagaagcagacagatgtggccgctgaggtgaagaatgatggcaagaaccaggacacagaagatgccctgctgacagctgacagcgcccagaccaagaacctgaagcgcttctttgatggagccaaggatgtgacaggcagccccccagccaagcagctgaaggagatgcccagcgtcttccagaatgtgctgggcagcgctgtgctgagccctgcccacaaggacacccaggacttccacaagaatgctgctgatgacagcgctgacaaggtgaacaagaaccccaccccagcctacctggacctgctgaagaagaggtctgctgtggagacccaggccaacaacctgatctgcaggaccaaggcagatgtgaccccacctccagatggcagcaccacccacaacctggaggtgagccccaaggagaagcagacagaaacagctgctgactgccgctaccggcccagcgtggactgccacgagaagcccctgaacctgtctgtgggcgccctgcacaactgcccagccatcagcctgagcaagagcctcatccccagcatcacctgccccttctgcaccttcaagaccttctacccagaggtgctgatgatgcaccagaggctggagcacaagtacaacccagatgtgcacaagaactgcaggaacaagagcctgctgcggagcagaagaacaggctgccccccagccctgctgggcaaggatgtgccccccctgagcagcttctgcaagcccaagcccaagagcgccttccctgcccagagcaagagcctgcccagcgccaagggcaagcagagccccccaggccctgggaaggcccccctgaccagcggcatcgacagcagcaccctggcccccagcaacctgaagagccaccggccccagcagaatgtgggcgtgcagggcgccgccacccggcagcagcagagcgagatgttccccaagacctctgtgtccccagccccagacaagaccaagaggcctgagaccaagctgaagcccctgcctgtggcccccagccagcccaccctgggcagcagcaacatcaatggcagcattgactacccagccaagaatgacagcccctgggcccctcctggccgggactacttctgcaacagaagtgccagcaacacagctgctgagtttggagagcccctgcccaagaggctgaagagctctgtggtggccctggatgtggaccagcccggggccaactacagaagaggctatgacctgcccaagtaccacatggtgcggggcatcaccagcctgctgccccaggactgtgtgtaccccagccaggccctgccccccaagccccgcttcctgagcagcagcgaggtggacagccccaacgtgctgactgtgcagaagccctacggcggcagcggccccctgtacacctgtgtgcctgctggcagccctgccagcagcagcaccctggagggcaagaggcctgtgtcctaccagcacctgagcaacagcatggcccagaagaggaactatgagaacttcatcggaaatgcccactaccggcccaatgacaagaagacctag

SEQ ID NO: 176634 - DNA, 3147 bp, synthetic construct; identical to SEQ ID NO: 176633
  misc_feature 1..3147: note = Description of Artificial Sequence: Synthetic coding sequence
  source 1..3147: mol_type = other DNA

SEQ ID NO: 176635 - DNA, 666 bp, synthetic construct
  misc_feature 1..666: note = Description of Artificial Sequence: Synthetic coding sequence
  source 1..666: mol_type = other DNA
atgttccccaagacctctgtgtccccagccccagacaagaccaagaggcctgagaccaagctgaagcccctgcctgtggcccccagccagcccaccctgggcagcagcaacatcaatggcagcattgactacccagccaagaatgacagcccctgggcccctcctggccgggactacttctgcaacagaagtgccagcaacacagctgctgagtttggagagcccctgcccaagaggctgaagagctctgtggtggccctggatgtggaccagcccggggccaactacagaagaggctatgacctgcccaagtaccacatggtgcggggcatcaccagcctgctgccccaggactgtgtgtaccccagccaggccctgccccccaagccccgcttcctgagcagcagcgaggtggacagccccaacgtgctgactgtgcagaagccctacggcggcagcggccccctgtacacctgtgtgcctgctggcagccctgccagcagcagcaccctggagggcctgggcggctgccagtgcctgctgcccatgaagctgaacttcaccagcagctttgagaagaggatggtgaaggccacagagatcagctgtgactgcaccgtgcacaagacctatgaggagagcgccaggaacaccaccgtggtgtag

SEQ ID NO: 176636 - DNA, 288 bp, synthetic construct
  misc_feature 1..288: note = Description of Artificial Sequence: Synthetic coding sequence
  source 1..288: mol_type = other DNA
atgcagagcaaggtgacaggcaacatgcccacccagagcctgctgatgtacatggatggccctgaggtgattggcagcagcctgggcagccccatggagatggaggatgccctgtccatgaagggcacagctgtggtgcccttccgggccacccaggagaagaatgtcatccagatcgagggctacatgcccctggactgcatgttctgcagccagaccttcacccacagcgaggacctgaacaagcacgtgctgatgcagcaccggcccaccctgtgtgagccctag

SEQ ID NO: 176637 - DNA, 2169 bp, synthetic construct
  misc_feature 1..2169: note = Description of Artificial Sequence: Synthetic coding sequence
  source 1..2169: mol_type = other DNA
atggagggcagccggccccgggcccccagcggccacctggcccccagccccccagcctttgatggagagctggacctgcagcgctacagcaatggacctgctgtgtctgctggcagcctgggcatgggcgctgtgtcctggagcgagagccgggccggggagcggcgcttcccctgccctgtgtgtgggaagcgcttccgcttcaacagcatcctggccctgcacctgcgggcccaccctggggcccaggccttccagtgcccccactgcggccaccgggccgcccagagggccctgctgcggagccacctgcggacccaccagcctgagcggcccaggagccctgctgcccggctgctgctggagctggaggagcgggccctgctgcgggaggcccggctgggccgggcccggagcagcggcggcatgcaggccaccccagccacagagggcctggcccggccccaggcccccagcagcagcgccttccgctgcccctactgcaagggcaagttccgcaccagcgctgagcgggagcggcacctgcacatcctgcaccggccctggaagtgtggcctgtgcagctttggcagcagccaggaggaggagctgctgcaccacagcctgacagcccacggggcccctgagcggcccctggccgccaccagcgctgcccccccaccccagccccagccccagcccccaccccagcctgagcccaggtctgtgccccagcctgagcctgagcctgagcctgagcgggaggccacccccaccccagccccagctgcccctgaggagcccccagcccctcctgagttccgctgccaggtgtgtggccagagcttcacccagagctggttcctgaagggccacatgaggaagcacaaggccagctttgaccacgcctgccctgtgtgtggccgctgcttcaaggagccctggttcctgaagaaccacatgaaggtgcacgccagcaagctgggccccctgcgggcccctggccctgccagcggccctgcccgggccccccagcccccagacctgggcctgctggcctatgagcccctgggccctgccctgctgctggccccagcccccaccccagctgagcggcgggagccccccagcctgctgggctacctgagcctgcgggccggggagggccggcccaacggggagggcgctgagcccggccctggccgcagctttggaggcttccggcccctgagcagcgccctgcctgcccgggcccggcggcacagagctgaggagcctgaggaggaggaggaggtggtggaggccgaggaggagacctgggcccggggccgcagcctgggcagcctggccagcctgcaccccaggcctggagagggccctggccacagcgccagcgctgctggggcccaggcccggagcacagccacccaggaggagaatggcctgctggtgggcggcaccaggcctgagggcggccgcggggccaccgggaaggactgccccttctgtgggaagagcttccgcagcgcccaccacctgaaggtgcacctgcgggtgcacactggagagcggccctacaagtgcccccactgtgactatgccggcacccagagcggcagcctgaagtaccacctgcagaggcaccaccgggagcagaggtctggggccggccctggccccccacctgagcccccaccacccagccagaggggcagcgccccccagagcggggccaagcccagcccccagcctgccacctgggtggagggcgccagcagcccccggccccccagcagtggagctggccctggcagcaggaggaagccagccagccctggccgcaccctgagaaatggccggggcggggaggccgagcccctggacctgagcctgcgggccggccctggaggagaggccggccctggaggagccctgcaccgctgcctcttctgcccctttgccactggagcccctgagctgatggccctgcacctgcaggtgcaccacagcagaagagcccggggccggcggcccccccaggctgatgccagccccccctatgcccgggtgcccagcggggagaccccacccagccccagccaggagggggaggagggcagcggcctgagcaggcctggagaggccggcctgggcggccaggagaggtag

SEQ ID NO: 176638 - DNA, 2169 bp, synthetic construct; identical to SEQ ID NO: 176637
  misc_feature 1..2169: note = Description of Artificial Sequence: Synthetic coding sequence
  source 1..2169: mol_type = other DNA

SEQ ID NO: 176639 - DNA, 2169 bp, synthetic construct; identical to SEQ ID NO: 176637
  misc_feature 1..2169: note = Description of Artificial Sequence: Synthetic coding sequence
  source 1..2169: mol_type = other DNA

SEQ ID NO: 176640 - DNA, 324 bp, synthetic construct
  misc_feature 1..324: note = Description of Artificial Sequence: Synthetic coding sequence
  source 1..324: mol_type = other DNA
atggagggcagccggccccgggcccccagcggccacctggcccccagccccccagcctttgatggagagctggacctgcagcgctacagcaatggacctgctgtgtctgctggcagcctgggcatgggcgctgtgtcctggagcgagagccgggccggggagcggcgcttcccctgccctgtgtgtgggaagcgcttccgcttcaacagcatcctggccctgcacctgcgggcccaccctggggcccaggccttccagtgcccccactgcggccaccgggccgcccagagggccctgctgcggagccacctgcggacccactag

SEQ ID NO: 176641 - DNA, 636 bp, synthetic construct
  misc_feature 1..636: note = Description of Artificial Sequence: Synthetic coding sequence
  source 1..636: mol_type = other DNA
atggagggcagccggccccgggcccccagcggccacctggcccccagccccccagcctttgatggagagctggacctgcagcgctacagcaatggacctgctgtgtctgctggcagcctgggcatgggcgctgtgtcctggagcgagagccgggccggggagcggcgcttcccctgccctgtgtgtgggaagcgcttccgcttcaacagcatcctggccctgcacctgcgggcccaccctggggcccaggccttccagtgcccccactgcggccaccgggccgcccagagggccctgctgcggagccacctgcggacccaccagcctgagcggcccaggagccctgctgcccggctgctgctggagctggaggagcgggccctgctgcgggaggcccggctgggccgggcccggagcagcggcggcatgcaggccaccccagccacagagggcctggcccggccccaggcccccagcagcagcgccttccgctgcccctactgcaagggcaagttccgcaccagcgctgagcgggagcggcacctgcacatcctgcaccggccctggaagtgtggcctgtgcagctttggcagcagccaggaggaggagctgctgcaccacagcctgacagcctag

SEQ ID NO: 176642 - DNA, 96 bp, synthetic construct
  misc_feature 1..96: note = Description of Artificial Sequence: Synthetic coding sequence
  source 1..96: mol_type = other DNA
atggagggcagccggccccgggcccccagcggccacctggcccccagccccccagcctttgatggagagctggacctgcagcgctacagcaactag

SEQ ID NO: 176643 - DNA, 336 bp, synthetic construct
  misc_feature 1..336: note = Description of Artificial Sequence: Synthetic coding sequence
  source 1..336: mol_type = other DNA
atggagggcagccggccccgggcccccagcggccacctggcccccagccccccagcctttgatggagagctggacctgcagcgctacagcaatggacctgctgtgtctgctggcagcctgggcatgggcgctgtgtcctggagcgagagccgggccggggagcggcgcttcccctgccctgtgtgtgggaagcgcttccgcttcaacagcatcctggccctgcacctgcgggcccaccctggggcccaggccttccagtgcccccactgcggccaccgggccgcccagagggccctgctgcggagccacctgcggacccaccagcctgagaggtag

SEQ ID NO: 176644 - DNA, 675 bp, synthetic construct
  misc_feature 1..675: note = Description of Artificial Sequence: Synthetic coding sequence
  source 1..675: mol_type = other DNA
atgaggctggccaagcccaaggccggcatcagccgcagcagcagccagggcaaggcctatgagaacaagaggaagacaggccggcagaggcagaagtggggcatgaccatccgctttgacagcagcttcagccggctgcggcgcagcctggatgacaagccctacaagtgcacagaatgtgagaagagcttcagccagagcagcaccctcttccagcaccagaagatccacacaggcaagaagagccacaagtgtgccgactgtgggaagagcttcttccagagcagcaacctgatccagcaccggcgcatccacactggagagaagccctacaagtgtgatgaatgtggggagagcttcaagcagagcagcaacctgatccagcaccagaggatccacactggagagaagccctaccagtgtgatgaatgtggccgctgcttcagccagagcagccacctgatccagcaccagaggacccacactggagagaagccctaccagtgcagtgaatgtgggaagtgcttcagccagagcagccacctgcggcagcacatgaaggtgcacaaggaggagaagcccaggaagacccggggcaagaacatccgggtgaagacccacctgcccagctggaaggccggcactggaaggaagtctgtggccggcctgaggtag

SEQ ID NO: 176645 - DNA, 237 bp, synthetic construct
  misc_feature 1..237: note = Description of Artificial Sequence: Synthetic coding sequence
  source 1..237: mol_type = other DNA
atgaccaccttcaaggaggccatgaccttcaaggatgtggccgtggtgttcacagaggaggagctgggcctgctggacctggcccagaggaagctgtacagagatgtgatgctggagaacttcaggaacctgctgtctgtgggccaccaggccttccaccgggacaccttccacttcctgcgggaggagaagatctggatgatgaagacagccatccagcgggagggcaacagctag

SEQ ID NO: 176646 - DNA, 2124 bp, synthetic construct
  misc_feature 1..2124: note = Description of Artificial Sequence: Synthetic coding sequence
  source 1..2124: mol_type = other DNA
atgaccaccttcaaggaggccatgaccttcaaggatgtggccgtggtgttcacagaggaggagctgggcctgctggacctggcccagaggaagctgtacagagatgtgatgctggagaacttcaggaacctgctgtctgtgggccaccaggccttccaccgggacaccttccacttcctgcgggaggagaagatctggatgatgaagacagccatccagcgggagggcaacagcggggacaagatccagacagagatggagaccgtgtctgaggccggcacccaccaggagtggagcttccagcagatctgggagaagatcgccagtgacctgaccaggagccaggacctgatgatcaacagcagccagttcagcaaggagggggacttcccctgccagacagaggccggcctgagcgtcatccacacccggcagaagagcagccagggcaatggctacaagcccagcttcagtgatgtgagccactttgacttccaccagcagctgcacagcggggagaagagccacacctgtgatgaatgtgggaagaacttctgctacatcagcgccctgcgcatccaccagagggtgcacatgggagagaagtgctacaagtgtgatgtgtgtgggaaggagttcagccagagcagccacctgcagacccaccagagggtgcacactggagagaagcccttcaagtgtgtggagtgtgggaagggcttcagcagaagaagtgccctgaatgtgcaccacaagctgcacactggagagaagccctacaactgtgaggagtgtgggaaggccttcatccatgacagccagctgcaggagcaccagaggatccacactggagagaagcccttcaagtgtgacatctgtgggaagagcttctgtggccgcagccggctgaacagacacagcatggtgcacacagctgagaagcccttccgctgtgacacctgtgacaagagcttccggcagaggtctgccctgaacagccacaggatgatccacactggagagaagccctacaagtgtgaggagtgtgggaagggcttcatctgccggcgggacctgtacacccaccacatggtgcacactggagagaagccctacaactgcaaggaatgtgggaagagcttccgctgggccagctgcctgctgaagcaccagagggtgcacagcggggagaagcccttcaagtgtgaggagtgtgggaagggcttctacaccaacagccagtgctacagccaccagaggagccacagcggggagaagccctacaagtgtgtggagtgtgggaagggctacaagaggcggctggacctggacttccaccagagggtgcacactggagagaagctgtacaactgcaaggaatgtgggaagagcttcagccgggccccctgcctgctgaagcatgagcggctgcacagcggggagaagcccttccagtgtgaggagtgtgggaagcgcttcacccagaacagccacctgcacagccaccagagggtgcacactggagagaagccctacaagtgtgagaagtgtgggaagggctacaacagcaagttcaacctggacatgcaccagaaggtgcacactggagagcggccctacaactgcaaggaatgtgggaagagctttggctgggccagctgcctgctgaagcaccagaggctgcacagcggggagaagcccttcaagtgtgaggagtgtgggaagcgcttcacccagaacagccagctgcacagccaccagagggtgcacactggagagaagccctacaagtgtgatgaatgtgggaagggcttctcctggagcagcacccggctgacccaccagaggaggcacagccgggagacccccctgaagtgtgagcagcacggcaagaacatcgtgcagaacagcttcagcaaggtgcaggagaaggtgcacagcgtggagaagccctacaagtgtgaggactgtgggaagggctacaacagaaggctgaacctggacatgcaccagagggtgcacatgggagagaagacctggaagtgccgggagtgtgacatgtgcttcagccaggccagcagcctgcggctgcaccagaatgtgcacgtgggggagaagccctag

SEQ ID NO: 176647 - DNA, 1932 bp, synthetic construct
  misc_feature 1..1932: note = Description of Artificial Sequence: Synthetic coding sequence
  source 1..1932: mol_type = other DNA
atgctggagaactatggaaatgtggccagcctgggcttccccctgctgaagccagctgtgatcagccagctggagggcggcagcgagctgggcggcagcagccccctggccgccggcaccggcctgcagggcctgcagacagacatccagacagacaatgacctgaccaaggagatgtatgagggcaaggaaaatgtgtcctttgagctgcagagggacttcagccaggagacagacttcagcgaggccagcctgctggagaagcagcaggaggtgcacagcgctggcaacatcaagaaggagaagagcaacaccattgatggcaccgtgaaggatgagaccagccctgtggaggagtgcttcttcagccagagcagcaacagctaccagtgccacaccatcactggagagcagcccagcggctgcaccggcctgggcaagagcatcagctttgacaccaagctggtgaagcatgagatcatcaacagcgaggagcggcccttcaagtgtgaggagctggtggagcccttccgctgtgacagccagctgatccagcaccaggagaacaacacagaggagaagccctaccagtgcagtgaatgtgggaaggccttcagcatcaatgagaagctgatctggcaccagaggctgcacagcggggagaagcccttcaagtgtgtggagtgtgggaagagcttctcctacagcagccactacatcacccaccagaccatccacagcggggagaagccctaccagtgcaagatgtgtgggaaggccttctctgtgaatggcagcctgagccgccaccagaggatccacactggagagaagccctaccagtgcaaggaatgtggaaatggcttcagctgcagcagcgcctacatcacccaccagagggtgcacactggagagaagccctatgaatgtaatgactgtgggaaggccttcaacgtgaatgccaagctgatccagcaccagaggatccacactggagagaagccctatgaatgtaatgaatgtgggaagggcttccgctgcagcagccagctgcggcagcaccagagcatccacactggagagaagccctaccagtgcaaggaatgtgggaagggcttcaacaacaacaccaagctgatccagcaccagaggatccacactggagagaagccctatgaatgtacagaatgtgggaaggccttctctgtgaagggcaagctgatccagcaccagaggatccacactggagagaagccctatgaatgtaatgaatgtgggaaggccttccgctgcaacagccagttccggcagcacctgcgcatccacactggagagaagccctatgaatgtaatgaatgtgggaaggccttctctgtgaatggcaagctgatgaggcaccagaggatccacactggagagaagccctttgaatgtaatgaatgtggccgctgcttcaccagcaagaggaacctgctggaccaccaccgcatccacactggagagaagccctaccagtgcaaggaatgtgggaaggccttcagcatcaatgccaagctgaccaggcaccagaggatccacactggagagaagcccttcaagtgcatggagtgtgagaaggccttcagctgcagcagcaactacatcgtgcaccagaggatccacactggagagaagcccttccagtgcaaggaatgtgggaaggccttccacgtgaatgcccacctgatccgccaccagaggagccacactggagagaagcccttccgctgtgtggagtgtgggaagggcttctccttcagcagtgactacatcatccaccagacagtgcacacctggaagaagccctacatgtgcagcgtgtgtgggaaggccttccgcttctccttccagctgagccagcaccagagcgtgcacagcgagggcaagagctag

SEQ ID NO: 176648 - DNA, 1248 bp, synthetic construct
  misc_feature 1..1248: note = Description of Artificial Sequence: Synthetic coding sequence
  source 1..1248: mol_type = other DNA
tgtgggaaggccttcagcatcaatgagaagctgatctggcaccagaggctgcacagcggggagaagcccttcaagtgtgtggagtgtgggaagagcttctcctacagcagccactacatcacccaccagaccatccacagcggggagaagccctaccagtgcaagatgtgtgggaaggccttctctgtgaatggcagcctgagccgccaccagaggatccacactggagagaagccctaccagtgcaaggaatgtggaaatggcttcagctgcagcagcgcctacatcacccaccagagggtgcacactggagagaagccctatgaatgtaatgactgtgggaaggccttcaacgtgaatgccaagctgatccagcaccagaggatccacactggagagaagccctatgaatgtaatgaatgtgggaagggcttccgctgcagcagccagctgcggcagcaccagagcatccacactggagagaagccctaccagtgcaaggaatgtgggaagggcttcaacaacaacaccaagctgatccagcaccagaggatccacactggagagaagccctatgaatgtaatgaatgtgggaaggccttccgctgcaacagccagttccggcagcacctgcgcatccacactggagagaagccctatgaatgtaatgaatgtgggaaggccttctctgtgaatggcaagctgatgaggcaccagaggatccacactggagagaagccctttgaatgtaatgaatgtggccgctgcttcaccagcaagaggaacctgctggaccaccaccgcatccacactggagagaagccctaccagtgcaaggaatgtgggaaggccttcagcatcaatgccaagctgaccaggcaccagaggatccacactggagagaagcccttcaagtgcatggagtgtgagaaggccttcagctgcagcagcaactacatcgtgcaccagaggatccacactggagagaagcccttccagtgcaaggaatgtgggaaggccttccacgtgaatgcccacctgatccgccaccagaggagccacactggagagaagcccttccgctgtgtggagtgtgggaagggcttctccttcagcagtgactacatcatccaccagacagtgcacacctggaagaagccctacatgtgcagcgtgtgtgggaaggccttccgcttctccttccagctgagccagcaccagagcgtgcacagcgagggcaagagctag

SEQ ID NO: 176649 - DNA, 1932 bp, synthetic construct; identical to SEQ ID NO: 176647
  misc_feature 1..1932: note = Description of Artificial Sequence: Synthetic coding sequence
  source 1..1932: mol_type = other DNA

SEQ ID NO: 176650 - DNA, 1932 bp, synthetic construct; identical to SEQ ID NO: 176647
  misc_feature 1..1932: note = Description of Artificial Sequence: Synthetic coding sequence
  source 1..1932: mol_type = other DNA

SEQ ID NO: 176651 - DNA, 1758 bp, synthetic construct
  misc_feature 1..1758: note = Description of Artificial Sequence: Synthetic coding sequence
  source 1..1758: mol_type = other DNA
atgtatgagggcaaggaaaatgtgtcctttgagctgcagagggacttcagccaggagacagacttcagcgaggccagcctgctggagaagcagcaggaggtgcacagcgctggcaacatcaagaaggagaagagcaacaccattgatggcaccgtgaaggatgagaccagccctgtggaggagtgcttcttcagccagagcagcaacagctaccagtgccacaccatcactggagagcagcccagcggctgcaccggcctgggcaagagcatcagctttgacaccaagctggtgaagcatgagatcatcaacagcgaggagcggcccttcaagtgtgaggagctggtggagcccttccgctgtgacagccagctgatccagcaccaggagaacaacacagaggagaagccctaccagtgcagtgaatgtgggaaggccttcagcatcaatgagaagctgatctggcaccagaggctgcacagcggggagaagcccttcaagtgtgtggagtgtgggaagagcttctcctacagcagccactacatcacccaccagaccatccacagcggggagaagccctaccagtgcaagatgtgtgggaaggccttctctgtgaatggcagcctgagccgccaccagaggatccacactggagagaagccctaccagtgcaaggaatgtggaaatggcttcagctgcagcagcgcctacatcacccaccagagggtgcacactggagagaagccctatgaatgtaatgactgtgggaaggccttcaacgtgaatgccaagctgatccagcaccagaggatccacactggagagaagccctatgaatgtaatgaatgtgggaagggcttccgctgcagcagccagctgcggcagcaccagagcatccacactggagagaagccctaccagtgcaaggaatgtgggaagggcttcaacaacaacaccaagctgatccagcaccagaggatccacactggagagaagccctatgaatgtacagaatgtgggaaggccttctctgtgaagggcaagctgatccagcaccagaggatccacactggagagaagccctatgaatgtaatgaatgtgggaaggccttccgctgcaacagccagttccggcagcacctgcgcatccacactggagagaagccctatgaatgtaatgaatgtgggaaggccttctctgtgaatggcaagctgatgaggcaccagaggatccacactggagagaagccctttgaatgtaatgaatgtggccgctgcttcaccagcaagaggaacctgctggaccaccaccgcatccacactggagagaagccctaccagtgcaaggaatgtgggaaggccttcagcatcaatgccaagctgaccaggcaccagaggatccacactggagagaagcccttcaagtgcatggagtgtgagaaggccttcagctgcagcagcaactacatcgtgcaccagaggatccacactggagagaagcccttccagtgcaaggaatgtgggaaggccttccacgtgaatgcccacctgatccgccaccagaggagccacactggagagaagcccttccgctgtgtggagtgtgggaagggcttctccttcagcagtgactacatcatccaccagacagtgcacacctggaagaagccctacatgtgcagcgtgtgtgggaaggccttccgcttctccttccagctgagccagcaccagagcgtgcacagcgagggcaagagctag

SEQ ID NO: 176652 - DNA, 1758 bp, synthetic construct; identical to SEQ ID NO: 176651
  misc_feature 1..1758: note = Description of Artificial Sequence: Synthetic coding sequence
  source 1..1758: mol_type = other DNA

SEQ ID NO: 176653 - DNA, 5538 bp, synthetic construct
  misc_feature 1..5538: note = Description of Artificial Sequence: Synthetic coding sequence
  source 1..5538: mol_type = other DNA
atgggcctgtgtggcctgctggagcgctgctggctgcaccacgaccctgatggagtgctgaccctgaatgctgagaacaccaactatgcctaccaggtgcccaacttccacaagtgtgagatctgcctgctgtccttccccaaggagagccagttccagaggcacatgagggaccatgaaagaaatgacaagccccaccgctgtgaccagtgcccccagaccttcaacgtggagttcaacctgaccctgcacaagtgcacccacagcggggaggaccccacctgccctgtgtgcaacaagaagttcagccgggtggccagcctgaaggcccacatcatgctgcacgagaaggaggagaacctgatctgcagtgaatgtggagatgagttcaccctgcagagccagctggccgtgcacatggaggagcaccggcaggagctggccggcacccggcagcacgcctgcaaggcctgcaagaaggagtttgagaccagcagcgagctgaaggagcacatgaagacccactacaagatccgggtgagcagcaccaggagctacaacagaaacatcgacagaagtggcttcacctacagctgcccccactgtgggaagaccttccagaagcccagccagctgaccaggcacatccgcatccacactggagagcggcccttcaagtgcagtgaatgtgggaaggccttcaaccagaagggggccctgcagacccacatgatcaagcacactggagagaagccccacgcctgtgccttctgcccagctgccttcagccagaagggcaacctgcagagccacgtgcagagggtgcacagcgaggtgaagaatggccccacctacaactgcacagaatgttcctgtgtgttcaagagcctgggcagcctgaacacccacatcagcaagatgcacatgggcggcccccagaacagcaccagcagcacagaaacagcccacgtgctgacagccaccctcttccagaccctgcccctgcagcagacagaggcccaggccaccagcgccagcagccagcccagcagccaggccgtgtctgatgtgatccagcagctgctggagctgtctgagcccgcccctgtggagagcggccagagcccccagcccggccagcagctgagcatcaccgtgggcatcaaccaggacatcctgcagcaggccctggagaacagcggcctgagcagcatcccagctgctgcccaccccaatgacagctgccacgccaagaccagcgcccctcatgcccagaacccagatgtgtcctctgtgtccaatgagcagacagaccccacagatgctgagcaggagaaggagcaggagagccctgagaagctggacaagaaggagaagaagatgatcaagaagaagagccccttcctgcccggcagcatccgggaggagaatggagtgcgctggcacgtgtgcccctactgtgccaaggagttcaggaagcccagcgacctggtgcgccacatccgcatccacacccatgagaagcccttcaagtgcccccagtgcttccgggcctttgctgtgaagagcaccctgacagcccacatcaagacccacacaggcatcaaggccttcaagtgccagtactgcatgaagagcttcagcaccagcggcagcctgaaggtgcacatccggctgcacactggagtgcggccctttgcctgcccccactgtgacaagaagttccgcaccagcggccacaggaagacccacatcgccagccacttcaagcacacagagctgaggaagatgaggcaccagaggaagccagccaaggtgcgggtgggcaagaccaacatccctgtgcctgacatccccctgcaggagcccatcctgatcacagacctgggcctcatccagcccatccccaagaaccagttcttccagagctacttcaacaacaactttgtgaatgaagctgaccggccctacaagtgcttctactgccaccgggcctacaagaagagctgccacctgaagcagcacatccgcagccacactggagagaagcccttcaagtgcagccagtgtggccggggctttgtgtctgctggggtgctgaaggcccacatccgcacccacacaggcctgaagagcttcaagtgcctgatctgcaatggagccttcaccaccggcggcagcctgcggcggcacatgggcatccacaatgacctgcggccctacatgtgcccctactgccagaagaccttcaagaccagcctgaactgcaagaagcacatgaagacccacagatatgagctggcccagcagctgcagcagcaccagcaggccgccagcattgatgacagcacagtggaccagcagagcatgcaggccagcacccagatgcaggtggagattgaaagtgatgagctgccccagacagctgaggtggtggccgccaaccctgaggccatgctggacctggagccccagcacgtggtgggcacagaggaggccggcctgggccagcagctggccgaccagcccctggaggctgatgaagatggctttgtggccccccaggaccccctgcggggccacgtggaccagtttgaggagcagagccctgcccagcagagctttgagcccgccggcctgccccagggcttcaccgtgacagacacctaccaccagcagccccagtttcctcctgtgcagcagctgcaggacagcagcaccctggagagccaggccctgagcaccagcttccaccagcagagcctgctgcaggcccccagcagtgatggcatgaatgtgaccaccaggctcatccaggagagcagccaggaggagctggacctgcaggcccagggcagccagttcctggaggacaatgaagaccagagccgccgcagctaccgctgtgactactgcaacaagggcttcaagaagagcagccacctgaagcagcacgtgcgcagccacactggagagaagccctacaagtgcaagctgtgtggccggggctttgtgtcctctggagtgctgaagagccatgagaagacccacactggagtgaaggccttcagctgcagcgtgtgcaatgccagcttcaccaccaacggcagcctgaccaggcacatggccacccacatgtccatgaagccctacaagtgccccttctgtgaggagggcttccgcaccaccgtgcactgcaagaagcacatgaagaggcaccagacagtgcccagcgctgtgtctgccactggagaaacagagggcggggacatctgcatggaggaggaggaggagcacagcgacagaaatgccagcaggaagagcaggcctgaggtgatcaccttcacagaggaggagacagcccagctggccaagatccggccccaggagagcgccaccgtgtctgagaaggtgctggtgcagagcgctgctgagaaggaccgcatcagcgagctgcgggacaagcaggccgagctgcaggatgagcccaagcacgccaactgctgcacctactgccccaagagcttcaagaagcccagcgacctggtgagacatgtgcgcatccacactggagagaagccctacaagtgtgatgaatgtgggaagagcttcaccgtgaagagcaccctggactgccacgtgaagacccacacaggccagaagctgttcagctgccacgtgtgcagcaatgccttcagcaccaagggcagcctgaaggtgcacatgaggctgcacactggagccaagcccttcaagtgcccccactgtgagctgcgcttccgcaccagcggccgcaggaagacccacatgcagttccactacaagccagaccccaagaaggccaggaagcccatgaccaggagcagcagcgagggcctgcagcctgtgaacctgctgaacagcagcagcacagaccccaacgtgttcatcatgaacaacagcgtgctgaccggccagtttgaccagaacctgctgcagcccggcctggtgggccaggccatcctgcctgcctctgtgtctgctggaggagacctgactgtgtccctgacagatggcagcctggccaccctggagggcatccagctgcagctggccgccaacctggtgggccccaacgtgcagatcagcggcattgatgctgccagcatcaacaacatcaccctgcagattgaccccagcatcctgcagcagaccctgcagcagggcaacctgctggcccagcagctgaccggggagcccggcctggccccccagaacagcagcctgcagaccagtgacagcacagtgcctgcctctgtggtgatccagcccatcagcggcctgagcctgcagcccaccgtgaccagcgccaacctgaccatcggccccctgtctgagcaggacagcgtgctgaccaccaacagcagcggcacccaggacctgacccaggtgatgaccagccagggcctggtgagccccagcggcggcccccatgagatcaccctgaccatcaacaacagcagcctgagccaggtgctggcccaggccgccggccccacagccaccagcagcagcggcagcccccaggagatcaccctgaccatcagcgagctgaacaccaccagcggcagcctgcccagcaccacccccatgagccccagcgccatcagcacccagaacctggtgatgagcagcagtggagtgggcggagatgcctctgtgaccctgaccctggccgacacccagggcatgctgagcggcggcctggacacagtgaccctgaacatcaccagccagggccagcagtttcctgccctgctgacagaccccagcctgagcggccagggcggggccggcagcccccaggtgatcctggtgagccacaccccccagagcgccagcgctgcctgtgaggagatcgcctaccaggtggccggcgtgtctggcaacctggcccctggcaaccagcctgagaaggagggccgggcccaccagtgcctggagtgtgaccgggccttcagcagcgctgctgtgctgatgcaccacagcaaggaggtgcacggccgggagcgcatccacggctgccctgtgtgcaggaaggccttcaagagggccacccacctgaaggagcacatgcagacccaccaggccggccccagcctgagcagccagaagcccagggtcttcaagtgtgacacctgtgagaaggcctttgccaagcccagccagctggagcggcacagccgcatccacactggagagcggcccttccactgcaccctgtgtgagaaggccttcaaccagaagagcgccctgcaggtgcacatgaagaagcacactggagagcggccctacaagtgtgcctactgtgtgatgggcttcacccagaagagcaacatgaagctgcacatgaagagggcccacagctatgctggggccctgcaggagagcgctggccaccctgagcaggatggagaggagctgagcaggaccctgcacctggaggaggtggtgcaggaggccgccggggagtggcaggccctgacccacgtgttctag

SEQ ID NO: 176654 - DNA, 4677 bp, synthetic construct
  misc_feature 1..4677: note = Description of Artificial Sequence: Synthetic coding sequence
  source 1..4677: mol_type = other DNA
atgggcctgtgtggcctgctggagcgctgctggctgcaccacgaccctgatggagtgctgaccctgaatgctgagaacaccaactatgcctaccaggtgcccaacttccacaagtgtgagatctgcctgctgtccttccccaaggagagccagttccagaggcacatgagggaccatgaaagaaatgacaagccccaccgctgtgaccagtgcccccagaccttcaacgtggagttcaacctgaccctgcacaagtgcacccacagcggggaggaccccacctgccctgtgtgcaacaagaagttcagccgggtggccagcctgaaggcccacatcatgctgcacgagaaggaggagaacctgatctgcagtgaatgtggagatgagttcaccctgcagagccagctggccgtgcacatggaggagcaccggcaggagctggccggcacccggcagcacgcctgcaaggcctgcaagaaggagtttgagaccagcagcgagctgaaggagcacatgaagacccactacaagatccgggtgagcagcaccaggagctacaacagaaacatcgacagaagtggcttcacctacagctgcccccactgtgggaagaccttccagaagcccagccagctgaccaggcacatccgcatccacactggagagcggcccttcaagtgcagtgaatgtgggaaggccttcaaccagaagggggccctgcagacccacatgatcaagcacactggagagaagccccacgcctgtgccttctgcccagctgccttcagccagaagggcaacctgcagagccacgtgcagagggtgcacagcgaggtgaagaatggccccacctacaactgcacagaatgttcctgtgtgttcaagagcctgggcagcctgaacacccacatcagcaagatgcacatgggcggcccccagaacagcaccagcagcacagaaacagcccacgtgctgacagccaccctcttccagaccctgcccctgcagcagacagaggcccaggccaccagcgccagcagccagcccagcagccaggccgtgtctgatgtgatccagcagctgctggagctgtctgagcccgcccctgtggagagcggccagagcccccagcccggccagcagctgagcatcaccgtgggcatcaaccaggacatcctgcagcaggccctggagaacagcggcctgagcagcatcccagctgctgcccaccccaatgacagctgccacgccaagaccagcgcccctcatgcccagaacccagatgtgtcctctgtgtccaatgagcagacagaccccacagatgctgagcaggagaaggagcaggagagccctgagaagctggacaagaaggagaagaagatgatcaagaagaagagccccttcctgcccggcagcatccgggaggagaatggagtgcgctggcacgtgtgcccctactgtgccaaggagttcaggaagcccagcgacctggtgcgccacatccgcatccacacccatgagaagcccttcaagtgcccccagtgcttccgggcctttgctgtgaagagcaccctgacagcccacatcaagacccacacaggcatcaaggccttcaagtgccagtactgcatgaagagcttcagcaccagcggcagcctgaaggtgcacatccggctgcacactggagtgcggccctttgcctgcccccactgtgacaagaagttccgcaccagcggccacaggaagacccacatcgccagccacttcaagcacacagagctgaggaagatgaggcaccagaggaagccagccaaggtgcgggtgggcaagaccaacatccctgtgcctgacatccccctgcaggagcccatcctgatcacagacctgggcctcatccagcccatccccaagaaccagttcttccagagctacttcaacaacaactttgtgaatgaagctgaccggccctacaagtgcttctactgccaccgggcctacaagaagagctgccacctgaagcagcacatccgcagccacactggagagaagcccttcaagtgcagccagtgtggccggggctttgtgtctgctggggtgctgaaggcccacatccgcacccacacaggcctgaagagcttcaagtgcctgatctgcaatggagccttcaccaccggcggcagcctgcggcggcacatgggcatccacaatgacctgcggccctacatgtgcccctactgccagaagaccttcaagaccagcctgaactgcaagaagcacatgaagacccacagatatgagctggcccagcagctgcagcagcaccagcaggccgccagcattgatgacagcacagtggaccagcagagcatgcaggccagcacccagatgcaggtggagattgaaagtgatgagctgccccagacagctgaggtggtggccgccaaccctgaggccatgctggacctggagccccagcacgtggtgggcacagaggaggccggcctgggccagcagctggccgaccagcccctggaggctgatgaagatggctttgtggccccccaggaccccctgcggggccacgtggaccagtttgaggagcagagccctgcccagcagagctttgagcccgccggcctgccccagggcttcaccgtgacagacacctaccaccagcagccccagtttcctcctgtgcagcagctgcaggacagcagcaccctggagagccaggccctgagcaccagcttccaccagcagagcctgctgcaggcccccagcagtgatggcatgaatgtgaccaccaggctcatccaggagagcagccaggaggagctggacctgcaggcccagggcagccagttcctggaggacaatgaagaccagagccgccgcagctaccgctgtgactactgcaacaagggcttcaagaagagcagccacctgaagcagcacgtgcgcagccacactggagagaagccctacaagtgcaagctgtgtggccggggctttgtgtcctctggagtgctgaagagccatgagaagacccacactggagtgaaggccttcagctgcagcgtgtgcaatgccagcttcaccaccaacggcagcctgaccaggcacatggccacccacatgtccatgaagccctacaagtgccccttctgtgaggagggcttccgcaccaccgtgcactgcaagaagcacatgaagaggcaccagacagtgcccagcgctgtgtctgccactggagaaacagagggcggggacatctgcatggaggaggaggaggagcacagcgacagaaatgccagcaggaagagcaggcctgaggtgatcaccttcacagaggaggagacagcccagctggccaagatccggccccaggagagcgccaccgtgtctgagaaggtgctggtgcagagcgctgctgagaaggaccgcatcagcgagctgcgggacaagcaggccgagctgcaggatgagcccaagcacgccaactgctgcacctactgccccaagagcttcaagaagcccagcgacctggtgagacatgtgcgcatccacactggagagaagccctacaagtgtgatgaatgtgggaagagcttcaccgtgaagagcaccctggactgccacgtgaagacccacacaggccagaagctgttcagctgccacgtgtgcagcaatgccttcagcaccaagggcagcctgaaggtgcacatgaggctgcacactggagccaagcccttcaagtgcccccactgtgagctgcgcttccgcaccagcggccgcaggaagacccacatgcagttccactacaagccagaccccaagaaggccaggaagcccatgaccaggagcagcagcgagggcctgcagcctgtgaacctgctgaacagcagcagcacagaccccaacgtgttcatcatgaacaacagcgtgctgaccggccagtttgaccagaacctgctgcagcccggcctggtgggccaggccatcctgcctgcctctgtgtctgctggaggagacctgactgtgtccctgacagatggcagcctggccaccctggagggcatccagctgcagctggccgccaacctggtgggccccaacgtgcagatcagcggcattgatgctgccagcatcaacaacatcaccctgcagattgaccccagcatcctgcagcagaccctgcagcagggcaacctgctggcccagcagctgaccggggagcccggcctggccccccagaacagcagcctgcagaccagtgacagcacagtgcctgcctctgtggtgatccagcccatcagcggcctgagcctgcagcccaccgtgaccagcgccaacctgaccatcggccccctgtctgagcaggacagcgtgctgaccaccaacagcagcggcacccaggacctgacccaggtgatgaccagccagggcctggtgagccccagcggcggcccccatgagatcaccctgaccatcaacaacagcagcctgagccaggtgctggcccaggccgccggccccacagccaccagcagcagcggcagcccccaggagatcaccctgaccatcagcggcagccgctctgtgcagcacagcgtgggcccccaggagtgtggctctgtggaggccctgtacctggagaacagcagtgacaagacctag

SEQ ID NO: 176655 - DNA, 4677 bp, synthetic construct; identical to SEQ ID NO: 176654
  misc_feature 1..4677: note = Description of Artificial Sequence: Synthetic coding sequence
  source 1..4677: mol_type = other DNA

SEQ ID NO: 176656 - DNA, 1596 bp, synthetic construct
  misc_feature 1..1596: note = Description of Artificial Sequence: Synthetic coding sequence
  source 1..1596: mol_type = other DNA
atgtgccccaagggctatgaagattccatggagttcccagaccacagccgccacctgctgcagtgcctgtctgagcagaggcaccagggcttcctgtgtgactgcaccgtgctggtgggagatgcccagttccgggcccacagagctgtgctggccagctgcagcatgtacttccacctgttctacaaggaccagctggacaagagggacatcgtgcacctgaacagcgacatcgtgacagccccagcctttgccctgctgctggagttcatgtatgagggcaagctgcagttcaaggacctgcccattgaagatgtgctggccgccgccagctacctgcacatgtatgacatcgtgaaggtgtgcaagaagaagctgaaggagaaggccaccacagaggccgacagcaccaagaaggaggaggatgccagcagctgcagcgacaaggtggagagcctgagtgatggcagcagccacatcgccggggacctgcccagtgatgaagatgaaggagaagatgagaagctgaacatcctgcccagcaagagggacctggccgctgagcccggcaacatgtggatgaggctgcccagcgacagcgctggcatcccccaggccggcggggaggccgagccccacgccacagctgctgggaagacagtggccagcccctgcagcagcacagagagcctgagccagaggtctgtgacctctgtgcgggacagcgcagatgtggactgtgtgctggacctgtctgtgaagagcagcctgagcggcgtggagaacctgaacagcagctacttcagcagccaggatgtgctgcggagcaacctggtgcaggtgaaggtggagaaggaggccagctgtgatgaaagtgatgtgggcaccaatgactatgacatggagcacagcacagtgaaggagagcgtgtccaccaacaacagagtgcagtatgagcccgcccacctggcccccctgcgggaggacagcgtgctgcgggagctggaccgggaggacaaggccagtgatgatgagatgatgaccccagagagcgagcgggtgcaggtggagggcggcatggagagcagcctgctgccctacgtgagcaacatcctgagccctgctggccagatcttcatgtgccccctgtgcaacaaggtgttccccagcccccacatcctgcagatccacctgagcacccacttccgggagcaggacggcatccgcagcaagccagctgctgatgtgaatgtgcccacctgcagcctgtgtgggaagaccttcagctgcatgtacaccctgaagagacatgagaggacccacagcggggagaagccctacacctgcacccagtgtgggaagagcttccagtacagccacaacctgagcagacatgctgtggtgcacacccgggagaagccccacgcctgcaagtggtgtgagcggcgcttcacccagagcggggacctgtaccgccacatcaggaagttccactgtgagctggtgaacagcctgtctgtgaagtctgaggccctgagcctgcccaccgtgcgggactggaccctggaggacagcagccaggagctgtggaagtag

SEQ ID NO: 176657 - DNA, 1464 bp, synthetic construct
  misc_feature 1..1464: note = Description of Artificial Sequence: Synthetic coding sequence
  source 1..1464: mol_type = other DNA
atgtgccccaagggctatgaagattccatggagttcccagaccacagccgccacctgctgcagtgcctgtctgagcagaggcaccagggcttcctgtgtgactgcaccgtgctggtgggagatgcccagttccgggcccacagagctgtgctggccagctgcagcatgtacttccacctgttctacaaggaccagctggacaagagggacatcgtgcacctgaacagcgacatcgtgacagccccagcctttgccctgctgctggagttcatgtatgagggcaagctgcagttcaaggacctgcccattgaagatgtgctggccgccgccagctacctgcacatgtatgacatcgtgaaggtgtgcaagaagaagctgaaggagaaggccaccacagaggccgacagcaccaagaaggaggaggatgccagcagctgcagcgacaaggtggagagcctgagtgatggcagcagccacatcgccggggacctgcccagtgatgaagatgaaggagaagatgagaagctgaacatcctgcccagcaagagggacctggccgctgagcccggcaacatgtggatgaggctgcccagcgacagcgctggcatcccccaggccggcggggaggccgagccccacgccacagctgctgggaagacagtggccagcccctgcagcagcacagagagcctgagccagaggtctgtgacctctgtgcgggacagcgcagatgtggactgtgtgctggacctgtctgtgaagagcagcctgagcggcgtggagaacctgaacagcagctacttcagcagccaggatgtgctgcggagcaacctggtgcaggtgaaggtggagaaggaggccagctgtgatgaaagtgatgtgggcaccaatgactatgacatggagcacagcacagtgaaggagagcgtgtccaccaacaacagagtgcagtatgagcccgcccacctggcccccctgcgggaggacagcgtgctgcgggagctggaccgggaggacaaggccagtgatgatgagatgatgaccccagagagcgagcgggtgcaggtggagggcggcatggagagcagcctgctgccctacgtgagcaacatcctgagccctgctggccagatcttcatgtgccccctgtgcaacaaggtgttccccagcccccacatcctgcagatccacctgagcacccacttccgggagcaggacggcatccgcagcaagccagctgctgatgtgaatgtgcccacctgcagcctgtgtgggaagaccttcagctgcatgtacaccctgaagagacatgagaggacccacagcggggagaagccctacacctgcacccagtgtgggaagagcttccagtacagccacaacctgagccggctgcaggtggtgcgggcccaggtgcatgctgtgcggggccctgtgcagacccacagccaggtgcccctgtag

SEQ ID NO: 176658 - DNA, 1377 bp, synthetic construct
  misc_feature 1..1377: note = Description of Artificial Sequence: Synthetic coding sequence
  source 1..1377: mol_type = other DNA
atggccagcaccatcaccggcagccaggactgcatcgtgaaccacagaggagaggtggatggagagcctgagctggacatcagcccctgccagcagtggggcgaggccagcagccccatcagcaggaacagagacagcgtgatgaccctgcagagcggctgctttgagaacatcgagagcgagacctacctgcccctgaaggtgagcagccagattgacacccaggacagctctgtgaagttctgcaagaatgagccccaggaccaccaggagagcagaagactctttgtgatggaggagagcacagagaggaaggtgatcaagggggagagctgcagcgagaacctgcaggtgaagctggtgtctgatggccaggagctggccagccccctgctgaatggagaggccacctgccagaatggccagctgaaggagagcctggaccccatcgactgcaactgcaaggacatccacggctggaagagccaggtggtgtcctgcagccagcagagggcccacacagaggagaagccctgtgaccacaacaactgtgggaagatcctgaacaccagcccagatggccacccctatgagaagatccacacagctgagaagcagtatgagtgcagccagtgtgggaagaacttcagccagagcagcgagctgctgctgcaccagagggaccacacagaggagaagccctacaagtgtgagcagtgtgggaagggcttcaccaggagcagcagcctgctgatccaccaggccgtgcacacagatgagaagccctacaagtgtgacaagtgtgggaagggcttcaccaggagcagcagcctgctgatccaccacgctgtgcacactggagagaagccctacaagtgtgacaagtgtgggaagggcttcagccagagcagcaagctgcacatccaccagagggtgcacactggagagaagccctatgaatgtgaagaatgtggcatgtccttcagccagaggagcaacctgcacatccaccagagggtgcacactggagagcggccctacaagtgtggagaatgtgggaagggcttcagccagagcagcaacctgcacatccaccgctgcatccacactggagagaagccctaccagtgctatgaatgtgggaagggcttcagccagagcagtgacctgcgcatccacctgcgggtgcacactggagagaagccctaccactgtgggaaatgtgggaagggcttcagccagagcagcaagctgctgatccaccagagggtgcacactggagagaagccctatgagtgcagcaaatgtgggaagggcttcagccagagcagcaacctgcacatccaccagagggtgcacaagaaggaccccaggtag

SEQ ID NO: 176659 - DNA, 1377 bp, synthetic construct; identical to SEQ ID NO: 176658
  misc_feature 1..1377: note = Description of Artificial Sequence: Synthetic coding sequence
  source 1..1377: mol_type = other DNA

SEQ ID NO: 176660 - DNA, 1377 bp, synthetic construct; identical to SEQ ID NO: 176658
  misc_feature 1..1377: note = Description of Artificial Sequence: Synthetic coding sequence
  source 1..1377: mol_type = other DNA

SEQ ID NO: 176661 - DNA, 1377 bp, synthetic construct; identical to SEQ ID NO: 176658
  misc_feature 1..1377: note = Description of Artificial Sequence: Synthetic coding sequence
  source 1..1377: mol_type = other DNA

SEQ ID NO: 176662 - DNA, 1377 bp, synthetic construct; identical to SEQ ID NO: 176658
  misc_feature 1..1377: note = Description of Artificial Sequence: Synthetic coding sequence
  source 1..1377: mol_type = other DNA

SEQ ID NO: 176663 - DNA, 1107 bp, synthetic construct
  misc_feature 1..1107: note = Description of Artificial Sequence: Synthetic coding sequence
  source 1..1107: mol_type = other DNA
atgtctgcccagagcgtggaggaggacagcatcctgatcatccccaccccagatgaggaggagaagatcctgcgggtgaagctggaggaggaccctgatggagaggagggcagcagcatcccctggaaccacctgcctgaccctgagatcttccggcagcgcttccggcagtttggctaccaggacagccctggcccccgggaggccgtgtcccagctgcgggagctgtgccgcctgtggctgcggcctgagacccacaccaaggagcagatcctggagctggtggtgctggagcagtttgtggccatcctgcccaaggagctgcagacctgggtgcgggaccaccacccagaaaatggagaggaggccgtgacagtgctggaggacctggagagcgagctggatgatcctggccagcctgtgtccctgcggcggaggaagcgggaggtgctggtggaggacatggtgtcccaggaggaggcccagggcctgcccagcagcgagctggatgctgtggagaaccagctgaagtgggcctcctgggagctgcacagcctgcggcactgtgatgatgatggccgcacagaaaatggagccctggcccccaagcaggagctgcccagcgccctggagagccatgaggtgcccggcaccctgaacatgggcgtgccccagatcttcaagtatggagagacctgcttccccaagggccgctttgagaggaagaggaaccccagcaggaagaagcagcacatctgtgatgaatgtgggaagcacttcagccagggcagcgccctgatcctgcaccagaggatccacagcggggagaagccctacggctgtgtggagtgtgggaaggccttcagccgcagcagcatcctggtgcagcaccagagggtgcacactggagagaagccctacaagtgcctggagtgtgggaaggccttcagccagaacagcggcctcatcaaccaccagaggatccacactggagagaagccctatgaatgtgtgcagtgtgggaagagctacagccagagcagcaacctcttccgccaccagaggaggcacaatgctgagaagctgctgaatgtggtgaaggtgtag

SEQ ID NO: 176664 - DNA, 1107 bp, synthetic construct; identical to SEQ ID NO: 176663
  misc_feature 1..1107: note = Description of Artificial Sequence: Synthetic coding sequence
  source 1..1107: mol_type = other DNA

SEQ ID NO: 176665 - DNA, 1371 bp, synthetic construct
  misc_feature 1..1371: note = Description of Artificial Sequence: Synthetic coding sequence
  source 1..1371: mol_type = other DNA
atgaacaagttccagggccctgtgaccctgaaggatgtgattgtggagttcaccaaggaggagtggaagctgctgaccccagcccagaggaccctgtacaaggatgtgatgctggagaactacagccacctggtgtctgtgggctaccacgtgaacaagcccaatgctgtgttcaagctgaagcagggcaaggagccctggatcctggaggtggagttcccccaccggggcttccctgaggacctgtggagcatccatgacctggaggcccgctaccaggagagccaggccggcaacagcagaaatggagagctgaccaagcaccagaagacccacaccacagagaaggcctgtgagtgcaaggaatgtgggaagttcttctgccagaagagcgccctgattgtgcaccagcacacccacagcaagggcaagagctatgactgtgacaagtgtgggaagagcttcagcaagaatgaagatctcatccgccaccagaagatccacacccgggacaagacctatgagtgcaaggagtgcaagaagatcttctaccacctgagcagcctgagccgccacctgcggacccatgctggggagaagccctatgagtgcaaccagtgtgagaagagcttctaccagaagccccacctgacagagcaccagaagacccacactggagagaagccctttgaatgtacagaatgtgggaagttcttctacgtgaaggcctacctgatggtgcaccagaagacccacactggagagaagccctatgagtgcaaggaatgtgggaaggccttcagccagaagagccacctgactgtgcaccagaggatgcacactggagagaagccctacaagtgcaaggaatgtgggaagttcttcagcaggaacagccacctgaagacccaccagaggagccacactggagagaagccctatgagtgcaaggagtgcaggaagtgcttctaccagaagagcgccctgactgtgcaccagaggacccacactggagagaagccctttgagtgcaacaagtgtgggaagaccttctactacaagagtgacctgaccaagcaccagaggaagcacactggagagaagccctatgaatgtacagaatgtgggaagagctttgctgtgaacagcgtgctgcggctgcaccagaggacccacactggagagaagccctatgcctgcaaggaatgtgggaagagcttcagccagaagagccacttcatcatccaccagaggaagcacactggagagaagccctatgagtgccaggagtgtggggagaccttcatccagaagagccagctgacagcccaccagaagacccacaccaagaagagaaatgctgagaagtag

SEQ ID NO: 176666 - DNA, 1263 bp, synthetic construct
  misc_feature 1..1263: note = Description of Artificial Sequence: Synthetic coding sequence
  source 1..1263: mol_type = other DNA
atgctggagaactacagccacctggtgtctgtgggctaccacgtgaacaagcccaatgctgtgttcaagctgaagcagggcaaggagccctggatcctggaggtggagttcccccaccggggcttccctgaggacctgtggagcatccatgacctggaggcccgctaccaggagagccaggccggcaacagcagaaatggagagctgaccaagcaccagaagacccacaccacagagaaggcctgtgagtgcaaggaatgtgggaagttcttctgccagaagagcgccctgattgtgcaccagcacacccacagcaagggcaagagctatgactgtgacaagtgtgggaagagcttcagcaagaatgaagatctcatccgccaccagaagatccacacccgggacaagacctatgagtgcaaggagtgcaagaagatcttctaccacctgagcagcctgagccgccacctgcggacccatgctggggagaagccctatgagtgcaaccagtgtgagaagagcttctaccagaagccccacctgacagagcaccagaagacccacactggagagaagccctttgaatgtacagaatgtgggaagttcttctacgtgaaggcctacctgatggtgcaccagaagacccacactggagagaagccctatgagtgcaaggaatgtgggaaggccttcagccagaagagccacctgactgtgcaccagaggatgcacactggagagaagccctacaagtgcaaggaatgtgggaagttcttcagcaggaacagccacctgaagacccaccagaggagccacactggagagaagccctatgagtgcaaggagtgcaggaagtgcttctaccagaagagcgccctgactgtgcaccagaggacccacactggagagaagccctttgagtgcaacaagtgtgggaagaccttctactacaagagtgacctgaccaagcaccagaggaagcacactggagagaagccctatgaatgtacagaatgtgggaagagctttgctgtgaacagcgtgctgcggctgcaccagaggacccacactggagagaagccctatgcctgcaaggaatgtgggaagagcttcagccagaagagccacttcatcatccaccagaggaagcacactggagagaagccctatgagtgccaggagtgtggggagaccttcatccagaagagccagctgacagcccaccagaagacccacaccaagaagagaaatgctgagaagtag

SEQ ID NO: 176667 - DNA, 1500 bp, synthetic construct
  misc_feature 1..1500: note = Description of Artificial Sequence: Synthetic coding sequence
  source 1..1500: mol_type = other DNA
atgggccccctgcagttcagagatgtggccatcgagttcagcctggaggagtggcactgcctggacacagcccagaggaacctgtacagagatgtgatgctggagaactacagaaacctggtgttcctgggcatcgtggtgtccaagccagacctggtgacctgcctggagcagggcaagaagcccctgaccatggagagacatgagatgattgccaagccccctgtgatgagcagccactttgcccaggacctgtggccagagaacatccagaacagcttccagatcggcatgctgcggcgctatgaggagtgcagacatgacaacctgcagctgaagaagggctgcaagtctgtgggggagcacaaggtgcacaagggcggctacaacggcctgaaccagtgcctgaccaccacccagaaggagatcttccagtgtgacaagtatggcaaggtgttccacaagttcagcaacagcaacacctacaagaccaggcacacaggcatcaacctcttcaagtgcatcatctgtgggaaggccttcaagaggagcagcaccctgaccacccacaagaagatccacactggagagaagccctaccgctgtgaggagtgtgggaaggccttcaaccagagcgccaacctgaccacccacaagaggatccacactggagagaagccctaccgctgtgaggagtgtgggaaggccttcaagcagagcagcaacctgaccacccacaagaagatccacactggagagaagccctacaagtgtgaggagtgtgggaaggccttcaacagaagcacagacctgaccacccacaagatcgtgcacactggagagaagccctacaagtgtgaggagtgtgggaaggccttcaagcaccccagccacgtgaccacccacaagaagatccacacccggggcaagccctacaactgtgaggagtgtgggaagagcttcaagcactgcagcaacctgaccatccacaagaggatccacactggagagaagccctacaagtgtgaggagtgtgggaaggccttccacctgagcagccacctgaccacccacaagatcctgcacactggagagaagccctaccgctgccgggagtgtgggaaggccttcaaccacagcaccaccctcttcagccatgagaagatccacactggagagaagccctacaagtgtgatgaatgtgggaagaccttcacctggcccagcatcctgagcaagcacaagaggacccacactggagagaagccctacaagtgtgaggagtgtgggaagagcttcaccgccagcagcaccctgaccacccacaagaggatccacactggagagaagccctacaagtgtgaggagtgtgggaaggccttcaactggagcagtgacctgaacaagcacaagaagatccacattgaaaggaagccctacatcgtgaagaatgtgacagacctgctgaatgtgccccccctgctgatcagcatcagatag

SEQ ID NO: 176668 - DNA, 1500 bp, synthetic construct; identical to SEQ ID NO: 176667
  misc_feature 1..1500: note = Description of Artificial Sequence: Synthetic coding sequence
  source 1..1500: mol_type = other DNA

SEQ ID NO: 176669 - DNA, 276 bp, synthetic construct
  misc_feature 1..276: note = Description of Artificial Sequence: Synthetic coding sequence
  source 1..276: mol_type = other DNA
atgcctggcccccccaggagcctggagatgggcctgctgaccttcagagatgtggccatcgagttcagcctggaggagtggcagcacctggacatcgcccagcagaacctgtacagaaatgtgatgctggagaactacagaaacctggccttcctgggcattgctgtgtccaagccagacctgatcacctgcctggagcagggcaaggagccctggaacatgaagagacatgagatggtggatgagcccccaggcctggacttcagcctgctgtag

SEQ ID NO: 176670 - DNA, 1725 bp, synthetic construct
  misc_feature 1..1725: note = Description of Artificial Sequence: Synthetic coding sequence
  source 1..1725: mol_type = other DNA
atgtgcccccactttgcccaggacctgtggccagagcagggcatggaggacagcttccagaaggccatcctgcggcgctatggcaagtatggccacgagaacctgcagctgaggaagggctgcaagtctgtggatgagtacaaggtgaacaaggagggctacaacggcctgaaccagtgcttcaccacagcccagagcaaggtgttccagtgtgacaagtacctgaaggtgttctacaagttcctgaacagcaaccggcccaagatccgccacacagagaagaagagcttcaagtgcaagaagagggtgaagctgttctgcatgctgagccacaagacccagcacaagagcatctaccaccgggagaagagctacaagtgcaaggaatgtgggaagaccttcaactggagcagcaccctgaccaaccacaggaagatctacacagaggagaagccctacaagtgtgaggagtacaacaagagccccaagcagctgagcaccctgaccacccatgagatcatccacgccggggagaagctgtacaagtgtgaagaatgtggggaggccttcaacagaagcagcaacctgaccacccacaagatcatccacactggagagaagccctacaagtgtgaagaatgtgggaaggccttcatctggagcagcaccctgacagagcacaagaagatccacaccaggaagaagccctacaagtgtgaagaatgtgggaaggccttcatctggagcagcaccctgaccaggcacaagaggatgcacactggagagaagccctacaagtgtgaagaatgtgggaaggccttcagccagagcagcaccctgaccacccacaagatcatccacactggagagaagcgctacaagtgcctggagtgtgggaaggccttcaagcagctgagcaccctgaccacccacaagatcatccacgtgggggagaagctgtacaagtgtgaagaatgtgggaagggcttcaacagaagcagcaacctgaccacccacaagatcatccacactggagagaagccctacaagtgtgaagaatgtgggaaggccttcatctggagcagcaccctgaccaagcacaagaggatccacacccgggagaagccctacaagtgtgaagaatgtgggaaggccttcatctggagcagcaccctgaccaggcacaagaggatgcacactggagagaagccctacaagtgtgaagaatgtgggaagagcttcagccagagcagcaccctgaccacccacaagatcatccacactggagagaagccctacaagtgtgaagaatgtgggaaggccttcaactggagcagcaccctgaccaagcacaagatcatccacacagaggagaagccctacaagtgtgagaagtgtgggaaggccttcaagcagagcagcatcctgaccaaccacaagaggatccacactggagagaagccctacaagtgtgaagaatgtgggaagagcttcaacagaagcagcaccttcaccaagcacaaggtgatccacactggagtgaagccctacaagtgtgaagaatgtgggaaggccttcttctggagcagcaccctgaccaagcacaagaggatccacactggagagcagccctacaagtgggagaagtttgggaaggccttcaacagaagcagccacctgaccacagacaagatcacccactggagggagatcctgcaggtgtag

SEQ ID NO: 176671 - DNA, 1980 bp, synthetic construct
  misc_feature 1..1980: note = Description of Artificial Sequence: Synthetic coding sequence
  source 1..1980: mol_type = other DNA
atgcctggcccccccaggagcctggagatgggcctgctgaccttcagagatgtggccatcgagttcagcctggaggagtggcagcacctggacatcgcccagcagaacctgtacagaaatgtgatgctggagaactacagaaacctggccttcctgggcattgctgtgtccaagccagacctgatcacctgcctggagcagggcaaggagccctggaacatgaagagacatgagatggtggatgagcccccaggcatgtgcccccactttgcccaggacctgtggccagagcagggcatggaggacagcttccagaaggccatcctgcggcgctatggcaagtatggccacgagaacctgcagctgaggaagggctgcaagtctgtggatgagtacaaggtgaacaaggagggctacaacggcctgaaccagtgcttcaccacagcccagagcaaggtgttccagtgtgacaagtacctgaaggtgttctacaagttcctgaacagcaaccggcccaagatccgccacacagagaagaagagcttcaagtgcaagaagagggtgaagctgttctgcatgctgagccacaagacccagcacaagagcatctaccaccgggagaagagctacaagtgcaaggaatgtgggaagaccttcaactggagcagcaccctgaccaaccacaggaagatctacacagaggagaagccctacaagtgtgaggagtacaacaagagccccaagcagctgagcaccctgaccacccatgagatcatccatgctggggagaagctgtacaagtgtgaggagtgtggggaggccttcaacagaagcagcaacctgaccacccacaagatcatccacactggagagaagccctacaagtgtgaggagtgtgggaaggccttcatctggagcagcaccctgacagagcacaagaagatccacaccaggaagaagccctacaagtgtgaggagtgtgggaaggccttcatctggagcagcaccctgaccaggcacaagaggatgcacactggagagaagccctacaagtgtgaggagtgtgggaaggccttcagccagagcagcaccctgaccacccacaagatcatccacactggagagaagcgctacaagtgcctggagtgtgggaaggccttcaagcagctgagcaccctgaccacccacaagatcatccacgtgggggagaagctgtacaagtgtgaggagtgtgggaagggcttcaacagaagcagcaacctgaccacccacaagatcatccacactggagagaagccctacaagtgtgaggagtgtgggaaggccttcatctggagcagcaccctgaccaagcacaagaggatccacacccgggagaagccctacaagtgtgaggagtgtgggaaggccttcatctggagcagcaccctgaccaggcacaagaggatgcacactggagagaagccctacaagtgtgaggagtgtgggaagagcttcagccagagcagcaccctgaccacccacaagatcatccacactggagagaagccctacaagtgtgaggagtgtgggaaggccttcaactggagcagcaccctgaccaagcacaagatcatccacacagaggagaagccctacaagtgtgagaagtgtgggaaggccttcaagcagagcagcatcctgaccaaccacaagaggatccacactggagagaagccctacaagtgtgaggagtgtgggaagagcttcaacagaagcagcaccttcaccaagcacaaggtgatccacactggagtgaagccctacaagtgtgaggagtgtgggaaggccttcttctggagcagcaccctgaccaagcacaagaggatccacactggagagcagccctacaagtgggagaagtttgggaaggccttcaacagaagcagccacctgaccacagacaagatcacccactggagggagatcctgcaggtgtag

SEQ ID NO: 176672 - DNA, 1056 bp, synthetic construct
  misc_feature 1..1056: note = Description of Artificial Sequence: Synthetic coding sequence
  source 1..1056: mol_type = other DNA
atgcctggcccccccaggagcctggagatgggcctgctgaccttcagagatgtggccatcgagttcagcctggaggagtggcagcacctggacatcgcccagcagaacctgtacagaaatgtgatgctggagaactacagaaacctggccttcctgggcattgctgtgtccaagccagacctgatcacctgcctggagcagggcaaggagccctggaacatgaagagacatgagatggtggatgagcccccaggcatgtgcccccactttgcccaggacctgtggccagagcagggcatggaggacagcttccagaaggccatcctgcggcgctatggcaagtatggccacgagaacctgcagctgaggaagggctgcaagtctgtggatgagtacaaggtgaacaaggagggctacaacggcctgaaccagtgcttcaccacagcccagagcaaggtgttccagtgtgacaagtacctgaaggtgttctacaagttcctgaacagcaaccggcccaagatccgccacacagagaagaagagcttcaagtgcaagaagagggtgaagctgttctgcatgctgagccacaagacccagcacaagagcatctaccaccgggagaagagctacaagtgcaaggaatgtgggaagaccttcaactggagcagcaccctgaccaaccacaggaagatctacacagaggagaagccctacaagtgtgaggagtacaacaagagccccaagcagctgagcaccctgaccacccatgagatcatccatgctggggagaagctgtacaagtgtgaggagtgtggggaggccttcaacagaagcagcaccttcaccaagcacaaggtgatccacactggagtgaagccctacaagtgtgaggagtgtgggaaggccttcttctggagcagcaccctgaccaagcacaagaggatccacactggagagcagccctacaagtgggagaagtttgggaaggccttcaacagaagcagccacctgaccacagacaagatcacccactggagggagatcctgcaggtgtag

SEQ ID NO: 176673 - DNA, 1884 bp, synthetic construct
  misc_feature 1..1884: note = Description of Artificial Sequence: Synthetic coding sequence
  source 1..1884: mol_type = other DNA
atggctgctgctgagctgacagccccagcccagggcatcgtgacctttgaagatgtggccgtgtacttctcctggaaggagtggggcctgctggatgaggcccagaagtgcctgtaccatgatgtgatgctggagaacctgaccctgaccaccagcctgggcggcagcggggctggagatgaggaggccccctaccagcagagcaccagcccccagagggtgtcccaggtgcgcatccccaaggccctgcccagcccccagaagaccaacccctgtgagatctgtggccctgtgctgcggcagatcctgcacctggtggagcaccagggcacccaccacggccagaagctgtacacagatggagcctgcaggaagcagctgcagttcaccgcctacctgcaccagcaccagaagcagcacgtgggccagaagcacttccgcagcaatggaggccgggacatgttcctgagcagctgcacctttgaggtgtctgggaagcccttcacctgcaaggaggtgggcaaggacttcctggtgcgcagccgcttcctgcagcagcaggccgcccacaccaggaagaagagcaacagaaccaagtctgctgtggccttccacagcgtgaagaaccactacaactggggagaatgtgtgaaggccttctcctacaagcacgtgcgggtgcagcaccagggcgacctgatccgggagaggagctacatgtgcagtgaatgtgggaagagcttcagcaccagctgcagcctgagtgaccacctgcgggtgcacaccagcgagaagccctacacctgtggagaatgtgggaagagctaccggcagagcagcagcctcatcacccaccggcgcatccacactggagtgcggccccaccagtgtgatgaatgtgggaagctgttcaacagaaaatatgacctgctgatccaccagagggtgcacactggagagcggccctacaagtgcagtgaatgtgggaagagcttcagccacagcagcagcctcatcacccaccagaggatccacacaggcatgaggccctatgagtgcagtgaatgtgggaagagcttcatccacagcagcagcctcatcacccaccagagggtgcacacaggcacccggccctacatgtgcagtgaatgtgggaagagcttcagccagagctgccacctgatcaagcaccggcggctgcacatcggggagggcccctatgagtgcagtgaatgtgggaagctgttcacctaccgcagccgcttcttccagcaccagagggtgcacactggagtgcgcagccatgagtgccatgaatgtgggaagctgttcagcaggaagtttgacctgattgtgcatgagcgggtgcacactggagagcggccctatgagtgcagtgaatgtgggaagagcttcacctgcaagagctacctgatcagccactggaaggtgcacactggagcccggccctatgaatgtggagaatgtgggaagagcttcacccacagcagcaccctgctgcagcaccagagggtgcacactggagagcggccctatgagtgcaatgaatgtgggaagttcttcagccagagcagcagcctcatccgccaccggcgcagccacactggagagcggccctatgagtgcagcgagtgctggaagagcttcagcaaccacagcagcctggtgaagcaccggcgggtgcacactggagagcggccctatgagtgcagtgaatgtgggaagagcttcagccagagcagcaacctgaccaaccaccagaggatccacagcggggagcggccctatgagtgcagcgactgtgggaagttcttcaccttcaacagcaacctgctgaagcaccagaatgtgcacaagggctag

SEQ ID NO: 176674 - DNA, 1608 bp, synthetic construct
  misc_feature 1..1608: note = Description of Artificial Sequence: Synthetic coding sequence
  source 1..1608: mol_type = other DNA
atgggccccctgaccatcagagatgtgacagtggagttcagcctggaggagtggcactgcctggacacagcccagcagaacctgtacagagatgtgatgctggagaactacagaaacctggtgttcctgggcattgctgtgtccaagccagacctgatcacctgcctggagcagggcaaggagccctgcaacatgaagagacatgagatggtggccaagccccctgtgatgtgcagccacatcgccgaggacctgtgcccagagcgggacatcaagtacttcttccagaaggtgatcctgcggcgctatgacaagtgtgaacatgagaacctgcagctgaggaagggctgcaagtctgtggatgagtgcaaggtgtgcaagggcggctacaacggcctgaaccagtgcctgatcaccacccagagcaagatgtaccagtgtgacaagtatgtgaaggtgttctacaagttcagcaacagcgacagacacaagatccgccacacagagaagaagacctgcaagtgcaaggaatgtgggaaggccttcaaccagagcagcgccctgaccaggcacaagatgacccacactggagagaagccctacaagtgtgaagaatgtgggaaggccttcaacagaagcagccacctgacccagcacaaggtgatccacacccgggagaagccctacaagtgtgaagaatgtgggaaggccttcaacagaagcagccacatcacccagcacaagaggatccacaaccgggagaagcccttcaagtatgatgagtgctgcaaggccttcaagtggagcagcgccctgaccaccctgacccagcacaagaggatccacactggagagaagccctacaagtgtgaggagtgtgggaaggccttcaaccagagcagcgccctgaccaggcacaagatgatccacactggagagaagcccttccagtgtgaggagtgtgggaaggccttcaacagaagcagccacctgacccagcacaagatcatccacaccaaggagaagccctacaagtgtgaggagtgtgggaaggccttcaacagaagcagccacctgaccaagcacaagaggatccacacccgggagaaggcctacaagtgtgatgagtactgcaaggccttcaactggagcagcgccctgaccaccctgacccagcacaagatcatccacactggagagaagccctacaagtgtgaagaatgtgggaaggccttcaacagaagcagctacctgatccgccacaagatcatccacactggagagaagccctacaagtgtgaagaatgtgggaaggccttcaaccagagcagccacctgacccagcacaagatcatccacactggagagaagccctacaagtgtgaagaatgtgggaaggccttcaacagaagcagccacctgagccagcacaagatcatccacactggagagaagccctacaagtgtgaagaatgtgggaagcccttcaaccgcttctcctacctgactgtgcacaagagaattcatgctggggagaaccccaacaagtatgaagaatgtgggaaggcctgcaaccacagcagcaacctgaccaagcacaacagctag

SEQ ID NO: 176675 - DNA, 1692 bp, synthetic construct
  misc_feature 1..1692: note = Description of Artificial Sequence: Synthetic coding sequence
  source 1..1692: mol_type = other DNA
atgggccccctgaccatcagagatgtgacagtggagttcagcctggaggagtggcactgcctggacacagcccagcagaacctgtacagagatgtgatgctggagaactacagaaacctggtgttcctgggcattgctgtgtccaagccagacctgatcacctgcctggagcagggcaaggagccctgcaacatgaagagacatgagatggtggccaagccccctgtgatgtgcagccacatcgccgaggacctgtgcccagagcgggacatcaagtacttcttccagaaggtgatcctgcggcgctatgacaagtgtgaacatgagaacctgcagctgaggaagggctgcaagtctgtggatgagtgcaaggtgtgcaagggcggctacaacggcctgaaccagtgcctgatcaccacccagagcaagatgtaccagtgtgacaagtatgtgaaggtgttctacaagttcagcaacagcgacagacacaagatccgccacacagagaagaagacctgcaagtgcaaggaatgtgggaagagcttctgcatgctgagccagctgaccaggcacaagaggatccacatccgggagaacagccacaagtgtgaagaatgtgggaaggccttcaaccagagcagcgccctgaccaggcacaagatgacccacactggagagaagccctacaagtgtgaagaatgtgggaaggccttcaacagaagcagccacctgacccagcacaaggtgatccacacccgggagaagccctacaagtgtgaagaatgtgggaaggccttcaacagaagcagccacatcacccagcacaagaggatccacaaccgggagaagcccttcaagtatgatgagtgctgcaaggccttcaagtggagcagcgccctgaccaccctgacccagcacaagaggatccacactggagagaagccctacaagtgtgaggagtgtgggaaggccttcaaccagagcagcgccctgaccaggcacaagatgatccacactggagagaagcccttccagtgtgaggagtgtgggaaggccttcaacagaagcagccacctgacccagcacaagatcatccacaccaaggagaagccctacaagtgtgaggagtgtgggaaggccttcaacagaagcagccacctgaccaagcacaagaggatccacacccgggagaaggcctacaagtgtgatgagtactgcaaggccttcaactggagcagcgccctgaccaccctgacccagcacaagatcatccacactggagagaagccctacaagtgtgaagaatgtgggaaggccttcaacagaagcagctacctgatccgccacaagatcatccacactggagagaagccctacaagtgtgaagaatgtgggaaggccttcaaccagagcagccacctgacccagcacaagatcatccacactggagagaagccctacaagtgtgaagaatgtgggaaggccttcaacagaagcagccacctgagccagcacaagatcatccacactggagagaagccctacaagtgtgaagaatgtgggaagcccttcaaccgcttctcctacctgactgtgcacaagagaattcatgctggggagaaccccaacaagtatgaagaatgtgggaaggcctgcaaccacagcagcaacctgaccaagcacaacagctag

SEQ ID NO: 176676 - DNA, 1692 bp, synthetic construct; identical to SEQ ID NO: 176675
  misc_feature 1..1692: note = Description of Artificial Sequence: Synthetic coding sequence
  source 1..1692: mol_type = other DNA

SEQ ID NO: 176677 - DNA, 1602 bp, synthetic construct
  misc_feature 1..1602: note = Description of Artificial Sequence: Synthetic coding sequence
  source 1..1602: mol_type = other DNA
atggccaccagcttcagaacagccagctgctggggcctgctgtccttcaaggacatctccatggagttcacctgggatgagtggcagctgctggacagcacccagaagtacctgtacagagatgtgatcctggagaactaccacaacctgatctctgtgggctaccacggcaccaagccagacctgatcttcaagctggagcagggcgaggacccctggatcatcaatgccaagatcagccggcagagctgcccagatggctgggaggagtggtaccagaacaaccaggatgagctggagagcattgaaagaagctatgcctgcagcgtgctgggccgcctgaacctgagcaagacccatgacagcagccggcagaggctgtacaacacccggggcaagagcctgacccagaacagcgcccccagccgcagctacctgaggaagaacccagacaagttccacggctatgaggagccctacttcctgaagcaccagagggcccacagcattgagaagaactgtgtgtgcagtgaatgtgggaaggccttccgctgcaagagccagctgattgtgcacctgcgcatccacactggagagcggccctatgaatgttccaaatgtgagcgggccttcagcgccaagagcaacctgaatgcccaccagagggtgcacactggagagaagccctacagctgcagtgaatgtgagaaggtgttctccttccgcagccagctgattgtgcaccaggagatccacactggaggcaagccctacggctgcagtgaatgtgggaaggcctacagctggaagagccagctgctgctgcaccagaggagccacactggagtgaagccctatgaatgttctgaatgtgggaaggccttcagcctgaagagcccctttgtggtgcaccagaggacccacactggagtgaagccccacaagtgcagtgaatgtgggaaggccttccgcagcaagagctacctgctggtgcacatccgcatgcacactggagagaagccctaccagtgcagcgactgtgggaaggccttcaacatgaagacccagctgattgtgcaccagggcgtgcacactggaaacaacccctaccagtgtggggagtgtgggaaggcctttggaaggaaggagcagctgacagcccacctgcgggcccatgctggggagaagccctacggctgcagtgaatgtgggaaggccttcagcagcaagagctacctggtgatccacaggaggacccacactggagagcggccctatgaatgttccctgtgtgagcgggccttctgtgggaagagccagctgatcatccaccagaggacccacagcacagagaagccctatgaatgtaatgaatgtgagaaggcctaccccaggaaggccagcctgcagatccaccagaagacccacagcggggagaagcccttcaagtgcagtgaatgtgggaaggccttcacccagaagagcagcctgtctgagcaccagagggtgcacactggagagaagccctggaagtgcagtgaatgtgggaagagcttctgctggaacagcggcctgcgcatccacaggaagacccacaagtag

SEQ ID NO: 176678 - DNA, 1542 bp, synthetic construct
  misc_feature 1..1542: note = Description of Artificial Sequence: Synthetic coding sequence
  source 1..1542: mol_type = other DNA
atggagttcacctgggatgagtggcagctgctggacagcacccagaagtacctgtacagagatgtgatcctggagaactaccacaacctgatctctgtgggctaccacggcaccaagccagacctgatcttcaagctggagcagggcgaggacccctggatcatcaatgccaagatcagccggcagagctgcccagatggctgggaggagtggtaccagaacaaccaggatgagctggagagcattgaaagaagctatgcctgcagcgtgctgggccgcctgaacctgagcaagacccatgacagcagccggcagaggctgtacaacacccggggcaagagcctgacccagaacagcgcccccagccgcagctacctgaggaagaacccagacaagttccacggctatgaggagccctacttcctgaagcaccagagggcccacagcattgagaagaactgtgtgtgcagtgaatgtgggaaggccttccgctgcaagagccagctgattgtgcacctgcgcatccacactggagagcggccctatgaatgttccaaatgtgagcgggccttcagcgccaagagcaacctgaatgcccaccagagggtgcacactggagagaagccctacagctgcagtgaatgtgagaaggtgttctccttccgcagccagctgattgtgcaccaggagatccacactggaggcaagccctacggctgcagtgaatgtgggaaggcctacagctggaagagccagctgctgctgcaccagaggagccacactggagtgaagccctatgaatgttctgaatgtgggaaggccttcagcctgaagagcccctttgtggtgcaccagaggacccacactggagtgaagccccacaagtgcagtgaatgtgggaaggccttccgcagcaagagctacctgctggtgcacatccgcatgcacactggagagaagccctaccagtgcagcgactgtgggaaggccttcaacatgaagacccagctgattgtgcaccagggcgtgcacactggaaacaacccctaccagtgtggggagtgtgggaaggcctttggaaggaaggagcagctgacagcccacctgcgggcccatgctggggagaagccctacggctgcagtgaatgtgggaaggccttcagcagcaagagctacctggtgatccacaggaggacccacactggagagcggccctatgaatgttccctgtgtgagcgggccttctgtgggaagagccagctgatcatccaccagaggacccacagcacagagaagccctatgaatgtaatgaatgtgagaaggcctaccccaggaaggccagcctgcagatccaccagaagacccacagcggggagaagcccttcaagtgcagtgaatgtgggaaggccttcacccagaagagcagcctgtctgagcaccagagggtgcacactggagagaagccctggaagtgcagtgaatgtgggaagagcttctgctggaacagcggcctgcgcatccacaggaagacccacaagtag

SEQ ID NO: 176679 - DNA, 1239 bp, synthetic construct
  misc_feature 1..1239: note = Description of Artificial Sequence: Synthetic coding sequence
  source 1..1239: mol_type = other DNA
atgattggcatgctggagagcctgcagcacgagagtgacctgctgcagcacgaccagatccacactggagagaagccctatgagtgcaatgaatgtaggaagaccttcagcctgaagcagaacctggtggagcacaagaagatgcacactggagagaagagccatgagtgcacagaatgtgggaaggtgtgcagccgggtgagcagcctgaccctgcacctgcggagccacacaggcaagaaggcctacaagtgcaacaagtgtgggaaggccttcagccagaaggagaacttcctgagccaccagaagcaccacactggagagaagccctatgaatgtgagaaggtgtccatccagatgcccaccatcatccgccaccagaagaaccacacaggcaccaagccctatgcctgcaaggaatgtgggaaggccttcaacgggaaggcctacctgacagagcacgagaagatccacactggagagaagccctttgagtgcaaccagtgtggccgggccttcagccagaagcagtacctgatcaagcaccagaacatccacacaggcaagaagcccttcaagtgcagtgaatgtgggaaggccttcagccagaaggaaaatctcatcatccaccagaggatccacactggagagaagccctatgaatgtaaaggctgcggcaaggccttcatccagaagagcagcctcatccgccaccagaggagccacactggagagaagccctacacctgcaaggaatgtgggaaggccttcagcggcaagagcaacctgacagagcacgagaagatccacatcggggagaagccctacaagtgcaatgaatgtggcaccatcttccggcagaagcagtacctgatcaagcaccacaacatccacactggagagaagccctatgagtgcaacaagtgtgggaaggccttcagccgcatcaccagcctcatcgtgcacgtgcgcatccacactggagacaagccctatgagtgcaaggtgtgtgggaaggccttctgccagagcagcagcctgactgtgcacatgaggagccacactggagagaagccctacggctgcaatgaatgtgggaaggccttcagccagttcagcaccctggccctgcacatgaggatccacactggagagaagccctaccagtgcagtgaatgtgggaaggccttcagccagaagagccaccacatccgccaccagaggatccacacccactag

SEQ ID NO: 176680 - DNA, 1239 bp, synthetic construct; identical to SEQ ID NO: 176679
  misc_feature 1..1239: note = Description of Artificial Sequence: Synthetic coding sequence
  source 1..1239: mol_type = other DNA

SEQ ID NO: 176681 - DNA, 1884 bp, synthetic construct
  misc_feature 1..1884: note = Description of Artificial Sequence: Synthetic coding sequence
  source 1..1884: mol_type = other DNA
atggctgctgctgtgctgacagaccgggcccaggtgtctgtgacctttgatgatgtggccgtgaccttcaccaaggaggagtggggccagctggacctggcccagaggaccctgtaccaggaggtgatgctggagaactgtggcctgctggtgtccctgggctgccctgtgcccaaggccgagctgatctgccacctggagcacggccaggagccctggaccaggaaagaagacctgagccaggacacctgccctggggacaagggcaagcccaagaccacagagcccaccacctgtgagcccgccctgtctgagggcatcagcctgcagggccaggtgacccagggcaacagcgtggacagccagctgggccaggccgaggaccaggacggcctgtctgagatgcaggagggccacttccggcccggcatcgacccccaggagaagagccctgggaagatgagcccagaatgtgatggcctgggcacagcagatggagtgtgcagcagaattggccaggagcaggtgtcccctggggacagagtgcgcagccacaacagctgtgagagcggcaaggaccccatgatccaggaggaggagaacaacttcaagtgcagtgaatgtgggaaggtgttcaacaagaagcacctgctggccggccacgagaagatccacagcggcgtgaagccctatgagtgcacagaatgtgggaagaccttcatcaagagcacccacctgctgcagcaccacatgatccacactggagagcggccctatgagtgcatggagtgtgggaaggccttcaacaggaagagctacctgacccagcaccagaggatccacagcggggagaagccctacaagtgcaatgaatgtgggaaggccttcacccacaggagcaactttgtgctgcacaacagaagacacactggagagaagagctttgtgtgcacagaatgtggccaggtgttccgccaccggcccggcttcctgcggcactacgtggtgcacagcggggagaacccctatgagtgcctggagtgtgggaaggtgttcaagcacaggagctacctgatgtggcaccagcagacccacactggagagaagccctatgagtgcagtgaatgtgggaaggtgttcctggagagcgctgccctgatccaccactacgtgatccacactggagagaagccctttgagtgcctggagtgtgggaaggccttcaaccacaggagctacctgaagaggcaccagaggatccacactggagagaagccctttgtgtgcagtgaatgtgggaaggccttcacccactgcagcaccttcatcctgcacaagagggcccacactggagagaagccctttgagtgcaaggaatgtgggaaggccttcagcaacaggaaggacctgatccgccacttcagcatccacactggagagaagccctatgaatgtgtggagtgtgggaaggccttcaccaggatgagcggcctgaccaggcacaagaggatccacagcggggagaagccctatgaatgtgtggagtgtgggaagagcttctgctggagcaccaacctgatcagacatgccatcatccacactggagagaagccctacaagtgcagtgaatgtgggaaggccttcagccgcagcagcagcctgacccagcaccagaggatgcacacaggcaagaaccccatctctgtgacagatgtgggccggcccttcaccagcggccagacctctgtgaccctgcgggagctgctgctgggcaaggacttcctgaatgtgaccacagaggccaacatcctgcctgaggagaccagcagcagcgccagtgaccagccctaccagcgggagaccccccaggtgagcagcctgtag

SEQ ID NO: 176682 - DNA, 1884 bp, synthetic construct; identical to SEQ ID NO: 176681
  misc_feature 1..1884: note = Description of Artificial Sequence: Synthetic coding sequence
  source 1..1884: mol_type = other DNA

SEQ ID NO: 176683 - DNA, 1650 bp, synthetic construct
  misc_feature 1..1650: note = Description of Artificial Sequence: Synthetic coding sequence
  source 1..1650: mol_type = other DNA
atgctggagaactacaagaacctggccaccgtgggctaccagctgttcaagcccagcctcatctcctggctggagcaggaggagagcaggacagtgcagagaggagacttccaggccagcgagtggaaggtgcagctgaagaccaaggagctggccctgcagcaggatgtgctgggggagcccaccagcagcggcatccagatgattggcagccacaatggaggagaggtgtctgatgtgaagcagtgtggagatgtgagcagcgagcacagctgcctgaagacccacgtgaggacccagaacagcgagaacacctttgagtgctacctgtatggagtggacttcctgaccctgcacaagaagaccagcactggagagcagaggtctgtgttcagccagtgtgggaaggccttcagcctgaacccagatgtggtgtgccagaggacctgcacaggagagaaggcctttgactgcagcgacagcggcaagagcttcatcaaccacagccacctgcagggccacctgcggacccacaatggagagagcctgcacgagtggaaggaatgtggccggggcttcatccacagcacagacctggccgtgcgcatccagacccacaggtctgagaagccctacaagtgcaaggaatgtgggaagggcttccgctacagcgcctacctgaacatccacatgggcacccacactggagacaacccctatgagtgcaaggaatgtgggaaggccttcaccaggagctgccagctgacccagcacaggaagacccacactggagagaagccctacaagtgcaaggactgtggccgggccttcaccgtgagcagctgcctgagccagcacatgaagatccacgtgggggagaagccctatgagtgcaaggaatgtggcatcgccttcaccaggagcagccagctgacagagcacctgaagacccacacagccaaggacccctttgagtgcaagatctgtgggaagagcttcaggaacagcagctgcctgagtgaccacttccgcatccacacaggcatcaagccctacaagtgcaaggactgtgggaaggccttcacccagaacagcgacctgaccaagcacgcccggacccacagcggggagcggccctatgagtgcaaggaatgtgggaaggcctttgcccggagcagccggctgtctgagcacaccaggacccacactggagagaagccctttgaatgtgtgaagtgtgggaaggcctttgccatcagcagcaacctgagcggccacctgcgcatccacactggagagaagccctttgaatgtctggagtgtgggaaggccttcacccacagcagcagcctgaacaaccacatgaggacccacagcgccaagaagcccttcacctgcatggagtgtgggaaggccttcaagttccccacctgtgtgaacctgcacatgaggatccacactggagagaagccctacaagtgcaagcagtgtgggaagagcttctcctacagcaacagcttccagctgcacgagaggacccacactggagagaagccctatgagtgcaaggaatgtgggaaggccttcagcagcagcagcagcttcaggaaccacgagaggagacatgctgatgagcggctgagcgcctag

SEQ ID NO: 176684 - DNA, 1650 bp, synthetic construct; identical to SEQ ID NO: 176683
  misc_feature 1..1650: note = Description of Artificial Sequence: Synthetic coding sequence
  source 1..1650: mol_type = other DNA

SEQ ID NO: 176685 - DNA, 1650 bp, synthetic construct; identical to SEQ ID NO: 176683
  misc_feature 1..1650: note = Description of Artificial Sequence: Synthetic coding sequence
  source 1..1650: mol_type = other DNA

SEQ ID NO: 176686 - DNA, 2232 bp, synthetic construct
  misc_feature 1..2232: note = Description of Artificial Sequence: Synthetic coding sequence
  source 1..2232: mol_type = other DNA
atgggcctgctgaccttcagagatgtggccgtggagttcagcctggaggagtgggagcacctggagcccgcccagaagaacctgtaccaggatgtgatgctggagaactacagaaacctggtgtccctgggcctggtggtgtccaagccagacctgatcaccttcctggagcagaggaaggagccctggaatgtgaagtctgaggagaccgtggccatccagccagatgtgttcagccactacaacaaggacctgctgacagagcactgcacagaggccagcttccagaaggtgatcagcagaagacatggcagctgtgacctggagaacctgcacctgaggaagcgctggaagcgggaggagtgtgagggccacaacggctgctatgatgagaagaccttcaagtatgaccagtttgatgagagctctgtggagagcctcttccaccagcagatcctgagcagctgtgccaagagctacaactttgaccagtacaggaaggtgttcacccacagcagcctgctgaaccagcaggaggagattgacatctggggcaagcaccacatctatgacaagacctctgtgctcttccggcaggtgtccaccctgaacagctacagaaatgtgttcatcggggagaagaactaccactgcaacaacagcgagaagaccctgaaccagagcagcagccccaagaaccaccaggagaactacttcctggagaagcagtacaagtgcaaggagtttgaggaggtgttcctgcagagcatgcacggccaggagaagcaggagcagagctacaagtgcaacaagtgtgtggaggtgtgcacccagagcctgaagcacatccagcaccagaccatccacatccgggagaacagctacagctacaacaagtatgacaaggacctgagccagagcagcaacctgaggaagcagatcatccacaatgaggagaagccctacaagtgtgagaagtgtggggacagcctgaaccacagcctgcacctgacccagcaccagatcatccccacagaggagaagccctgcaagtggaaggaatgtgggaaggtgttcaacctgaactgcagcctgtacctgaccaagcagcagcagattgacacaggagaaaatctctacaagtgcaaggcctgcagcaagagcttcaccaggagcagcaacctgattgtgcaccagaggatccacactggagagaagccctacaagtgcaaggaatgtgggaaggccttccgctgcagcagctacctgaccaagcacaagaggatccacactggagagaagccctacaagtgcaaggaatgtgggaaggccttcaacagaagcagctgcctgacccagcaccagaccacccacactggagagaagctgtacaagtgcaaggtgtgcagcaagagctatgcccggagcagcaacctgatcatgcaccagagggtgcacactggagagaagccctacaagtgcaaggaatgtgggaaggtgttcagccgcagcagctgcctgacccagcacaggaagatccacactggagaaaatctctacaagtgcaaggtgtgtgccaagcccttcacctgcttcagcaacctgattgtgcatgagcgcatccacactggagagaagccctacaagtgcaaggaatgtgggaaggccttcccctacagcagccacctgatccgccaccaccgcatccacactggagagaagccctacaagtgcaaggcctgcagcaagagcttcagtgacagcagcggcctgactgtgcacaggaggacccacactggagagaagccctacacctgcaaggaatgtgggaaggccttctcctacagcagtgatgtgatccagcaccggcgcatccacacaggccagaggccctacaagtgtgaggagtgtgggaaggccttcaactaccgcagctacctgaccacccaccagaggagccacactggagagcggccctacaagtgtgaggagtgtgggaaggccttcaacagccgcagctacctgaccacccacagaagaagacacactggagagcggccctacaagtgtgatgaatgtgggaaggccttctcctaccgcagctacctgaccacccacagaagaagccacagcggggagcggccctacaagtgtgaggagtgtgggaaggccttcaacagccgcagctacctgattgcccaccagaggagccacacccgggagaagctgtag

SEQ ID NO: 176687 - DNA, 840 bp, synthetic construct
  misc_feature 1..840: note = Description of Artificial Sequence: Synthetic coding sequence
  source 1..840: mol_type = other DNA
atgggcctgctgaccttcagagatgtggccgtggagttcagcctggaggagtgggagcacctggagcccgcccagaagaacctgtaccaggatgtgatgctggagaactacagaaacctggtgtccctgggcctggtggtgtccaagccagacctgctgacagagcactgcacagaggccagcttccagaaggtgatcagccgccgccacggcagctgtgacctggagaacctgcacctgaggaagcgctggaagcgggaggagtgtgagggccacaacggctgctatgatgagaagaccttcaagtatgaccagtttgatgagagctctgtggagagcctcttccaccagcagatcctgagcagctgtgccaagagctacaactttgaccagtacaggaaggtgttcacccacagcagcctgctgaaccagcaggaggagattgacatctggggcaagcaccacatctatgacaagacctctgtgctcttccggcaggtgtccaccctgaacagctacagaaatgtgttcatcggggagaagaactaccactgcaacaacagcgagaagaccctgaaccagagcagcagccccaagaaccaccaggagaactacttcctggagaagcagtacaagtgcaaggagtttgaggaggtgttcctgcagagcatgcacggccaggagaagcaggagcagagctacaagtgcaacaagtgtgtggaggtgtgcacccagagcctgaagcacatccagcaccagaccatccacatcagagaaaattcctacagctacaacaagtatgacaaggacctgagccagagcagcaacctgaggaagtag

SEQ ID NO: 176688 - DNA, 2892 bp, synthetic construct
  misc_feature 1..2892: note = Description of Artificial Sequence: Synthetic coding sequence
  source 1..2892: mol_type = other DNA
atggccacagctgctgagaccagcgccagcgagcctgaggccgagagcaaggccggccccaaggcagatggagaggaggatgaggtgaaggccgcccggaccaggaggaaggtgctgagcagagctgtggccgccgccacctacaagaccatgggccctgcctgggaccagcaggaggagggcgtgtctgagagtgatggagatgaatatgccatggccagcagcgctgagagcagccctggagaatatgagtgggagtatgatgaggaggaggagaagaaccagctggagattgaaaggctggaggagcagctgagcatcaacgtgtatgactacaactgccacgtggacctgatccggctgctgcggctggagggggagctgaccaaggtgaggatggcccggcagaagatgtctgagatcttccccctgacagaggagctgtggctggagtggctgcatgatgagatctccatggcccaggacggcctggaccgggagcacgtgtatgacctgtttgagaaggctgtgaaggactacatctgccccaacatctggctggagtatggccagtacagcgtgggcggcatcggccagaagggcggcctggagaaggtgcgctctgtgtttgagcgggccctgagctctgtgggcctgcacatgaccaagggcctggccctgtgggaggcctaccgggagtttgagagcgccatcgtggaggccgcccggctggagaaggtgcacagcctcttccggcggcagctggccatccccctgtatgacatggaggccacctttgctgaatatgaggagtggagcgaggaccccatccctgagagcgtcatccagaactacaacaaggccctgcagcagctggagaagtacaagccctatgaggaggccctgctgcaggccgaggccccccggctggccgagtaccaggcctacatcgactttgagatgaagattggagaccctgcccgcatccagctgatctttgagcgggccctggtggagaactgcctggtgcctgacctgtggatccgctacagccagtacctggaccggcagctgaaggtgaaggacctggtgctgtctgtgcacaacagagccatccggaactgcccctggacagtggccctgtggagccgctacctgctggccatggagagacatggagtggaccaccaggtgatctctgtgacctttgagaaggccctgaatgccggcttcatccaggccacagattatgtggagatctggcaggcctacctggactacctgcggcggcgggtggacttcaagcaggacagcagcaaggagctggaggagctgcgggccgccttcacccgggccctggagtacctgaagcaggaggtggaggagcgcttcaatgaaagtggggaccccagctgtgtgatcatgcagaactgggccagaattgaggcccggctgtgcaacaacatgcagaaggcccgggagctgtgggacagcatcatgaccagaggaaatgccaagtatgccaacatgtggctggagtactacaacctggagcgggcccatggagacacccagcactgcaggaaggccctgcacagagctgtgcagtgcaccagtgactacccagagcacgtgtgtgaggtgctgctgaccatggagaggacagagggcagcctggaggactgggacattgctgtgcagaagacagagacccggctggcccgggtgaatgagcagaggatgaaggctgctgagaaggaggccgccctggtgcagcaggaggaggagaaggccgagcagaggaagagggcccgggcagagaagaaggccctgaagaagaagaagaagatccggggccctgagaagagaggagcagatgaagatgatgagaaggagtggggagatgatgaggaggagcagcccagcaagagaagaagagtggagaacagcatcccagctgctggggagacccagaatgtggaggtggccgccggccctgctggaaaatgtgccgctgtggatgtggagccccccagcaagcagaaggagaaggccgccagcctgaagagggacatgcccaaggtgctgcatgacagcagcaaggacagcatcaccgtgtttgtgagcaacctgccctacagcatgcaggagccagacaccaagctgcggcccctgtttgaggcctgtggggaggtggtgcagatccggcccatcttcagcaacagaggagacttccggggctactgctacgtggagttcaaggaggagaagagcgccctgcaggccctggagatggacaggaagtctgtggagggccggcccatgtttgtgagcccctgtgtggacaagagcaagaacccagacttcaaggtgttccgctacagcaccagcctggagaagcacaagctgttcatcagcggcctgcccttcagctgcaccaaggaggagctggaggagatctgcaaggcccacggcaccgtgaaggacctgcggctggtgaccaacagagctgggaagcccaagggcctggcctacgtggagtatgaaaatgaaagccaggccagccaggccgtgatgaagatggatggcatgaccatcaaggagaacatcatcaaggtggccatcagcaaccccccccagaggaaggtgcctgagaagccagagaccaggaaggcccctgggggccccatgctgctgccccagacctatggagcccggggcaagggccgcacccagctgagcctgctgccccgggccctgcagaggcccagcgctgctgccccccaggctgaaaatggacctgctgctgccccagctgtggccgccccagctgccacagaggcccccaagatgagcaatgctgactttgccaagctgttcctgaggaagtag

SEQ ID NO: 176689 - DNA, 1077 bp, synthetic construct
  misc_feature 1..1077: note = Description of Artificial Sequence: Synthetic coding sequence
  source 1..1077: mol_type = other DNA
atggatgccaagagcctgacagcctggagcaggaccctggtgaccttcaaggatgtgtttgtggacttcacccgggaggagtggaagctgctggacacagcccagcagatcgtgtacagaaatgtgatgctggagaactacaagaacctggtgtccctgggctaccagctgaccaagccagatgtgatcctgcggctggagaagggggaggagccctggctggtggagcgggagatccaccaggagacccacccagattctgaaacagcctttgagatcaagagctctgtgagcagccgcagcatcttcaaggacaagcagagctgtgacatcaagatggagggcatggccagaaatgacctgtggtacctgagcctggaggaggtgtggaagtgccgggaccagctggacaagtaccaggagaaccctgagcggcacctgagcatcccccgggtgctgagcctgcctgcccggcacaccaagctgactgtgggcatggccaccagggtgaggacagccagcatctgggtgccccccctgcaggagaggaacagctcctgggaccgcatcaggaagctgcagggccaggagagcatcctgggccagggcaccccaggcctgcagcccctgcccggcaccccccggcagaagcagaagagcagaagaattgagaaggtgctggagtggctgttcatcagccaggagcagcccaagatcaccaagtcctggggccccctgtccttcatggatgtgtttgtggacttcacctgggaggagtggcagctgctggaccctgcccagaagtgcctgtacagatctgtgatgctggagaactacagcaacctggtgtccctgggctaccagcacaccaagccagacatcatcttcaagctggagcagggcgaggagctgtgcatggtgcaggcccaggtgcccaaccagacctgccccatcctgaaggccggcaagagcaaggccaaggtgctggccggcctggtgtctggagagggcctgctgtgtgccagcaagatgaccccctgctgctgcatcctgtggaggcacagcctggagaactag

SEQ ID NO: 176690 - DNA, 504 bp, synthetic construct
  misc_feature 1..504: note = Description of Artificial Sequence: Synthetic coding sequence
  source 1..504: mol_type = other DNA
atggccaccagggtgaggacagccagcatctgggtgccccccctgcaggagaggaacagctcctgggaccgcatcaggaagctgcagggccaggagagcatcctgggccagggcaccccaggcctgcagcccctgcccggcaccccccggcagaagcagaagagccgccgcatcgagaaggtgctggagtggctgttcatcagccaggagcagcccaagatcaccaagtcctggggcaccaacacccccaacctgatcagcagcagctcctggaacaaggagaagagctgtgtgtggtgccggcccaagttccagatccggcctgtgcagacccagagcggcaagctgatgatcctgtggattggcatcaggaagatcaagacctcctgggaggtgcggcagaaggccctgaatgccctgcacctggagaactacgtgttcctggtgcagagcatcttccaggacaagaacctgatcaacgtggccaggatggagcgggtgtag

SEQ ID NO: 176691 - DNA, 2361 bp, synthetic construct
  misc_feature 1..2361: note = Description of Artificial Sequence: Synthetic coding sequence
  source 1..2361: mol_type = other DNA
atggactggcaccaggagaacaaggacaagctgggcagcacagccaagagctttgaatgtaccaccttcggcaagctgtgcctgctgagcaccaagtacctgagccggcagaagccccacaagtgtggcacccacggcaagagcctgaagtacatcgacttcaccagtgactatgccaggaacaaccccaacggcttccaggtgcacggcaagagcttcttccacagcaagcatgagcagacagtgattggcatcaagtactgtgagagcattgaaagtggcaagacagtgaacaagaagagccagctgatgtgccagcagatgtacatgggagagaagcccttcggctgcagctgctgtgagaaggccttcagcagcaagagctacctgctggtgcaccagcagacccacgccgaggagaagccctacggctgcaatgaatgtgggaaggacttcagcagcaagagctacctgattgtgcaccagaggatccacactggagagaagctgcacgagtgcagtgaatgtaggaagaccttctccttccacagccagctggtgatccaccagaggatccacactggagagaacccctatgagtgctgtgaatgtgggaaggtgttcagcaggaaggaccagctggtgagccaccagaagacccacagcggccagaagccctacgtgtgcaatgaatgtgggaaggccttcggcctgaagagccagctgatcatccacgagcgcatccacactggagagaagccctatgagtgcaatgaatgccagaaggccttcaacaccaagagcaacctgatggtgcaccagaggacccacactggagagaagccctacgtgtgcagcgactgtgggaaggccttcaccttcaagagccagctgattgtgcaccagggcatccacactggagtgaagccctacggctgcatccagtgtgggaagggcttcagcctgaagagccagctgattgtgcaccagaggagccacacaggcatgaagccctacgtgtgcaatgaatgtgggaaggccttccgcagcaagagctacctgatcatccacaccaggacccacactggagagaagctgcacgagtgcaacaactgtgggaaggccttctccttcaagagccagctgatcatccaccagaggatccacactggagagaacccctatgagtgccatgaatgtgggaaggccttcagcaggaagtaccagctgatcagccaccagaggacccacgccggggagaagccctatgagtgcacagactgtgggaaggccttcggcctgaagagccagctgatcatccaccagaggacccacactggagagaagccctttgagtgcagcgagtgccagaaggccttcaacaccaagagcaacctgattgtgcaccagaggacccacactggagagaagccctacagctgcaatgaatgtgggaaggccttcaccttcaagagccagctgattgtgcacaagggcgtgcacactggagtgaagccctacggctgcagccagtgtgccaagaccttcagcctgaagagccagctgattgtgcaccagaggagccacactggagtgaagccctacggctgcagtgaatgtgggaaggccttccgcagcaagagctacctgatcatccacatgaggacccacactggagagaagccccatgagtgcagagaatgtgggaagagcttctccttcaacagccagctgattgtgcaccagaggatccacactggagagaacccctatgagtgcagtgaatgtgggaaggccttcaacaggaaggaccagctgatcagccaccagaggacccacgccggggagaagccctacggctgcagtgaatgtgggaaggccttcagcagcaagagctacctgatcatccacatgaggacccacagcggggagaagccctatgagtgcaatgaatgtgggaaggccttcatctggaagagcctgctgattgtgcatgagaggacccacgccggcgtgaacccctacaagtgcagccagtgtgagaagagcttcagcggcaagctgcggctgctggtgcaccagaggatgcacacccgggagaagccctatgagtgcagtgaatgtgggaaggccttcatccggaacagccagctgattgtgcaccagaggacccacagcggggagaagccctacggctgcaatgaatgtgggaagaccttcagccagaagagcatcctgagcgcccaccagaggacccacactggagagaagccctgcaagtgcacagaatgtgggaaggccttctgctggaagagccagctgatcatgcaccagaggacccacgtggatgacaagcactag

SEQ ID NO: 176692 - DNA, 2844 bp, synthetic construct; identical to SEQ ID NO: 168368
  misc_feature 1..2844: note = Description of Artificial Sequence: Synthetic coding sequence
  source 1..2844: mol_type = other DNA

SEQ ID NO: 176693 - DNA, 2193 bp, synthetic construct
  misc_feature 1..2193: note = Description of Artificial Sequence: Synthetic coding sequence
  source 1..2193: mol_type = other DNA
atggactggcaccaggagaacaaggacaagctgggcagcacagccaagagctttgaatgtaccaccttcggcaagctgtgcctgctgagcaccaagtacctgagccggcagaagccccacaagtgtggcacccacggcaagagcctgaagtacatcgacttcaccagtgactatgccaggaacaaccccaacggcttccaggtgcacggcaagagcttcttccacagcaagcatgagcagacagtgattggcatcaagtactgtgagagcattgaaagtggcaagacagtgaacaagaagagccagctgatgtgccagcagatgtacatgggagagaagcccttcggctgcagctgctgtgagaaggccttcagcagcaagagctacctgctggtgcaccagcagacccacgccgaggagaagccctacggctgcaatgaatgtgggaaggacttcagcagcaagagctacctgattgtgcaccagaggatccacactggagagaagctgcacgagtgcagtgaatgtaggaagaccttctccttccacagccagctggtgatccaccagaggatccacactggagagaacccctatgagtgctgtgaatgtgggaaggtgttcagcaggaaggaccagctggtgagccaccagaagacccacagcggccagaagccctacgtgtgcaatgaatgtgggaaggccttcggcctgaagagccagctgatcatccacgagcgcatccacactggagagaagccctatgagtgcaatgaatgccagaaggccttcaacaccaagagcaacctgatggtgcaccagaggacccacactggagagaagccctacgtgtgcagcgactgtgggaaggccttcaccttcaagagccagctgattgtgcaccagggcatccacactggagtgaagccctacggctgcatccagtgtgggaagggcttcagcctgaagagccagctgattgtgcaccagaggagccacacaggcatgaagccctacgtgtgcaatgaatgtgggaaggccttccgcagcaagagctacctgatcatccacaccaggacccacactggagagaagctgcacgagtgcaacaactgtgggaaggccttctccttcaagagccagctgatcatccaccagaggatccacactggagagaacccctatgagtgccatgaatgtgggaaggccttcagcaggaagtaccagctgatcagccaccagaggacccacgccggggagaagccctatgagtgcacagactgtgggaaggccttcggcctgaagagccagctgatcatccaccagaggacccacactggagagaagccctttgagtgcagcgagtgccagaaggccttcaacaccaagagcaacctgattgtgcaccagaggacccacactggagagaagccctacagctgcaatgaatgtgggaaggccttcaccttcaagagccagctgattgtgcacaagggcgtgcacactggagtgaagccctacggctgcagccagtgtgccaagaccttcagcctgaagagccagctgattgtgcaccagaggagccacactggagtgaagccctacggctgcagtgaatgtgggaaggccttccgcagcaagagctacctgatcatccacatgaggacccacactggagagaagccccatgagtgcagagaatgtgggaagagcttctccttcaacagccagctgattgtgcaccagaggatccacactggagagaacccctatgagtgcagtgaatgtgggaaggccttcaacaggaaggaccagctgatcagccaccagaggacccacgccggggagaagccctacggctgcagtgaatgtgggaaggccttcagcagcaagagctacctgatcatccacatgaggacccacagcggggagaagccctatgagtgcaatgaatgtgggaaggccttcatctggaagagcctgctgattgtgcatgagaggacccacgccggcgtgaacccctacaagtgcagccagtgtgagaagagcttcagcggcaagctgcggctgctggtgcaccagaggatgcacacccgggagaagccctatgagtgcacagaatgtgggaaggccttctgctggaagagccagctgatcatgcaccagaggacccacgtggatgacaagcactag

SEQ ID NO: 176694 - DNA, 303 bp, synthetic construct
  misc_feature 1..303: note = Description of Artificial Sequence: Synthetic coding sequence
  source 1..303: mol_type = other DNA
atggccaccagggtgaggacagccagcatctggggcaccaacacccccaacctgatcagcagcagctcctggaacaaggagaagagctgtgtgtggtgccggcccaagttccagatccggcctgtgcagacccagagcggcaagctgatgatcctgtggattggcatcaggaagatcaagacctcctgggaggtgcggcagaaggccctgaatgccctgcacctggagaactacgtgttcctggtgcagagcatcttccaggacaagaacctgatcaacgtggccaggatggagcgggtgtag

SEQ ID NO: 176695 - DNA, 381 bp, synthetic construct
  misc_feature 1..381: note = Description of Artificial Sequence: Synthetic coding sequence
  source 1..381: mol_type = other DNA
atggccaccagggtgaggacagccagcatctggggccccctgtccttcatggatgtgtttgtggacttcacctgggaggagtggcagctgctggaccctgcccagaagtgcctgtacagatctgtgatgctggagaactacagcaacctggtgtccctgggctaccagcacaccaagccagacatcatcttcaagctggagcagggcgaggagctgtgcatggtgcaggcccaggtgcccaaccagacctgccccatcctgaaggccggcaagagcaaggccaaggtgctggccggcctggtgtctggagagggcctgctgtgtgccagcaagatgaccccctgctgctgcatcctgtggaggcacagcctggagaactag

SEQ ID NO: 176696 - DNA, 207 bp, synthetic construct
  misc_feature 1..207: note = Description of Artificial Sequence: Synthetic coding sequence
  source 1..207: mol_type = other DNA
atggccaccagggtgaggacagccagcatctggacccagagcggcaagctgatgatcctgtggattggcatcaggaagatcaagacctcctgggaggtgcggcagaaggccctgaatgccctgcacctggagaactacgtgttcctggtgcagagcatcttccaggacaagaacctgatcaacgtggccaggatggagcgggtgtag

SEQ ID NO: 176697 - DNA, 504 bp, synthetic construct; identical to SEQ ID NO: 176690
  misc_feature 1..504: note = Description of Artificial Sequence: Synthetic coding sequence
  source 1..504: mol_type = other DNA

SEQ ID NO: 176698 - DNA, 381 bp, synthetic construct; identical to SEQ ID NO: 176695
  misc_feature 1..381: note = Description of Artificial Sequence: Synthetic coding sequence
  source 1..381: mol_type = other DNA

SEQ ID NO: 176699 - DNA, 1959 bp, synthetic construct
  misc_feature 1..1959: note = Description of Artificial Sequence: Synthetic coding sequence
  source 1..1959: mol_type = other DNA
atggccagccggctgcccacagcctggagctgtgagcctgtgacctttgaagatgtgaccctgggcttcaccccagaggagtggggcctgctggacctgaagcagaagagcctgtaccgggaggtgatgctggagaactacagaaacctggtgtctgtggagcaccagctgagcaagccagatgtggtgtcccagctggaggaggccgaggacttctggcctgtggagcggggcatcccccaggacaccatccctgagtacccagagctgcagctggaccccaagctggaccccctgcctgctgagagccccctgatgaacatcgaggtggtggaggtgctgaccctgaaccaggaggtggccggccccagaaatgcccagatccaggccctgtatgcagaagatggcagcctgtctgcagatgcccccagcgagcaggtgcagcagcagggcaagcaccctggggaccctgaggccgcccggcagcgcttccggcagttccgctacaaggacatgacaggcccccgggagctggaccagctgcgggagctgtgccaccagtggctgcagcccaaggcccggagcaaggagcagatcctggagctgctggtgctggagcagttcctgggcgccctgcctgtgaagctgcggacctgggtggagagccagcaccctgagaactgccaggaggtggtggccctggtggagggcgtgacctggatgtctgaggaggaggtgctgcctgctggccagcctgctgagggcaccacctgctgcctggaggtgacagcccagcaggaggagaagcaggaggatgctgccatctgccctgtgacagtgctgcctgaggagcctgtgaccttccaggatgtggccgtggacttcagccgggaggagtggggcctgctgggccccacccagaggacagagtacagagatgtgatgctggagaccttcggccacctggtgtctgtgggctgggagaccaccctggagaacaaggagctggcccccaacagcgacatccctgaggaggagcccgcccccagcctgaaggtgcaggagagcagccgggactgtgccctgagcagcaccctggaggacaccctgcagggcggcgtgcaggaggtgcaggacacagtgctgaagcagatggagagcgcccaggagaaggacctgccccagaagaagcactttgacaaccgggagagccaggccaacagcggggccctggacaccaaccaggtgtccctgcagaagattgacaaccctgagagccaggccaacagcggggccctggacaccaaccaggtgctgctgcacaagatcccccccaggaagaggctgaggaagagggacagccaggtgaagtccatgaagcacaacagccgggtgaagatccaccagaagagctgtgagcggcagaaggccaaggagggcaatggctgcaggaagaccttcagccgcagcaccaagcagatcaccttcatccgcatccacaagggcagccaggtgtgccgctgcagtgaatgtgggaagatcttcaggaacccccgctacttctctgtgcacaagaagatccacactggagagcggccctacgtgtgccaggactgtgggaaaggatttgtgcagagcagcagcctgacccagcaccagagggtgcacagcggggagcggccctttgagtgccaggagtgtggccgcaccttcaatgacagaagtgccatcagccagcacctgcggacccacactggagccaagccctacaagtgccaggactgtgggaaggccttccggcagagcagccacctgatccgccaccagaggacccacactggagagcggccctatgcctgcaacaagtgtgggaaggccttcacccagagcagccacctgattggccaccagaggacccacaacagaaccaagaggaagaagaagcagcccaccagctag

SEQ ID NO: 176700 - DNA, 1863 bp, synthetic construct
  misc_feature 1..1863: note = Description of Artificial Sequence: Synthetic coding sequence
  source 1..1863: mol_type = other DNA
atggccagccggctgcccacagcctggagctgtgagcctgtgacctttgaagatgtgaccctgggcttcaccccagaggagtggggcctgctggacctgaagcagaagagcctgtaccgggaggtgatgctggagaactacagaaacctggtgtctgtggagtacccagagctgcagctggaccccaagctggaccccctgcctgctgagagccccctgatgaacatcgaggtggtggaggtgctgaccctgaaccaggaggtggccggccccagaaatgcccagatccaggccctgtatgcagaagatggcagcctgtctgcagatgcccccagcgagcaggtgcagcagcagggcaagcaccctggggaccctgaggccgcccggcagcgcttccggcagttccgctacaaggacatgacaggcccccgggagctggaccagctgcgggagctgtgccaccagtggctgcagcccaaggcccggagcaaggagcagatcctggagctgctggtgctggagcagttcctgggcgccctgcctgtgaagctgcggacctgggtggagagccagcaccctgagaactgccaggaggtggtggccctggtggagggcgtgacctggatgtctgaggaggaggtgctgcctgctggccagcctgctgagggcaccacctgctgcctggaggtgacagcccagcaggaggagaagcaggaggatgctgccatctgccctgtgacagtgctgcctgaggagcctgtgaccttccaggatgtggccgtggacttcagccgggaggagtggggcctgctgggccccacccagaggacagagtacagagatgtgatgctggagaccttcggccacctggtgtctgtgggctgggagaccaccctggagaacaaggagctggcccccaacagcgacatccctgaggaggagcccgcccccagcctgaaggtgcaggagagcagccgggactgtgccctgagcagcaccctggaggacaccctgcagggcggcgtgcaggaggtgcaggacacagtgctgaagcagatggagagcgcccaggagaaggacctgccccagaagaagcactttgacaaccgggagagccaggccaacagcggggccctggacaccaaccaggtgtccctgcagaagattgacaaccctgagagccaggccaacagcggggccctggacaccaaccaggtgctgctgcacaagatcccccccaggaagaggctgaggaagagggacagccaggtgaagtccatgaagcacaacagccgggtgaagatccaccagaagagctgtgagcggcagaaggccaaggagggcaatggctgcaggaagaccttcagccgcagcaccaagcagatcaccttcatccgcatccacaagggcagccaggtgtgccgctgcagtgaatgtgggaagatcttcaggaacccccgctacttctctgtgcacaagaagatccacactggagagcggccctacgtgtgccaggactgtgggaaaggatttgtgcagagcagcagcctgacccagcaccagagggtgcacagcggggagcggccctttgagtgccaggagtgtggccgcaccttcaatgacagaagtgccatcagccagcacctgcggacccacactggagccaagccctacaagtgccaggactgtgggaaggccttccggcagagcagccacctgatccgccaccagaggacccacactggagagcggccctatgcctgcaacaagtgtgggaaggccttcacccagagcagccacctgattggccaccagaggacccacaacagaaccaagaggaagaagaagcagcccaccagctag

SEQ ID NO: 176701 - DNA, 1644 bp, synthetic construct
  misc_feature 1..1644: note = Description of Artificial Sequence: Synthetic coding sequence
  source 1..1644: mol_type = other DNA
atgaacatcgaggtggtggaggtgctgaccctgaaccaggaggtggccggccccagaaatgcccagatccaggccctgtatgcagaagatggcagcctgtctgcagatgcccccagcgagcaggtgcagcagcagggcaagcaccctggggaccctgaggccgcccggcagcgcttccggcagttccgctacaaggacatgacaggcccccgggagctggaccagctgcgggagctgtgccaccagtggctgcagcccaaggcccggagcaaggagcagatcctggagctgctggtgctggagcagttcctgggcgccctgcctgtgaagctgcggacctgggtggagagccagcaccctgagaactgccaggaggtggtggccctggtggagggcgtgacctggatgtctgaggaggaggtgctgcctgctggccagcctgctgagggcaccacctgctgcctggaggtgacagcccagcaggaggagaagcaggaggatgctgccatctgccctgtgacagtgctgcctgaggagcctgtgaccttccaggatgtggccgtggacttcagccgggaggagtggggcctgctgggccccacccagaggacagagtacagagatgtgatgctggagaccttcggccacctggtgtctgtgggctgggagaccaccctggagaacaaggagctggcccccaacagcgacatccctgaggaggagcccgcccccagcctgaaggtgcaggagagcagccgggactgtgccctgagcagcaccctggaggacaccctgcagggcggcgtgcaggaggtgcaggacacagtgctgaagcagatggagagcgcccaggagaaggacctgccccagaagaagcactttgacaaccgggagagccaggccaacagcggggccctggacaccaaccaggtgtccctgcagaagattgacaaccctgagagccaggccaacagcggggccctggacaccaaccaggtgctgctgcacaagatcccccccaggaagaggctgaggaagagggacagccaggtgaagtccatgaagcacaacagccgggtgaagatccaccagaagagctgtgagcggcagaaggccaaggagggcaatggctgcaggaagaccttcagccgcagcaccaagcagatcaccttcatccgcatccacaagggcagccaggtgtgccgctgcagtgaatgtgggaagatcttcaggaacccccgctacttctctgtgcacaagaagatccacactggagagcggccctacgtgtgccaggactgtgggaagggctttgtgcagagcagcagcctgacccagcaccagagggtgcacagcggggagcggccctttgagtgccaggagtgtggccgcaccttcaatgacagaagtgccatcagccagcacctgcggacccacactggagccaagccctacaagtgccaggactgtgggaaggccttccggcagagcagccacctgatccgccaccagaggacccacactggagagcggccctatgcctgcaacaagtgtgggaaggccttcacccagagcagccacctgattggccaccagaggacccacaacagaaccaagaggaagaagaagcagcccaccagctag

SEQ ID NO: 176702 - DNA, 1353 bp, synthetic construct
  misc_feature 1..1353: note = Description of Artificial Sequence: Synthetic coding sequence
  source 1..1353: mol_type = other DNA
atggccgccagcaagacccagggcgctgtggccaggatgcaggaggacagagatggcagctgcagcacagtgggcggcgtgggctatggagacagcaaggactgcatcctggagcccctgagcctgcctgagagccctgggggcaccaccaccctggagggcagccccagcgtgccctgcatcttctgtgaggagcacttccctgtggccgagcaggacaagctgctgaagcacatgatcatcgagcacaagatcgtgattgctgatgtgaagctggtggccgacttccagcgctacatcctgtactggaggaagcgcttcacagagcagcccatcacagacttctgcagcgtcatccgcatcaacagcacagccccctttgaggagcaggagaactacttcctgctgtgtgatgtgctgcctgaggaccgcatcctgcgggaggagctgcagaagcagaggctgcgggagatcctggagcagcagcagcaggagagaaatgacaccaacttccacggcgtgtgcatgttctgcaatgaggagttcctgggcaacagaagtgtcatcctgaaccacatggcccgggagcacgccttcaacatcggcctgcctgacaacatcgtgaactgcaatgagttcctgtgcaccctgcagaagaagctggacaacctgcagtgcctgtactgtgagaagaccttccgggacaagaacaccctgaaggaccacatgaggaagaagcagcacaggaagatcaaccccaagaaccgggagtatgaccgcttctacgtgatcaactacctggagctgggcaagtcctgggaggaggtgcagctggaggatgaccgggagctgctggaccaccaggaggatgactggagcgactgggaggagcacccagccagcgctgtgtgcctcttctgtgagaagcaggccgagaccatcgagaagctgtatgtgcacatggaggatgcccatgaatttgacctgctgaagatcaagtctgagctgggcctgaacttctaccagcaggtgaagctggtgaacttcatccggcggcaggtgcaccagtgccgctgctacggctgccacgtgaagttcaagagcaaggctgacctgcggacccacatggaggagaccaagcacaccagcctgctgcctgacaggaagacctgggaccagctggagtactacttccccacctatgaaaatgacaccctgctgtgcaccctgagtgacagcgagagtgacctgacagcccaggagcagaatgaaaatgtgcccatcatcagcgaggacaccagcaagctgtatgccctgaagcagagcagcatcctgaaccagctgctgctgtag

SEQ ID NO: 176703 - DNA, 873 bp, synthetic construct
  misc_feature 1..873: note = Description of Artificial Sequence: Synthetic coding sequence
  source 1..873: mol_type = other DNA
atggccgccagcaagacccagggcgctgtggccaggatgcaggaggacagagatggcagctgcagcacagtgggcggcgtgggctatggagacagcaaggactgcatcctggagcccctgagcctgcctgagagccctgggggcaccaccaccctggagggcagccccagcgtgccctgcatcttctgtgaggagcacttccctgtggccgagcaggacaagctgctgaagcacatgatcatcgagcacaagatcgtgattgctgatgtgaagctggtggccgacttccagcgctacatcctgtactggaggaagcgcttcacagagcagcccatcacagacttctgcagcgtcatccgcatcaacagcacagccccctttgaggagcaggagaactacttcctgctgtgtgatgtgctgcctgaggaccgcatcctgcgggaggagctgcagaagcagaggctgcgggagatcctggagcagcagcagcaggagagaaatgacaccaacttccacggcgtgtgcatgttctgcaatgaggagttcctgggcaacagaagtgtcatcctgaaccacatggcccgggagcacgccttcaacatcggcctgcctgacaacatcgtgaactgcaatgagttcctgtgcaccctgcagaagaagctggacaacctgcagtgcctgtactgtgagaagaccttccgggacaagaacaccctgaaggaccacatgaggaagaagcagcacaggaagatcaaccccaagaaccgggagtatgaccgcttctacgtgatcaactacctggtgcggctgtccttccacaacctgaagtttgactgcagcacagccaacaagatcttcctgcggaccaactag

SEQ ID NO: 176704 - DNA, 1428 bp, synthetic construct
  misc_feature 1..1428: note = Description of Artificial Sequence: Synthetic coding sequence
  source 1..1428: mol_type = other DNA
atgagcaggaggaaggccggcagcgcccccaggagagtggagcccgccccagctgccaacccagatgatgagatggagatgcaggacctggtgattgagctgaagccagagccagatgcccagccccagcaggccccccggctgggccccttcagccccaaggaggtgagcagcgctggccgctttggaggagagccccaccacagccctggccccatgcctgctggagctgccctgctggccctgggccccaggaacccctggaccctgtggacccccctgacccccaactacccagaccggcagccctggacagacaagcacccagacctgctgacctgtggccgctgcctgcagaccttccccctggaggccatcacagccttcatggaccacaagaagctgggctgccagctgttccggggccccagccggggccagggcagcgagcgggaggagctgaaggccctgagctgcctgcgctgtgggaagcagttcaccgtggcctggaagctgctgcggcatgcccagtgggaccacggcctgagcatctaccagacagaaagtgaggcccctgaggcccccctgctgggcctggccgaggtggccgctgctgtgtctgctgtggtgggccctgctgctgaggccaagagcccccgggccagcggcagcggcctgacccggcgcagccccacctgccctgtgtgcaagaagaccctgagcagcttcagcaacctgaaggtgcacatgaggagccacactggagagcggccctatgcctgtgaccagtgcccctatgcctgtgcccagagcagcaagctgaacagacacaagaagacccaccggcaggtgcccccccagagccccctgatggctgacaccagccaggagcaggccagcgctgcccctcctgagcctgctgtgcacgccgccgcccccaccagcaccctgccctgcagcggcggggagggcgctggggccgccgccacagctggggtgcaggagcccggggcccctggcagcggggcccaggccggccctggaggagacacctggggcgccatcaccacagagcagaggacagatcctgccaacagccagaaggccagccccaagaagatgcccaagagcggcggcaagagccggggccctgggggcagctgtgagttctgtgggaagcacttcaccaacagcagcaacctgactgtgcacagaagaagccacactggagagcggccctacacctgtgagttctgcaactatgcctgtgcccagagcagcaagctgaacagacacaggaggatgcacggcatgaccccaggcagcaccaggtttgagtgcccccactgccacgtgcccttcggcctgcgggccaccctggacaagcacctgcggcagaagcaccctgaggccgccggggaggcctag

SEQ ID NO: 176705 - DNA, 1356 bp, synthetic construct
  misc_feature 1..1356: note = Description of Artificial Sequence: Synthetic coding sequence
  source 1..1356: mol_type = other DNA
atggagatgcaggacctggtgattgagctgaagccagagccagatgcccagccccagcaggccccccggctgggccccttcagccccaaggaggtgagcagcgctggccgctttggaggagagccccaccacagccctggccccatgcctgctggagctgccctgctggccctgggccccaggaacccctggaccctgtggacccccctgacccccaactacccagaccggcagccctggacagacaagcacccagacctgctgacctgtggccgctgcctgcagaccttccccctggaggccatcacagccttcatggaccacaagaagctgggctgccagctgttccggggccccagccggggccagggcagcgagcgggaggagctgaaggccctgagctgcctgcgctgtgggaagcagttcaccgtggcctggaagctgctgcggcatgcccagtgggaccacggcctgagcatctaccagacagaaagtgaggcccctgaggcccccctgctgggcctggccgaggtggccgctgctgtgtctgctgtggtgggccctgctgctgaggccaagagcccccgggccagcggcagcggcctgacccggcgcagccccacctgccctgtgtgcaagaagaccctgagcagcttcagcaacctgaaggtgcacatgaggagccacactggagagcggccctatgcctgtgaccagtgcccctatgcctgtgcccagagcagcaagctgaacagacacaagaagacccaccggcaggtgcccccccagagccccctgatggctgacaccagccaggagcaggccagcgctgcccctcctgagcctgctgtgcacgccgccgcccccaccagcaccctgccctgcagcggcggggagggcgctggggccgccgccacagctggggtgcaggagcccggggcccctggcagcggggcccaggccggccctggaggagacacctggggcgccatcaccacagagcagaggacagatcctgccaacagccagaaggccagccccaagaagatgcccaagagcggcggcaagagccggggccctgggggcagctgtgagttctgtgggaagcacttcaccaacagcagcaacctgactgtgcacagaagaagccacactggagagcggccctacacctgtgagttctgcaactatgcctgtgcccagagcagcaagctgaacagacacaggaggatgcacggcatgaccccaggcagcaccaggtttgagtgcccccactgccacgtgcccttcggcctgcgggccaccctggacaagcacctgcggcagaagcaccctgaggccgccggggaggcctag

SEQ ID NO: 176706 - DNA, 1341 bp, synthetic construct
  misc_feature 1..1341: note = Description of Artificial Sequence: Synthetic coding sequence
  source 1..1341: mol_type = other DNA
atggagacccaggccgacctggtgtcccaggagccccaggccctgctggacagcgccctgcccagcaaggtgcctgccttcagtgacaaggacagcctgggagatgagatgctggccgccgccctgctgaaggccaagagccaggagctggtgacctttgaagatgtggccgtgtacttcatcaggaaggagtggaagaggctggagcccgcccagagggacctgtacagagatgtgatgctggagaactatggaaatgtgttcagcctggaccgggagaccaggacagaaaatgaccaggagatcagcgaggacaccaggagccatggagtgctgctgggccgcttccagaaggacatcagccagggcctgaagttcaaggaggcctatgaaagagaggtgtccctgaagaggcccctgggcaacagccctggagagcggctgaacaggaagatgccagactttggccaggtgacagtggaggagaagctgaccccaagaggagagaggtctgagaagtacaatgactttggaaacagcttcaccgtgaacagcaacctgatcagccaccagaggctgcctgtgggggaccggccccacaagtgtgatgagtgcagcaagagcttcaacagaacaagtgacctgatccagcaccagaggatccacactggagagaagccctatgaatgtaatgaatgtgggaaggccttcagccagagcagccacctgatccagcaccagaggatccacactggagagaagccctatgaatgtagtgactgtgggaagaccttcagctgcagcagcgccctgatcctgcaccggcgcatccacactggagagaagccctatgaatgtaatgaatgtgggaagaccttctcctggagcagcaccctgacccaccaccagaggatccacactggagagaagccctatgcctgcaatgaatgtgggaaggccttcagccgcagcagcaccctcatccaccaccagaggatccacactggagagaagccctatgaatgtaatgaatgtgggaaggccttcagccagagcagccacctgtaccagcaccagaggatccacactggagagaagccctatgagtgcatggagtgtggcggcaagttcacctacagcagcggcctcatccagcaccagaggatccacactggagagaacccctatgaatgttctgaatgtgggaaggccttccgctacagcagcgccctggtgcgccaccagaggatccacactggagagaagcccctgaatggaattggcatgagcaagagcagcctgcgggtgaccacagagctgaacatccgggagagcacctag

SEQ ID NO: 176707 - DNA, 1341 bp, synthetic construct; identical to SEQ ID NO: 176706
  misc_feature 1..1341: note = Description of Artificial Sequence: Synthetic coding sequence
  source 1..1341: mol_type = other DNA

SEQ ID NO: 176708 - DNA, 396 bp, synthetic construct
  misc_feature 1..396: note = Description of Artificial Sequence: Synthetic coding sequence
  source 1..396: mol_type = other DNA
atggagacccaggccgacctggtgtcccaggagccccaggccctgctggacagcgccctgcccagcaaggtgcctgccttcagtgacaaggacagcctgggagatgagatgctggccgccgccctgctgaaggccaagagccaggagctggtgacctttgaagatgtggccgtgtacttcatcaggaaggagtggaagaggctggagcccgcccagagggacctgtacagagatgtgatgctggagaactatggaaatgtgttcagcctggactggatccacgtgtgcctgaccacccagaaggtgatgctggcctggctgaccggcaccctgtctgtggccaagggcctgtgcagcagcgagctggcctctgtggagcccccagacaccttctag

SEQ ID NO: 176709 - DNA, 315 bp, synthetic construct
  misc_feature 1..315: note = Description of Artificial Sequence: Synthetic coding sequence
  source 1..315: mol_type = other DNA
atggagacccaggccgacctggtgtcccaggagccccaggccctgctggacagcgccctgcccagcaaggtgcctgccttcagtgacaaggacagcctgggagatgagatgctggccgccgccctgctgaaggccaagagccaggagctggtgacctttgaagatgtggccgtgtacttcatcaggaaggagtggaagaggctggagcccgcccagagggacctgtacagagatgtgatgctggagaactatggaaatgtgttcagcctggaccgggagaccaggacagaaaatgaccaggagatcagcgagtag

SEQ ID NO: 176710 - DNA, 1341 bp, synthetic construct; identical to SEQ ID NO: 176706
  misc_feature 1..1341: note = Description of Artificial Sequence: Synthetic coding sequence
  source 1..1341: mol_type = other DNA

SEQ ID NO: 176711 - DNA, 558 bp, synthetic construct
  misc_feature 1..558: note = Description of Artificial Sequence: Synthetic coding sequence
  source 1..558: mol_type = other DNA
atggagacccaggccgacctggtgtcccaggagccccaggccctgctggacagcgccctgcccagcaaggtgcctgccttcagtgacaaggacagcctgggagatgagatgctggccgccgccctgctgaaggccaagagccaggagctggtgacctttgaagatgtggccgtgtacttcatcaggaaggagtggaagaggctggagcccgcccagagggacctgtacagagatgtgatgctggagaactatggaaatgtgttcagcctggaccgggagaccaggacagaaaatgaccaggagatcagcgaggacaccaggagccatggagtgctgctgggccgcttccagaaggacatcagccagggcctgaagttcaaggaggcctatgaaagagaggtgtccctgaagaggcccctgggcaacagccctggagagcggctgaacaggaagatgccagactttggccaggtgacagtggaggagaagctgaccccaagaggagagaggtctgagaagtacaatgactttggaaacagcttcaccgtgaacagctag

SEQ ID NO: 176712 - DNA, 558 bp, synthetic construct; identical to SEQ ID NO: 176711
  misc_feature 1..558: note = Description of Artificial Sequence: Synthetic coding sequence
  source 1..558: mol_type = other DNA

SEQ ID NO: 176713 - DNA, 1509 bp, synthetic construct
  misc_feature 1..1509: note = Description of Artificial Sequence: Synthetic coding sequence
  source 1..1509: mol_type = other DNA
atgggcacagagaacaaggaggtgatccccaaggaggagatcagcgaggagagcgagccccacggcagcctgctggagaagttccccaaggtggtgtaccagggccacgagtttggagctggctgtgaggaggacatgctggagggccacagccgggagagcatggaggaggtgattgagcagatgagcccccaggagcgggacttccccagcggcctgatgatcttcaagaagagccccagcagcgagaaggacagagaaaataatgaaagtgagcggggctgcagccccagccccaacctggtgacccaccagggcgacaccacagaaggagtgtctgcctttgccaccagcggccagaacttcctggagatcctggagagcaacaagacccagaggagctctgtgggggagaagccccacacctgcaaggaatgtgggaaggccttcaaccagaacagccacctgatccagcacatgagggtgcacagcggggagaagccctttgagtgcaaggaatgtgggaagaccttcggcaccaacagcagcctgcggcggcacctgcgcatccacgccggggagaagccctttgcctgcaatgaatgtgggaaggccttcatccagagcagccacctgatccaccaccaccgcatccacactggagagcggccctacaagtgtgaagaatgtgggaaggccttcagccagaacagcgccctgatcctgcaccagaggatccacactggagagaagccctatgagtgcaatgaatgtgggaagaccttccgggtgagcagccagctgatccagcaccagaggatccacacagaggagcgctaccacgagtgcaatgaatgtgggaaggccttcaagcacagcagcggcctcatccgccaccagaagatccacactggagagaagccctacctgtgcaatgaatgtgggaagggcttcggccagagcagcgagctgatccgccaccagaggatccacactggagacaagccctatgagtgcaatgaatgtgggaagaccttcggccagaacagcgagatcatccgccacatccgcatccacactggagagaagccctacgtgtgcaaggaatgtgggaaggccttccggggcaacagcgagctgctgcggcatgagcgcatccacactggagagaagccctatgagtgctttgaatgtgggaaggccttccggaggaccagccacctgattgtgcaccagaggatccacactggagagaagccccaccagtgcaatgaatgtgcccggaccttctgggacaacagcgagctgctgctgcaccagaagatccacatcggggagaagccctatgagtgcagtgaatgtgagaagaccttcagccagcacagccagctgatcatccaccagaggatccacactggagagaagccctatgagtgccaggagtgccagaagaccttcagccgcagcagccacctgctgcggcaccagagcgtgcactgcatggagtag

SEQ ID NO: 176714 - DNA, 1815 bp, synthetic construct
  misc_feature 1..1815: note = Description of Artificial Sequence: Synthetic coding sequence
  source 1..1815: mol_type = other DNA
atgatgaagagccagggcctggtgtccttcaaggatgtggccgtggacttcacccaggaggagtggcagcagctggaccccagccagaggaccctgtacagagatgtgatgctggagaactacagccacctggtgtccatgggctaccctgtgtccaagccagatgtgatcagcaagctggagcagggcgaggagccctggatcatcaagggggacatcagcaactggatctacccagatgagtaccaggctgatggccggcaggacaggaagagcaacctgcacaacagccagagctgcatcctgggcaccgtgtccttccaccacaagatcctgaagggcgtgaccagagatggcagcctgtgcagcatcctgaaggtgtgccagggagatggccagctgcagcgcttcctggagaaccaggacaagctgttccggcaggtgacctttgtgaacagcaagacagtgacagaggccagcggccacaagtacaaccccctgggcaagatcttccaggagtgcattgaaacagacatcagcatccagcgcttccacaagtatgatgccttcaagaagaacctgaagcccaacatcgacctgcccagctgctacaagagcaacagcaggaagaagccagaccagagctttggaggcggcaagagcagcagccagagcgagcccaacagcaacctggagaagatccacaacggggtcatcccctttgatgacaaccagtgtggaaatgtgttcaggaacacccagagcctcatccagtaccagaatgtggagaccaaggagaagagctgtgtgtgtgtgacctgtgggaaggcctttgccaagaagagccagctgattgtgcaccagaggatccacacaggcaagaagccctatgactgtggggcctgtgggaaggccttcagcgagaagttccacctggtggtgcaccagaggacccacactggagagaagccctatgactgcagtgaatgtgggaaggccttcagccagaagagcagcctcatcatccaccagagggtgcacactggagagaagccctatgagtgcagtgaatgtgggaaggccttcagccagaagagccccctcatcatccaccagaggatccacactggagagaagccctatgagtgcagagaatgtgggaaggccttcagccagaagagccagctgatcatccaccaccgggcccacactggagagaagccctatgagtgcacagaatgtgggaaggccttctgtgagaagagccacctgatcatccacaagaggatccacactggagagaagccctacaagtgtgcccagtgtgaggaggccttcagcaggaagacagagctgatcacccaccagctggtgcacactggagagaagccctatgagtgcacagaatgtgggaagaccttcagcaggaagagccagctgatcatccaccagaggacccacactggagagaagccctacaagtgcagtgaatgtgggaaggccttctgccagaagagccacctgattggccaccagaggatccacactggagagaagccctacatctgcacagaatgtgggaaggccttcagccagaagagccacctgcccggccaccagaggatccacactggagagaagccctacatctgtgctgaatgtgggaaggccttcagccagaagagtgacctggtgctgcaccagaggatccacactggagagcggccctaccagtgtgccatctgtgggaaggccttcatccagaagagccagctgactgtgcaccagaggatccacacagtggtgaagagctag

SEQ ID NO: 176715 - DNA, 1815 bp, synthetic construct
  misc_feature 1..1815: note = Description of Artificial Sequence: Synthetic coding sequence
  source 1..1815: mol_type = other DNA
atgatgaagagccagggcctggtgtccttcaaggatgtggccgtggacttcacccaggaggagtggcagcagctggaccccagccagaggaccctgtacagagatgtgatgctggagaactacagccacctggtgtccatgggctaccctgtgtccaagccagatgtgatcagcaagctggagcagggcgaggagccctggatcatcaagggggacatcagcaactggatctacccagatgagtaccaggctgatggccggcagggcaagaagagcaacctgcacaacagccagagctgcatcctgggcaccgtgtccttccaccacaagatcctgaagggcgtgaccagagatggcagcctgtgcagcatcctgaaggtgtgccagggagatggccagctgcagcgcttcctggagaaccaggacaagctgttccggcaggtgacctttgtgaacagcaagacagtgacagaggccagcggccacaagtacaaccccctgggcaagatcttccaggagtgcattgaaacagacatcagcatccagcgcttccacaagtatgatgccttcaagaagaacctgaagcccaacatcgacctgcccagctgctacaagagcaacagcaggaagaagccagaccagagctttggaggcggcaagagcagcagccagagcgagcccaacagcaacctggagaagatccacaacggggtcatcccctttgatgacaaccagtgtggaaatgtgttcaggaacacccagagcctcatccagtaccagaatgtggagaccaaggagaagagctgtgtgtgtgtgacctgtgggaaggcctttgccaagaagagccagctgattgtgcaccagaggatccacacaggcaagaagccctatgactgtggggcctgtgggaaggccttcagcgagaagttccacctggtggtgcaccagaggacccacactggagagaagccctatgactgcagtgaatgtgggaaggccttcagccagaagagcagcctcatcatccaccagagggtgcacactggagagaagccctatgagtgcagtgaatgtgggaaggccttcagccagaagagccccctcatcatccaccagaggatccacactggagagaagccctatgagtgcagagaatgtgggaaggccttcagccagaagagccagctgatcatccaccaccgggcccacactggagagaagccctatgagtgcacagaatgtgggaaggccttctgtgagaagagccacctgatcatccacaagaggatccacactggagagaagccctacaagtgtgcccagtgtgaggaggccttcagcaggaagacagagctgatcacccaccagctggtgcacactggagagaagccctatgagtgcacagaatgtgggaagaccttcagcaggaagagccagctgatcatccaccagaggacccacactggagagaagccctacaagtgcagtgaatgtgggaaggccttctgccagaagagccacctgattggccaccagaggatccacactggagagaagccctacatctgcacagaatgtgggaaggccttcagccagaagagccacctgcccggccaccagaggatccacactggagagaagccctacatctgtgctgaatgtgggaaggccttcagccagaagagtgacctggtgctgcaccagaggatccacactggagagcggccctaccagtgtgccatctgtgggaaggccttcatccagaagagccagctgactgtgcaccagaggatccacacagtggtgaagagctag

SEQ ID NO: 176716 - DNA, 1707 bp, synthetic construct
  misc_feature 1..1707: note = Description of Artificial Sequence: Synthetic coding sequence
  source 1..1707: mol_type = other DNA
atgctggagaactacagccacctggtgtccatgggctaccctgtgtccaagccagatgtgatcagcaagctggagcagggcgaggagccctggatcatcaagggggacatcagcaactggatctacccagatgagtaccaggctgatggccggcaggacaggaagagcaacctgcacaacagccagagctgcatcctgggcaccgtgtccttccaccacaagatcctgaagggcgtgaccagagatggcagcctgtgcagcatcctgaaggtgtgccagggagatggccagctgcagcgcttcctggagaaccaggacaagctgttccggcaggtgacctttgtgaacagcaagacagtgacagaggccagcggccacaagtacaaccccctgggcaagatcttccaggagtgcattgaaacagacatcagcatccagcgcttccacaagtatgatgccttcaagaagaacctgaagcccaacatcgacctgcccagctgctacaagagcaacagcaggaagaagccagaccagagctttggaggcggcaagagcagcagccagagcgagcccaacagcaacctggagaagatccacaacggggtcatcccctttgatgacaaccagtgtggaaatgtgttcaggaacacccagagcctcatccagtaccagaatgtggagaccaaggagaagagctgtgtgtgtgtgacctgtgggaaggcctttgccaagaagagccagctgattgtgcaccagaggatccacacaggcaagaagccctatgactgtggggcctgtgggaaggccttcagcgagaagttccacctggtggtgcaccagaggacccacactggagagaagccctatgactgcagtgaatgtgggaaggccttcagccagaagagcagcctcatcatccaccagagggtgcacactggagagaagccctatgagtgcagtgaatgtgggaaggccttcagccagaagagccccctcatcatccaccagaggatccacactggagagaagccctatgagtgcagagaatgtgggaaggccttcagccagaagagccagctgatcatccaccaccgggcccacactggagagaagccctatgagtgcacagaatgtgggaaggccttctgtgagaagagccacctgatcatccacaagaggatccacactggagagaagccctacaagtgtgcccagtgtgaggaggccttcagcaggaagacagagctgatcacccaccagctggtgcacactggagagaagccctatgagtgcacagaatgtgggaagaccttcagcaggaagagccagctgatcatccaccagaggacccacactggagagaagccctacaagtgcagtgaatgtgggaaggccttctgccagaagagccacctgattggccaccagaggatccacactggagagaagccctacatctgcacagaatgtgggaaggccttcagccagaagagccacctgcccggccaccagaggatccacactggagagaagccctacatctgtgctgaatgtgggaaggccttcagccagaagagtgacctggtgctgcaccagaggatccacactggagagcggccctaccagtgtgccatctgtgggaaggccttcatccagaagagccagctgactgtgcaccagaggatccacacagtggtgaagagctag

SEQ ID NO: 176717 - DNA, 1863 bp, synthetic construct
  misc_feature 1..1863: note = Description of Artificial Sequence: Synthetic coding sequence
  source 1..1863: mol_type = other DNA
atggtgcctgctgagaccagcagcagcggcctgctggaggagcagaagatgatgaagagccagggcctggtgtccttcaaggatgtggccgtggacttcacccaggaggagtggcagcagctggaccccagccagaggaccctgtacagagatgtgatgctggagaactacagccacctggtgtccatgggctaccctgtgtccaagccagatgtgatcagcaagctggagcagggcgaggagccctggatcatcaagggggacatcagcaactggatctacccagatgagtaccaggctgatggccggcaggacaggaagagcaacctgcacaacagccagagctgcatcctgggcaccgtgtccttccaccacaagatcctgaagggcgtgaccagagatggcagcctgtgcagcatcctgaaggtgtgccagggagatggccagctgcagcgcttcctggagaaccaggacaagctgttccggcaggtgacctttgtgaacagcaagacagtgacagaggccagcggccacaagtacaaccccctgggcaagatcttccaggagtgcattgaaacagacatcagcatccagcgcttccacaagtatgatgccttcaagaagaacctgaagcccaacatcgacctgcccagctgctacaagagcaacagcaggaagaagccagaccagagctttggaggcggcaagagcagcagccagagcgagcccaacagcaacctggagaagatccacaacggggtcatcccctttgatgacaaccagtgtggaaatgtgttcaggaacacccagagcctcatccagtaccagaatgtggagaccaaggagaagagctgtgtgtgtgtgacctgtgggaaggcctttgccaagaagagccagctgattgtgcaccagaggatccacacaggcaagaagccctatgactgtggggcctgtgggaaggccttcagcgagaagttccacctggtggtgcaccagaggacccacactggagagaagccctatgactgcagtgaatgtgggaaggccttcagccagaagagcagcctcatcatccaccagagggtgcacactggagagaagccctatgagtgcagtgaatgtgggaaggccttcagccagaagagccccctcatcatccaccagaggatccacactggagagaagccctatgagtgcagagaatgtgggaaggccttcagccagaagagccagctgatcatccaccaccgggcccacactggagagaagccctatgagtgcacagaatgtgggaaggccttctgtgagaagagccacctgatcatccacaagaggatccacactggagagaagccctacaagtgtgcccagtgtgaggaggccttcagcaggaagacagagctgatcacccaccagctggtgcacactggagagaagccctatgagtgcacagaatgtgggaagaccttcagcaggaagagccagctgatcatccaccagaggacccacactggagagaagccctacaagtgcagtgaatgtgggaaggccttctgccagaagagccacctgattggccaccagaggatccacactggagagaagccctacatctgcacagaatgtgggaaggccttcagccagaagagccacctgcccggccaccagaggatccacactggagagaagccctacatctgtgctgaatgtgggaaggccttcagccagaagagtgacctggtgctgcaccagaggatccacactggagagcggccctaccagtgtgccatctgtgggaaggccttcatccagaagagccagctgactgtgcaccagaggatccacacagtggtgaagagctag

SEQ ID NO: 176718 - DNA, 1980 bp, synthetic construct
  misc_feature 1..1980: note = Description of Artificial Sequence: Synthetic coding sequence
  source 1..1980: mol_type = other DNA
atggctgctgctgtgctgatggacagagtgcagagctgtgtgacctttgaagatgtgtttgtgtacttcagccgggaggagtgggagctgctggaggaggcccagcgcttcctgtacagagatgtgatgctggagaactttgccctggtggccaccctgggcttctggtgtgaggccgagcacgaggcccccagcgagcagagcgtgtctgtggagggcgtgtcccaggtgaggacagctgagagcggcctcttccagaaggcccacccctgtgagatgtgtgaccccctgctgaaggacatcctgcacctggccgagcaccagggcagccacctgacccagaagctgtgcacccggggcctgtgcagaagacgcttctccttcagcgccaacttctaccagcaccagaagcagcacaacggggagaactgcttcagaggagatgatggaggagccagctttgtgaagagctgcaccgtgcacatgctgggccgctccttcacctgccgggaggagggcatggacctgcctgacagcagcggcctcttccagcaccagaccacctacaacagagtgagcccctgcagaagaacagagtgcatggagagcttcccccacagcagcagcctgcggcagcaccagggcgactatgatggccagatgctgttcagctgtggagatgagggcaaggccttcctggacaccttcaccctgctggacagccagatgacccacgccgaggtgcggcccttccgctgcctgccctgtggaaatgtgttcaaggagaagagcgccctgatcaaccacaggaagatccacagcggggagatcagccacgtgtgcaaggaatgtgggaaggccttcatccacctgcaccacctgaagatgcaccagaagttccacacaggcaagaggcactacacctgcagtgaatgtgggaaggccttcagcaggaaggacaccctggtgcagcaccagagggtgcacactggagagaggagctatgactgcagtgaatgtgggaaggcctacagccgcagcagccacctggtgcagcaccagaggatccacactggagagcggccctacaagtgcaacaagtgtgggaaggccttcagcaggaaggacaccctggtgcagcaccagcgcttccacactggagagcggccctatgagtgcagtgaatgtgggaagttcttcagccagagcagccacctgattgagcactggaggatccacactggagcccggccctatgagtgcattgaatgtgggaagttcttcagccacaacagcagcctcatcaagcaccggcgggtgcacactggagcccggagctatgtgtgcagcaaatgtgggaaggccttcggctgcaaggacaccctggtgcagcaccagatcatccacactggagcccggccctatgagtgcagtgaatgtgggaaggccttcagcaggaaggacaccctggtgcagcaccagaagatccacactggagagcggccctatgaatgtggagaatgtgggaagttcttcagccacagcagcaacctgattgtgcaccagaggatccacactggagccaagccctatgagtgcaatgaatgtgggaagtgcttcagccacaacagcagcctcatcctgcaccagagggtgcacactggagcccggccctacgtgtgcagtgaatgtgggaaggcctacatcagcagcagccacctggtgcagcacaagaaggtgcacactggagcccggccctatgagtgcagtgaatgtgggaagttcttcagcaggaacagcggcctcatcctgcaccagagggtgcacactggagagaagccctacgtgtgcagtgaatgtgggaaggcctacagccgcagcagccacctggtgcgccaccagaaggcccacactggagagcgggcccacgagtgcaacagctttggaggccccctggccgccagcctgaagctggtgtag

SEQ ID NO: 176719 - DNA, 1980 bp, synthetic construct; identical to SEQ ID NO: 176718
  misc_feature 1..1980: note = Description of Artificial Sequence: Synthetic coding sequence
  source 1..1980: mol_type = other DNA

SEQ ID NO: 176720 - DNA, 2121 bp, synthetic construct
  misc_feature 1..2121: note = Description of Artificial Sequence: Synthetic coding sequence
  source 1..2121: mol_type = other DNA
atggctgctgctgtgctgatggacagagtgcagagctgtgtgacctttgaagatgtgtttgtgtacttcagccgggaggagtgggagctgctggaggaggcccagcgcttcctgtacagagatgtgatgctggagaactttgccctggtggccaccctggccttcatcttccctgtgccctgcagctgtgctgtgggcggcggcaggaagccctgggtgcctgacagagctgacatcacagctgccaccgtgaaggagacctaccggggccacggccctgctgagtgggagctggaggagggcttctggtgtgaggccgagcacgaggcccccagcgagcagagcgtgtctgtggagggcgtgtcccaggtgaggacagctgagagcggcctcttccagaaggcccacccctgtgagatgtgtgaccccctgctgaaggacatcctgcacctggccgagcaccagggcagccacctgacccagaagctgtgcacccggggcctgtgcagaagacgcttctccttcagcgccaacttctaccagcaccagaagcagcacaatggagagaactgcttcagaggagatgatggaggagccagctttgtgaagagctgcaccgtgcacatgctgggccgctccttcacctgccgggaggagggcatggacctgcctgacagcagcggcctcttccagcaccagaccacctacaacagagtgagcccctgcagaagaacagagtgcatggagagcttcccccacagcagcagcctgcggcagcaccagggcgactatgatggccagatgctgttcagctgtggagatgagggcaaggccttcctggacaccttcaccctgctggacagccagatgacccatgctgaggtgcggcccttccgctgcctgccctgtggaaatgtgttcaaggagaagagcgccctgatcaaccacaggaagatccacagcggggagatcagccacgtgtgcaaggaatgtgggaaggccttcatccacctgcaccacctgaagatgcaccagaagttccacacaggcaagaggcactacacctgcagtgaatgtgggaaggccttcagcaggaaggacaccctggtgcagcaccagagggtgcacactggagagaggagctatgactgcagtgaatgtgggaaggcctacagccgcagcagccacctggtgcagcaccagaggatccacactggagagcggccctacaagtgcaacaagtgtgggaaggccttcagcaggaaggacaccctggtgcagcaccagcgcttccacactggagagcggccctatgaatgttctgaatgtgggaagttcttcagccagagcagccacctgattgagcactggaggatccacactggagcccggccctatgaatgtattgaatgtgggaagttcttcagccacaacagcagcctcatcaagcacagaagagtgcacactggagcccggagctatgtgtgcagcaaatgtgggaaggccttcggctgcaaggacaccctggtgcagcaccagatcatccacactggagcccggccctatgaatgttctgaatgtgggaaggccttcagcaggaaggacaccctggtgcagcaccagaagatccacactggagagcggccctatgaatgtggggagtgtgggaagttcttcagccacagcagcaacctgattgtgcaccagaggatccacactggagccaagccctatgaatgtaatgaatgtgggaagtgcttcagccacaacagcagcctcatcctgcaccagagggtgcacactggagcccggccctacgtgtgcagtgaatgtgggaaggcctacatcagcagcagccacctggtgcagcacaagaaggtgcacactggagcccggccctatgaatgttctgaatgtgggaagttcttcagcagaaattctggcctcatcctgcaccagagggtgcacactggagagaagccctacgtgtgcagtgaatgtgggaaggcctacagccgcagcagccacctggtgcgccaccagaaggcccacactggagagcgggcccacgagtgcaacagctttggaggccccctggccgccagcctgaagctggtgtag

SEQ ID NO: 176721 - DNA, 1788 bp, synthetic construct
  misc_feature 1..1788: note = Description of Artificial Sequence: Synthetic coding sequence
  source 1..1788: mol_type = other DNA
atggccgccctgagccccacctttgccaccagcacccaggacagcacctgcctgcaggacagcgagttccctgtgagcagcaaggaccacagctgcccccagaacctggacctgtttgtgtgcagcggcctggagccccacacccccagcgtgggcagccaggagagcgtgaccttccaggatgtggccgtggacttcacagagaaggagtggcccctgctggacagcagccagaggaagctgtacaaggatgtgatgctggagaactacagcaacctgaccagcctgggctaccaggtgggcaagcccagcctcatcagccacctggagcaggaggaggagcccaggacagaggagcggggggcccaccagggcgcctgtgccgactgggagacccccagcaagaccaagtggagcctgctgatggaggacatctttgggaaggagacccccagcggcgtgaccatggagagagctggcctgggggagaagagcacagaatatgcccacctgtttgaggtgtttggcatggacccccacctgacccagcccatgggcagacatgctgggaagaggccctaccaccggcgggactatggagtggccttcaagggccggccccacctgacccagcacatgtccatgtatgatggcaggaagatgcatgagtgccaccagtgccagaaggccttcaccaccagcgccagcctgaccaggcaccggcgcatccacactggagagaagccctatgaatgtagtgactgtgggaaggccttcaatgaccccagcgccctgcggagccacgcccggacccacctgaaggagaagccctttgactgcagccagtgtggaaatgccttccgcaccctgagcgccctgaagatccacatgagggtgcacactggagagcggccctacaagtgtgaccagtgtgggaaggcctacggccgcagctgccacctgattgcccacaagaggacccacactggagagcggccctatgaatgtcatgactgtgggaaggccttccagcaccccagccacctgaaggagcacgtgaggaaccacactggagagaagccctatgcctgcacccagtgtgggaaggccttccgctggaagagcaacttcaacctgcacaagaagaaccacatggtggagaagacctatgagtgcaaggaatgtgggaagagctttggagacctggtgtccaggaggaagcacatgaggatccacatcgtgaagaagcctgtggagtgccggcagtgtgggaagaccttcaggaaccagagcatcctgaagacccacatgaacagccacactggagagaagccctacggctgtgacctgtgtgggaaggccttcagcgccagcagcaacctgacagcccacaggaagatccacacccaggagcggcgctatgaatgtgccgcctgtgggaaggtgtttggagactacctgagcagaagaagacacatgtctgtgcacctggtgaagaagagggtggagtgccggcagtgtgggaaggccttcaggaaccagagcaccctgaagacccacatgaggagccacactggagagaagccctatgaatgtgaccactgcggcaaggccttcagcatcggcagcaacctgaatgtgcaccggcgcatccacactggagagaagccctatgaatgtctggtgtgtgggaaggccttcagtgaccacagcagcctgcggagccacgtgaagacccacagaggagagaagctgtttgtgtcctctgtgtggaagaggctgcagtag

SEQ ID NO: 176722 - DNA, 1692 bp, synthetic construct
  misc_feature 1..1692: note = Description of Artificial Sequence: Synthetic coding sequence
  source 1..1692: mol_type = other DNA
atggccgccctgagccccacctttgccaccagcacccaggacagcacctgcctgcaggacagcgagttccctgtgagcagcaaggaccacagctgcccccagaacctggacctgtttgtgtgcagcggcctggagccccacacccccagcgtgggcagccaggagagcgtgaccttccaggatgtggccgtggacttcacagagaaggagtggcccctgctggacagcagccagaggaagctgtacaaggatgtgatgctggagaactacagcaacctgaccagcctggactgggagacccccagcaagaccaagtggagcctgctgatggaggacatctttgggaaggagacccccagcggcgtgaccatggagagagctggcctgggggagaagagcacagaatatgcccacctgtttgaggtgtttggcatggacccccacctgacccagcccatgggcagacatgctgggaagaggccctaccaccggcgggactatggagtggccttcaagggccggccccacctgacccagcacatgtccatgtatgatggcaggaagatgcatgagtgccaccagtgccagaaggccttcaccaccagcgccagcctgaccaggcaccggcgcatccacactggagagaagccctatgaatgtagtgactgtgggaaggccttcaatgaccccagcgccctgcggagccacgcccggacccacctgaaggagaagccctttgactgcagccagtgtggaaatgccttccgcaccctgagcgccctgaagatccacatgagggtgcacactggagagcggccctacaagtgtgaccagtgtgggaaggcctacggccgcagctgccacctgattgcccacaagaggacccacactggagagcggccctatgaatgtcatgactgtgggaaggccttccagcaccccagccacctgaaggagcacgtgaggaaccacactggagagaagccctatgcctgcacccagtgtgggaaggccttccgctggaagagcaacttcaacctgcacaagaagaaccacatggtggagaagacctatgagtgcaaggaatgtgggaagagctttggagacctggtgtccaggaggaagcacatgaggatccacatcgtgaagaagcctgtggagtgccggcagtgtgggaagaccttcaggaaccagagcatcctgaagacccacatgaacagccacactggagagaagccctacggctgtgacctgtgtgggaaggccttcagcgccagcagcaacctgacagcccacaggaagatccacacccaggagcggcgctatgaatgtgccgcctgtgggaaggtgtttggagactacctgagcagaagaagacacatgtctgtgcacctggtgaagaagagggtggagtgccggcagtgtgggaaggccttcaggaaccagagcaccctgaagacccacatgaggagccacactggagagaagccctatgaatgtgaccactgcggcaaggccttcagcatcggcagcaacctgaatgtgcaccggcgcatccacactggagagaagccctatgaatgtctggtgtgtgggaaggccttcagtgaccacagcagcctgcggagccacgtgaagacccacagaggagagaagctgtttgtgtcctctgtgtggaagaggctgcagtag

SEQ ID NO: 176723 - DNA, 369 bp, synthetic construct
  misc_feature 1..369: note = Description of Artificial Sequence: Synthetic coding sequence
  source 1..369: mol_type = other DNA
atgaacttcagcagccacagaagaaggctgcccagcccccccctgcccaggagctacagccagagcagcaccagcacccaggacagcacctgcctgcaggacagcgagttccctgtgagcagcaaggaccacagctgcccccagaacctggacctgtttgtgtgcagcggcctggagccccacacccccagcgtgggcagccaggagagcgtgaccttccaggatgtggccgtggacttcacagagaaggagtggcccctgctggacagcagccagaggaagctgtacaaggatgtgatgctggagaactacagcaacctgaccagcctgggcaaggccagcgccatcagccccctcatccacccctag

SEQ ID NO: 176724 - DNA, 822 bp, synthetic construct
  misc_feature 1..822: note = Description of Artificial Sequence: Synthetic coding sequence
  source 1..822: mol_type = other DNA
atgtttggcttccccacagccaccctgctggactgccacggccgctatgcccagaatgtggccttcttcaacgtgatgacagaggcccaccacaagtatgaccacagcgaggccaccggcagcagctcctgggacatccagaacagcttcagaagagagaagctggagcagaagagcccagacagcaagaccctgcaggaggacagccctggggtgcggcagagggtgtatgagtgccaggagtgtgggaagagcttccggcagaagggcagcctgaccctgcacgagcgcatccacacaggccagaagccctttgagtgcacccactgtgggaagagcttccgggccaagggcaacctggtgacccaccagaggatccacactggagagaagccctaccagtgcaaggaatgtgggaagagcttcagccagaggggcagcctggccgtgcatgagcggctgcacacaggccagaagccctatgaatgtgccatctgccagaggagcttcaggaaccagagcaacctggccgtgcaccggcgggtgcacagcggggagaagccctaccgctgtgaccagtgtgggaaggccttcagccagaagggcagcctgattgtgcacatccgggtgcacacaggcctgaagccctatgcctgcacccagtgcaggaagagcttccacacccggggcaactgcatcctgcacggcaagatccacactggagagaccccctacctgtgtggccagtgtgggaagagcttcacccagaggggcagcctggccgtgcaccagaggagctgcagccagaggctgaccctgtag

SEQ ID NO: 176725 - DNA, 822 bp, synthetic construct; identical to SEQ ID NO: 176724
  misc_feature 1..822: note = Description of Artificial Sequence: Synthetic coding sequence
  source 1..822: mol_type = other DNA

SEQ ID NO: 176726 - DNA, 1530 bp, synthetic construct
  misc_feature 1..1530: note = Description of Artificial Sequence: Synthetic coding sequence
  source 1..1530: mol_type = other DNA
atggccctgagccagggcctgctgaccttcagagatgtggccatcgagttcagccaggaggagtggaagtgcctggaccctgcccagaggaccctgtacagagatgtgatgctggagaactacagaaacctggtgtccctggacatcagcagcaagtgcatgatgaacaccctgagcagcacaggccagggcaacacagaggtgatccacacaggcaccctgcagaggcaggccagctaccacatcggggccttctgcagccaggagattgagaaggacatccatgactttgtgttccagtggcaggaggatgagaccaatgaccacgaggcccccatgacagagatcaagaagctgaccagcagcacagacagatatgaccagagacatgctggcaacaagcccatcaagggccagctggagagccgcttccacctgcacctgcggcggcaccggcgcatccacactggagagaagccctacaagtgtgaagaatgtgagaaggtgttcagctgcaagagccacctggagatccaccgcatcatccacactggagagaagccctacaagtgcaaggtgtgtgacaaggccttcaagcatgacagccacctggccaagcacacccgcatccacagaggagacaagcactacacctgcaatgaatgtgggaaggtgtttgaccagaaggccaccctggcctgccaccacaggagccacactggagagaagccctacaagtgcaatgaatgtgggaagaccttcagccagaccagccacctggtgtaccaccaccggctgcacactggagagaagccctacaagtgcaatgaatgtgggaagacctttgccaggaacagcgtgctggtgatccacaaggctgtgcacacagctgagaagccctacaagtgcaatgaatgtgggaaggtgttcaagcagagggccaccctggccggccaccggcgggtgcacactggagagaagccctaccgctgtgaagaatgtgacaaggtgttcagcaggaagagccacctggagcggcaccggcgcatccacactggagagaagccctacaagtgcaaggtgtgtgacaaggccttcagaagtgacagccggctggccgagcaccagagggtgcacactggagagcggccctacacctgcaatgaatgtgggaaggtgttcagcaccaaggcctacctggcctgccaccagaagctgcacactggagagaagctgtatgaatgtgaagaatgtgacaaggtgtacatcaggaagagccacctggagcggcaccggcgcatccacactggagagaagccccacaagtgtggggactgtgggaaggccttcaacagccccagccacctgatccgccaccagaggatccacacaggccagaagagctacaagtgccaccagtgtgggaaggtgttcagcctgcggagcctgctggccgagcaccagaagatcccctttggagacaactgcttcaagtgcaatgagtacagcaagcccagcagcatcaactag

SEQ ID NO: 176727 - DNA, 1530 bp, synthetic construct; identical to SEQ ID NO: 176726
  misc_feature 1..1530: note = Description of Artificial Sequence: Synthetic coding sequence
  source 1..1530: mol_type = other DNA

SEQ ID NO: 176728 - DNA, 1209 bp, synthetic construct
  misc_feature 1..1209: note = Description of Artificial Sequence: Synthetic coding sequence
  source 1..1209: mol_type = other DNA
atgtacaccagcgaggagaagtgcaaccagaggacccagaagaggaagatctacaacgtgtgccccaggaagggcaagaagatcttcatccacatgcatgagatcatccagattgatggccacatctaccagtgcctggagtgcaagcagaacttctgtgagaacctggccctgatcatgtgtgagaggacccacactggagagaagccctacaagtgtgacatgtgtgagaagacctttgtgcagagcagtgacctgaccagccaccagaggatccacaactatgagaagccctacaagtgcagcaaatgtgagaagagcttctggcaccacctggccctgagcggccaccagaggacccacgccggcaagaagttctacacctgtgacatctgtgggaagaactttggccagagcagtgacctgctggtgcaccagaggagccacactggagagaagccctacctgtgcagtgaatgtgacaagtgcttcagccgcagcaccaacctgatccgccacaggaggacccacactggagagaagcccttcaagtgcctggagtgtgagaaggccttcagcggcaagagtgacctgatcagccaccagaggacccacactggagagcggccctacaagtgcaacaagtgtgagaagagctaccgccacaggtctgccttcatcgtgcacaagagggtgcacactggagagaagccctacaagtgtggggcctgtgagaagtgcttcggccagaagagtgacctgattgtgcaccagagggtgcacactggagagaagccctacaagtgcctggagtgcatgaggagcttcaccaggtctgccaacctgatccgccaccaggccacccacacccacaccttcaagtgcctggagtatgagaagagcttcaactgcagcagtgacctgattgtgcaccagaggatccacatggaggagaagccccaccagtggagcgcctgtgagagcggcttcctgctgggcatggactttgtggcccagcagaagatgaggacccagacagaggagctgcactacaagtacacagtgtgtgacaagagcttccaccagagcagcgccctgctgcagcaccagacagtgcacatcggggagaagccctttgtgtgcaatgtgtctgagaagggcctggagctgagccccccccacgccagcgaggccagccagatgtcctag

SEQ ID NO: 176729 - DNA, 1209 bp, synthetic construct; identical to SEQ ID NO: 176728
  misc_feature 1..1209: note = Description of Artificial Sequence: Synthetic coding sequence
  source 1..1209: mol_type = other DNA

SEQ ID NO: 176730 - DNA, 81 bp, synthetic construct
  misc_feature 1..81: note = Description of Artificial Sequence: Synthetic coding sequence
  source 1..81: mol_type = other DNA
atgtacaccagcgaggagaagtgcaaccagaggacccagaagaggaagatctacaacgtgtgccccaggaagggcaagtag

SEQ ID NO: 176731 - DNA, 1221 bp, synthetic construct
  misc_feature 1..1221: note = Description of Artificial Sequence: Synthetic coding sequence
  source 1..1221: mol_type = other DNA
atggccagcacagaggagcagtatgacctgaagatcgtgaaggtggaggaggaccccatctgggaccaggagacccacctgcggggcaacaacttcagcggccaggaggccagccggcagctgttccggcagttctgctaccaggagaccccaggcccccgggaggccctgagccggctgcgggagctgtgccaccagtggctgcggcctgagatccacaccaaggagcagatcctggagctgctggtgctggagcagttcctgaccatcctgcctgaggagctgcaggcctgggtgcgggagcaccaccctgagagcggggaggaggccgtggccgtggtggaggacctggagcaggagctgtctgagcccggcaaccaggccccagaccatgaacatggccacagcgaggtgctgctggaggatgtggagcacctgaaggtgaagcaggagcccacagacatccagctgcagcccatggtgacccagctgcgctatgagagcttctgcctgcaccagttccaggagcaggatggagagagcatccctgagaaccaggagctggccagcaagcaggagatcctgaaggagatggagcacctgggggacagcaagctgcagagagatgtgtccctggacagcaagtaccgggagacctgcaagagggacagcaaggccgagaagcagcaggcccacagcactggagagaggaggcaccgctgcaatgaatgtgggaagagcttcaccaagagctctgtgctgattgagcaccagaggatccacactggagagaagccctatgaatgtgaagaatgtgggaaggccttcagccgccgcagcagcctgaatgagcaccggcgcagccacactggagagaagccctaccagtgcaaggaatgtgggaaggccttcagcgccagcaatggcctgaccaggcaccggcgcatccacactggagagaagccctatgagtgcaaggtgtgtgggaaggccttcctgctgagcagctgcctggtgcagcaccagaggatccacactggagagaagcgctaccagtgcagagaatgtgggaaggccttcatccagaatgccggcctcttccagcacctgcgggtgcacactggagagaagccctaccagtgcagccagtgcagcaagctgttcagcaagaggaccctgctgaagaagcaccagaagatccacactggagagcggccctag

SEQ ID NO: 176732 - DNA, 1221 bp, synthetic construct; identical to SEQ ID NO: 176731
  misc_feature 1..1221: note = Description of Artificial Sequence: Synthetic coding sequence
  source 1..1221: mol_type = other DNA

SEQ ID NO: 176733 - DNA, 1221 bp, synthetic construct; identical to SEQ ID NO: 176731
  misc_feature 1..1221: note = Description of Artificial Sequence: Synthetic coding sequence
  source 1..1221: mol_type = other DNA

SEQ ID NO: 176734 - DNA, 324 bp, synthetic construct
  misc_feature 1..324: note = Description of Artificial Sequence: Synthetic coding sequence
  source 1..324: mol_type = other DNA
atggccagcacagaggagcagtatgacctgaagatcgtgaaggtggaggaggaccccatctgggaccaggagacccacctgcggggcaacaacttcagcggccaggaggccagccggcagctgttccggcagttctgctaccaggagaccccaggcccccgggaggccctgagccggctgcgggagctgtgccaccagtggctgcggcctgagatccacaccaaggagcagatcctggagctgctggtgctggagcagttcctgaccatcctgcctgaggagctgcaggcctgggtgcgggagcaccaccctgagagcggctag

SEQ ID NO: 176735 - DNA, 237 bp, synthetic construct
  misc_feature 1..237: note = Description of Artificial Sequence: Synthetic coding sequence
  source 1..237: mol_type = other DNA
atggccagcacagaggagcagtatgacctgaagatcgtgaaggtggaggaggaccccatctgggaccaggagacccacctgcggggcaacaacttcagcggccaggaggccagccggcagctgttccggcagttctgctaccaggagaccccaggcccccgggaggccctgagccggctgcgggagctgtgccaccagtggctgcggcctgagatccacaccaaggagcagatctag

SEQ ID NO: 176736 - DNA, 1221 bp, synthetic construct; identical to SEQ ID NO: 176731
  misc_feature 1..1221: note = Description of Artificial Sequence: Synthetic coding sequence
  source 1..1221: mol_type = other DNA

SEQ ID NO: 176737 - DNA, 54 bp, synthetic construct
  misc_feature 1..54: note = Description of Artificial Sequence: Synthetic coding sequence
  source 1..54: mol_type = other DNA
atggccagcacagaggagcagtatgacctgaagatcgtgaaggtggaggagtag

SEQ ID NO: 176738 - DNA, 468 bp, synthetic construct
  misc_feature 1..468: note = Description of Artificial Sequence: Synthetic coding sequence
  source 1..468: mol_type = other DNA
atggccagcacagaggagcagtatgacctgaagatcgtgaaggtggaggaggaccccatctgggaccaggagacccacctgcggggcaacaacttcagcggccaggaggccagccggcagctgttccggcagttctgctaccaggagaccccaggcccccgggaggccctgagccggctgcgggagctgtgccaccagtggctgcggcctgagatccacaccaaggagcagatcctggagctgctggtgctggagcagttcctgaccatcctgcctgaggagctgcaggcctgggtgcgggagcaccaccctgagagcggggaggaggccgtggccgtggtggaggacctggagcaggagctgtctgagcccggcaaccaggccccagaccatgaacatggccacagcgaggtgctgctggaggatgtggagcacctgaaggtgaagcaggagcccacagacatctag

SEQ ID NO: 176739 - DNA, 75 bp, synthetic construct
  misc_feature 1..75: note = Description of Artificial Sequence: Synthetic coding sequence
  source 1..75: mol_type = other DNA
atggccagcacagaggagcagtatgacctgaagatcgtgaaggtggaggaggaccccatctgggaccaggagtag

SEQ ID NO: 176740 - DNA, 312 bp, synthetic construct
  misc_feature 1..312: note = Description of Artificial Sequence: Synthetic coding sequence
  source 1..312: mol_type = other DNA
atggccagcacagaggagcagtatgacctgaagatcgtgaaggtggaggaggaccccatctgggaccaggagacccacctgcggggcaacaacttcagcggccaggaggccagccggcagctgttccggcagttctgctaccaggagaccccaggcccccgggaggccctgagccggctgcgggagctgtgccaccagtggctgcggcctgagatccacaccaaggagcagatcctggagctgctggtgctggagcagttcctgaccatcctgcctgaggagctgcaggcctgggtgcgggagcaccactag

SEQ ID NO: 176741 - DNA, 447 bp, synthetic construct
  misc_feature 1..447: note = Description of Artificial Sequence: Synthetic coding sequence
  source 1..447: mol_type = other DNA
atggccagcacagaggagcagtatgacctgaagatcgtgaaggtggaggaggaccccatctgggaccaggagacccacctgcggggcaacaacttcagcggccaggaggccagccggcagctgttccggcagttctgctaccaggagaccccaggcccccgggaggccctgagccggctgcgggagctgtgccaccagtggctgcggcctgagatccacaccaaggagcagatcctggagctgctggtgctggagcagttcctgaccatcctgcctgaggagctgcaggcctgggtgcgggagcaccaccctgagagcggggaggaggccgtggccgtggtggaggacctggagcaggagctgtctgagcccggcaaccaggccccagaccatgaacatggccacagcgaggtgctgctggaggatgtggagcacctgaaggtgtag

SEQ ID NO: 176742 - DNA, 654 bp, synthetic construct
  misc_feature 1..654: note = Description of Artificial Sequence: Synthetic coding sequence
  source 1..654: mol_type = other DNA
atggccagcacagaggagcagtatgacctgaagatcgtgaaggtggaggaggaccccatctgggaccaggagacccacctgcggggcaacaacttcagcggccaggaggccagccggcagctgttccggcagttctgctaccaggagaccccaggcccccgggaggccctgagccggctgcgggagctgtgccaccagtggctgcggcctgagatccacaccaaggagcagatcctggagctgctggtgctggagcagttcctgaccatcctgcctgaggagctgcaggcctgggtgcgggagcaccaccctgagagcggggaggaggccgtggccgtggtggaggacctggagcaggagctgtctgagcccggcaaccaggccccagaccatgaacatggccacagcgaggtgctgctggaggatgtggagcacctgaaggtgaagcaggagcccacagacatccagctgcagcccatggtgacccagctgcgctatgagagcttctgcctgcaccagttccaggagcaggatggagagagcatccctgagaaccaggagctggccagcaagcaggagatcctgaaggagatggagcacctgggggacagcaagctgcagagagatgtgtccctggacagcaagtacagatag

SEQ ID NO: 176743 - DNA, 963 bp, synthetic construct
  misc_feature 1..963: note = Description of Artificial Sequence: Synthetic coding sequence
  source 1..963: mol_type = other DNA
atgcccaagaagaagacaggagccaggaagaaggcagaaaatagaagagagcgggagaagcagctgcgggccagccgcagcaccatcgacctggccaagcacccctgcaatgcctccatggagtgtgacaagtgccagaggcggcagaagaacagagccttctgctacttctgcaacagcgtgcagaagctgcccatctgtgcccagtgtgggaagaccaagtgcatgatgaagagcagtgactgtgtgatcaagcatgctggggtgtacagcacaggcctggccatggtgggcgccatctgtgacttctgtgaggcctgggtgtgccacggcaggaagtgcctgagcacccacgcctgtgcctgccccctgacagatgctgaatgtgtggagtgtgagcggggcgtgtgggaccatggaggccgcatcttcagctgcagcttctgccacaacttcctgtgtgaagatgaccagtttgagcaccaggccagctgccaggtgctggaggccgagaccttcaagtgtgtgtcctgcaaccggctgggccagcacagctgcctgcgctgcaaggcctgcttctgtgatgaccacaccaggagcaaggtgttcaagcaggagaagggcaagcagcccccctgccccaagtgtggccacgagacccaggagaccaaggacctgtccatgagcaccaggagcctgaagtttggccggcagacaggaggagaggagggagatggagccagcggctatgatgcctactggaagaacctgagcagtgacaagtacggggacaccagctaccatgatgaggaggaggatgaatatgaagcagaagatgatgaggaggaggaggatgagggcaggaaggacagcgacacagagagcagtgacctcttcaccaacctgaacctgggccgcacctacgccagcggctacgcccactatgaggagcaggagaactag

SEQ ID NO: 176744 - DNA, 783 bp, synthetic construct
  misc_feature 1..783: note = Description of Artificial Sequence: Synthetic coding sequence
  source 1..783: mol_type = other DNA
atgccccagtggaatgtgacctctgtgcggggcaagaccaagtgcatgatgaagagcagtgactgtgtgatcaagcatgctggggtgtacagcacaggcctggccatggtgggcgccatctgtgacttctgtgaggcctgggtgtgccacggcaggaagtgcctgagcacccacgcctgtgcctgccccctgacagatgctgaatgtgtggagtgtgagcggggcgtgtgggaccatggaggccgcatcttcagctgcagcttctgccacaacttcctgtgtgaagatgaccagtttgagcaccaggccagctgccaggtgctggaggccgagaccttcaagtgtgtgtcctgcaaccggctgggccagcacagctgcctgcgctgcaaggcctgcttctgtgatgaccacaccaggagcaaggtgttcaagcaggagaagggcaagcagcccccctgccccaagtgtggccacgagacccaggagaccaaggacctgtccatgagcaccaggagcctgaagtttggccggcagacaggaggagaggagggagatggagccagcggctatgatgcctactggaagaacctgagcagtgacaagtacggggacaccagctaccatgatgaggaggaggatgaatatgaagcagaagatgatgaggaggaggaggatgagggcaggaaggacagcgacacagagagcagtgacctcttcaccaacctgaacctgggccgcacctacgccagcggctacgcccactatgaggagcaggagaactag

SEQ ID NO: 176745 - DNA, 423 bp, synthetic construct
  misc_feature 1..423: note = Description of Artificial Sequence: Synthetic coding sequence
  source 1..423: mol_type = other DNA
atgcccaagaagaagacaggagccaggaagaaggcagaaaatagaagagagcgggagaagcagctgcgggccagccgcagcaccatcgacctggccaagcacccctgcaatgcctccatggagtgtgacaagtgccagaggcggcagaagaacagagccttctgctacttctgcaacagcgtgcagaagctgcccatctgtgcccagtgtgggaagaccaagtgcatgatgaagagcagtgactgtgtgatcaagcatgctggggtgtacagcacaggcctggccatggtgggcgccatctgtgacttctgtgaggcctgggtgtgccacggcaggaagtgcctgagcacccacgcctgtgcctgccccctgacagatgctgaatgtgtggagtgtgagcggggcgtgtgggaccatggatag

SEQ ID NO: 176746 - DNA, 462 bp, synthetic construct
  misc_feature 1..462: note = Description of Artificial Sequence: Synthetic coding sequence
  source 1..462: mol_type = other DNA
atgcccaagaagaagacaggagccaggaagaaggcagaaaatagaagagagcgggagaagcagctgcgggccagccgcagcaccatcgacctggccaagcacccctgcaatgcctccatggagtgtgacaagtgccagaggcggcagaagaacagagccttctgctacttctgcaacagcgtgcagaagctgcccatctgtgcccagtgtgggaagaccaagtgcatgatgaagagcagtgactgtgtgatcaagcatgctggggtgtacagcacaggcctggccatggtgggcgccatctgtgacttctgtgaggcctgggtgtgccacggcaggaagtgcctgagcacccacgcctgtgcctgccccctgacagatgctgaatgtgtggagtgtgagcggggcgtgtgggaccatggaggccgcatcttcagctgcagcttctgccacaacttcctgtag

SEQ ID NO: 176747 - DNA, 690 bp, synthetic construct
  misc_feature 1..690: note = Description of Artificial Sequence: Synthetic coding sequence
  source 1..690: mol_type = other DNA
atgcccaagaagaagacaggagccaggaagaaggcagaaaatagaagagagcgggagaagcagctgcgggccagccgcagcaccatcgacctggccaagcacccctgcaatgcctccatggagtgtgacaagtgccagaggcggcagaagaacagagccttctgctacttctgcaacagcgtgcagaagctgcccatctgtgcccagtgtgggaagaccaagtgcatgatgaagagcagtgactgtgtgatcaagcatgctggggtgtacagcacaggcctggccatggtgggcgccatctgtgacttctgtgaggcctgggtgtgccacggcaggaagtgcctgagcacccacgcctgtgcctgccccctgacagatgctgaatgtgtggagtgtgagcggggcgtgtgggaccatggaggccgcatcttcagctgcagcttctgccacaacttcctgtgtgaagatgaccagtttgagcaccaggccagctgccaggtgctggaggccgagaccttcaagtgtgtgtcctgcaaccggctgggccagcacagctgcctgcgctgcaaggcctgcttctgtgatgaccacaccaggagcaaggtgttcaagcaggagaagggcaagcagcccccctgccccaagtgtggccacgagacccaggagaccaaggacctgtccatgtcctag

SEQ ID NO: 176748 - DNA, 1392 bp, synthetic construct
  misc_feature 1..1392: note = Description of Artificial Sequence: Synthetic coding sequence
  source 1..1392: mol_type = other DNA
atggcccagggcctggtgacctttgctgatgtggccatcgacttcagccaggaggagtgggcctgcctgaacagcgcccagagggacctgtactgggatgtgatgctggagaactacagcaacctggtgtccctggacctggagagcgcctatgagaacaagagcctgcccacagagaagaacatccacgagatccgggccagcaagaggaacagcgaccggcgcagcaagagcctgggcaggaactggatctgtgagggcaccctggagcggccccagaggagccggggccgctacgtgaaccagatgatcatcaactacgtgaagaggcctgccacccgggagggcaccccacccaggacccaccagaggcaccacaaggagaacagctttgagtgcaaggactgtgggaaggccttcagccggggctaccagctgagccagcaccagaagatccacactggagagaagccctatgagtgcaaggagtgcaagaaggccttccgctggggcaaccagctgacccagcaccagaagatccacactggagagaagccctatgagtgcaaggactgtgggaaggccttccgctggggcagcagcctggtgatccacaagaggatccacactggagagaagccctatgagtgcaaggactgtgggaaggccttcagaagaggagatgagctgacccagcaccagcgcttccacactggagagaaggactatgagtgcaaggactgtgggaagaccttcagccgggtgtacaagctgatccagcacaagaggatccacagcggggagaagccctatgagtgcaaggactgtgggaaggccttcatctgtggcagcagcctcatccagcacaagaggatccacactggagagaagccctatgagtgccaggagtgtgggaaggccttcaccagggtgaactacctgacccagcaccagaagatccacactggagagaagccccatgagtgcaaggaatgtgggaaggccttccgctggggcagcagcctggtgaagcatgagcgcatccacactggagagaagccctacaagtgcacagaatgtgggaaggccttcaactgtggctaccacctgacccagcacgagcgcatccacactggagagaccccctacaagtgcaaggaatgtgggaaggccttcatctacggcagcagcctggtgaagcatgagcgcatccacactggagtgaagccctacggctgcacagaatgtgggaagagcttcagccacggccaccagctgacccagcaccagaagacccacagcggggccaagagctatgagtgcaaggaatgtgggaaggcctgcaaccacctgaaccacctgcgggagcaccagaggatccacaacagctag

SEQ ID NO: 176749 - DNA, 1392 bp, synthetic construct; identical to SEQ ID NO: 176748
  misc_feature 1..1392: note = Description of Artificial Sequence: Synthetic coding sequence
  source 1..1392: mol_type = other DNA

SEQ ID NO: 176750 - DNA, 1392 bp, synthetic construct; identical to SEQ ID NO: 176748
  misc_feature 1..1392: note = Description of Artificial Sequence: Synthetic coding sequence
  source 1..1392: mol_type = other DNA

SEQ ID NO: 176751 - DNA, 192 bp, synthetic construct
  misc_feature 1..192: note = Description of Artificial Sequence: Synthetic coding sequence
  source 1..192: mol_type = other DNA
atggcccagggcctggtgacctttgctgatgtggccatcgacttcagccaggaggagtgggcctgcctgaacagcgcccagagggacctgtactgggatgtgatgctggagaactacagcaacctggtgtccctggacctggagagcgcctatgagaacaagagcctgcccacagagaagaacatccactag

SEQ ID NO: 176752 - DNA, 258 bp, synthetic construct
  misc_feature 1..258: note = Description of Artificial Sequence: Synthetic coding sequence
  source 1..258: mol_type = other DNA
atggcccagggcctggtgacctttgctgatgtggccatcgacttcagccaggaggagtgggcctgcctgaacagcgcccagagggacctgtactgggatgtgatgctggagaactacagcaacctggtgtccctggacctggagagcgcctatgagaacaagagcctgcccacagagaagaacatccacgagatccgggccagcaagaggaacagcgaccggcgcagcaagagcctgggcaggaactggatctgctag

SEQ ID NO: 176753 - DNA, 201 bp, synthetic construct
  misc_feature 1..201: note = Description of Artificial Sequence: Synthetic coding sequence
  source 1..201: mol_type = other DNA
atggcccagggcctggtgacctttgctgatgtggccatcgacttcagccaggaggagtgggcctgcctgaacagcgcccagagggacctgtactgggatgtgatgctggagaactacagcaacctggtgtccctggacctggagagcgcctatgagaacaagagcctgcccacagagaagaacatccacgagatcagatag

SEQ ID NO: 176754 - DNA, 195 bp, synthetic construct
  misc_feature 1..195: note = Description of Artificial Sequence: Synthetic coding sequence
  source 1..195: mol_type = other DNA
atggcccagggcctggtgacctttgctgatgtggccatcgacttcagccaggaggagtgggcctgcctgaacagcgcccagagggacctgtactgggatgtgatgctggagaactacagcaacctggtgtccctggacctggagagcgcctatgagaacaagagcctgcccacagagaagaacatccatgaatag

SEQ ID NO: 176755 - DNA, 534 bp, synthetic construct
  misc_feature 1..534: note = Description of Artificial Sequence: Synthetic coding sequence
  source 1..534: mol_type = other DNA
atggcccagggcctggtgacctttgctgatgtggccatcgacttcagccaggaggagtgggcctgcctgaacagcgcccagagggacctgtactgggatgtgatgctggagaactacagcaacctggtgtccctggacctggagagcgcctatgagaacaagagcctgcccacagagaagaacatccacgagatccgggccagcaagaggaacagcgaccggcgcagcaagagcctgggcaggaactggatctgtgagggcaccctggagcggccccagaggagccggggccgctacgtgaaccagatgatcatcaactacgtgaagaggcctgccacccgggagggcaccccacccaggacccaccagaggcaccacaaggagaacagctttgagtgcaaggactgtgggaaggccttcagccggggctaccagctgagccagcaccagaagatccacactggagagaagccctatgagtgcaaggagtgcaagaaggccttccgctggggcaaccagctgacccagcactag

SEQ ID NO: 176756 - DNA, 264 bp, synthetic construct
  misc_feature 1..264: note = Description of Artificial Sequence: Synthetic coding sequence
  source 1..264: mol_type = other DNA
atggcccagggcctggtgacctttgctgatgtggccatcgacttcagccaggaggagtgggcctgcctgaacagcgcccagagggacctgtactgggatgtgatgctggagaactacagcaacctggtgtccctggacctggagagcgcctatgagaacaagagcctgcccacagagaagaacatccacgagatccgggccagcaagaggaacagcgaccggcgcagcaagagcctgggcaggaactggatctgtgagggctag

SEQ ID NO: 176757 - DNA, 144 bp, synthetic construct
  misc_feature 1..144: note = Description of Artificial Sequence: Synthetic coding sequence
  source 1..144: mol_type = other DNA
atggcccagggcctggtgacctttgctgatgtggccatcgacttcagccaggaggagtgggcctgcctgaacagcgcccagagggacctgtactgggatgtgatgctggagaactacagcaacctggtgtccctggacctgtag

SEQ ID NO: 176758 - DNA, 1392 bp, synthetic construct; identical to SEQ ID NO: 176748
  misc_feature 1..1392: note = Description of Artificial Sequence: Synthetic coding sequence
  source 1..1392: mol_type = other DNA

SEQ ID NO: 176759 - DNA, 318 bp, synthetic construct
  misc_feature 1..318: note = Description of Artificial Sequence: Synthetic coding sequence
  source 1..318: mol_type = other DNA
atggcccagggcctggtgacctttgctgatgtggccatcgacttcagccaggaggagtgggcctgcctgaacagcgcccagagggacctgtactgggatgtgatgctggagaactacagcaacctggtgtccctggacctggagagcgcctatgagaacaagagcctgcccacagagaagaacatccacgagatccgggccagcaagaggaacagcgaccggcgcagcaagagcctgggcaggaactggatctgtgagggcaccctggagcggccccagaggagccggggccgctacgtgaaccagatgatcatctag

SEQ ID NO: 176760 - DNA, 1392 bp, synthetic construct; identical to SEQ ID NO: 176748
  misc_feature 1..1392: note = Description of Artificial Sequence: Synthetic coding sequence
  source 1..1392: mol_type = other DNA

SEQ ID NO: 176761 - DNA, 1392 bp, synthetic construct; identical to SEQ ID NO: 176748
  misc_feature 1..1392: note = Description of Artificial Sequence: Synthetic coding sequence
  source 1..1392: mol_type = other DNA

SEQ ID NO: 176762 - DNA, 297 bp, synthetic construct
  misc_feature 1..297: note = Description of Artificial Sequence: Synthetic coding sequence
  source 1..297: mol_type = other DNA
atggcccagggcctggtgacctttgctgatgtggccatcgacttcagccaggaggagtgggcctgcctgaacagcgcccagagggacctgtactgggatgtgatgctggagaactacagcaacctggtgtccctggacctggagagcgcctatgagaacaagagcctgcccacagagaagaacatccacgagatccgggccagcaagaggaacagcgaccggcgcagcaagagcctgggcaggaactggatctgtgagggcaccctggagcggccccagaggagccggggccgctag

SEQ ID NO: 176763 - DNA, 1392 bp, synthetic construct; identical to SEQ ID NO: 176748
  misc_feature 1..1392: note = Description of Artificial Sequence: Synthetic coding sequence
  source 1..1392: mol_type = other DNA

SEQ ID NO: 176764 - DNA, 504 bp, synthetic construct
  misc_feature 1..504: note = Description of Artificial Sequence: Synthetic coding sequence
  source 1..504: mol_type = other DNA
atggcccagggcctggtgacctttgctgatgtggccatcgacttcagccaggaggagtgggcctgcctgaacagcgcccagagggacctgtactgggatgtgatgctggagaactacagcaacctggtgtccctggacctggagagcgcctatgagaacaagagcctgcccacagagaagaacatccacgagatccgggccagcaagaggaacagcgaccggcgcagcaagagcctgggcaggaactggatctgtgagggcaccctggagcggccccagaggagccggggccgctacgtgaaccagatgatcatcaactacgtgaagaggcctgccacccgggagggcaccccacccaggacccaccagaggcaccacaaggagaacagctttgagtgcaaggactgtgggaaggccttcagccggggctaccagctgagccagcaccagaagatccacactggagagaagccctatgagtgcaaggagtgcaagaaggcctag

SEQ ID NO: 176765 - DNA, 303 bp, synthetic construct
  misc_feature 1..303: note = Description of Artificial Sequence: Synthetic coding sequence
  source 1..303: mol_type = other DNA
atggcccagggcctggtgacctttgctgatgtggccatcgacttcagccaggaggagtgggcctgcctgaacagcgcccagagggacctgtactgggatgtgatgctggagaactacagcaacctggtgtccctggacctggagagcgcctatgagaacaagagcctgcccacagagaagaacatccacgagatccgggccagcaagaggaacagcgaccggcgcagcaagagcctgggcaggaactggatctgtgagggcaccctggagcggccccagaggagccggggccgctacgtgtag

SEQ ID NO: 176766 - DNA, 1998 bp, synthetic construct
  misc_feature 1..1998: note = Description of Artificial Sequence: Synthetic coding sequence
  source 1..1998: mol_type = other DNA
atggagagcgtgacctttgaagatgtggccgtggagttcatccaggagtgggccctgctggacagcgcccggcgcagcctgtgcaagtacaggatgctggaccagtgcaggaccctggccagccggggcaccccaccctgcaagcccagctgtgtgtcccagctgggccagagagctgagcccaaggccacagagcggggcatcctgcgggccaccggggtggcctgggagagccagctgaagccagaggagctgcccagcatgcaggacctgctggaggaggccagcagccgggacatgcagatgggccctggcctcttcctgaggatgcagctggtgcccagcattgaggagcgggagacccccctgacccgggaggacaggcctgccctgcaggagcccccctggagcctgggctgcaccggcctgaaggccgccatgcagatccagagggtggtgattcctgtgcccaccctgggccacaggaacccctgggtggcccgggacagcgctgtgcctgcccgggaccctgcctggctgcaggaggacaaggtggaggaggaggccatggcccctggcctgcccacagcctgcagccaggagcctgtgacctttgctgatgtggccgtggtgttcaccccagaggagtgggtgttcctggacagcacccagaggagcctgtacagagatgtgatgctggagaactacagaaacctggcctctgtggccgaccagctgtgcaagcccaatgccctgagctacctggaggagcggggggagcagtggaccacagacagaggagtgctgagtgacacctgtgccgagccccagtgccagccccaggaggccatccccagccaggacaccttcacagagatcctgagcattgatgtgaagggggagcagccccagcctggagagaagctgtacaagtacaatgagctggagaagcccttcaacagcattgagcccctcttccagtaccagagaattcatgctggggaggccagctgtgagtgccaggagatccggaacagcttcttccagagcgcccacctgattgtgcctgagaagatccgcagcggggacaagagctatgcctgcaacaagtgtgagaagagcttccgctacagcagtgacctgatcagacatgagaagacccacacagctgagaagtgctttgactgccaggagtgtggccaggccttcaagtacagcagcaacctgcggcggcacatgaggacccacactggagagaagccctttgaatgttcccagtgtgggaagaccttcaccaggaacttcaacctgatcctgcaccagaggaaccacactggagagaagccctatgagtgcaaggactgtgggaaggccttcaaccagcccagcagcctgcggagccacgtgaggacccacactggagagaagccctttgaatgttcccagtgtgggaaggccttccgggagcacagcagcctgaagacccacctgcggacccacacccgggagaagccctatgagtgcaaccagtgtgggaagcccttccgcaccagcacccacctgaatgtgcacaagaggatccacactggagagaagctgtatgaatgtgccacctgtggccaggtgctgagccggctgagcaccctgaagagccacatgaggacccacactggagagaagccctacgtgtgccaggagtgtggccgggccttcagcgagcccagcagcctgaggaagcacgcccggacccacagcggcaagaagccctatgcctgccaggagtgtggccgggccttcggccagagcagccacctgattgtgcacgtgaggacccacagcgctggccggccctaccagtgcaaccagtgtgagaaggccttccgccacagcagcagcctgactgtgcacaagaggacccacgtgggccgggagaccatcagaaatggcagcctgcccctgtccatgagccacccctactgcggccccctggccaactag

SEQ ID NO: 176767 - DNA, 549 bp, synthetic construct
  misc_feature 1..549: note = Description of Artificial Sequence: Synthetic coding sequence
  source 1..549: mol_type = other DNA
atggagagcgtgacctttgaagatgtggccgtggagttcatccaggagtgggccctgctggacagcgcccggcgcagcctgtgcaagtacaggatgctggaccagtgcaggaccctggccagccggggcaccccaccctgcaagcccagctgtgtgtcccagctgggccagagagctgagcccaaggccacagagcggggcatcctgcgggccaccggggtggcctgggagagccagctgaagccagaggagctgcccagcatgcaggacctgctggaggaggccagcagccgggacatgcagatgggccctggcctcttcctgaggatgcagctggtgcccagcattgaggagcgggagacccccctgacccgggaggacaggcctgccctgcaggagcccccctggagcctgggctgcaccctgcccctgctgagcctgctgctgcccagctgcccagagccccccctggtgctgctggacagcagcagcgccccagacagacacctgggcagcaccctggacacagaggcccggggcatcccctag

SEQ ID NO: 176768 - DNA, 1671 bp, synthetic construct
  misc_feature 1..1671: note = Description of Artificial Sequence: Synthetic coding sequence
  source 1..1671: mol_type = other DNA
atgcagctggtgcccagcattgaggagcgggagacccccctgaccagagaagatagacctgccctgcaggagcccccctggagcctgggctgcaccggcctgaaggccgccatgcagatccagagggtggtgattcctgtgcccaccctgggccacaggaacccctgggtggcccgggacagcgctgtgcctgcccgggaccctgcctggctgcaggaggacaaggtggaggaggaggccatggcccctggcctgcccacagcctgcagccaggagcctgtgacctttgctgatgtggccgtggtgttcaccccagaggagtgggtgttcctggacagcacccagaggagcctgtacagagatgtgatgctggagaactacagaaacctggcctctgtggccgaccagctgtgcaagcccaatgccctgagctacctggaggagcggggggagcagtggaccacagaccggggcgtgctgagtgacacctgtgccgagccccagtgccagccccaggaggccatccccagccaggacaccttcacagagatcctgagcattgatgtgaagggggagcagccccagcccggggagaagctgtacaagtacaatgagctggagaagcccttcaacagcattgagcccctcttccagtaccagagaattcatgctggggaggccagctgtgagtgccaggagatcagaaattccttcttccagagcgcccacctgattgtgcctgagaagatccgcagcggggacaagagctatgcctgcaacaagtgtgagaagagcttccgctacagcagtgacctgatcagacatgagaagacccacacagctgagaagtgctttgactgccaggagtgtggccaggccttcaagtacagcagcaacctgcggcggcacatgaggacccacactggagagaagccctttgagtgcagccagtgtgggaagaccttcaccaggaacttcaacctgatcctgcaccagaggaaccacactggagagaagccctatgagtgcaaggactgtgggaaggccttcaaccagcccagcagcctgcggagccacgtgaggacccacactggagagaagccctttgagtgcagccagtgtgggaaggccttccgggagcacagcagcctgaagacccacctgcggacccacacccgggagaagccctatgagtgcaaccagtgtgggaagcccttccgcaccagcacccacctgaatgtgcacaagaggatccacactggagagaagctgtatgaatgtgccacctgtggccaggtgctgagccggctgagcaccctgaagagccacatgaggacccacactggagagaagccctacgtgtgccaggagtgtggccgggccttcagcgagcccagcagcctgaggaagcacgcccggacccacagcggcaagaagccctatgcctgccaggagtgtggccgggccttcggccagagcagccacctgattgtgcacgtgaggacccacagcgctggccggccctaccagtgcaaccagtgtgagaaggccttccgccacagcagcagcctgactgtgcacaagaggacccacgtgggccgggagaccatcagaaatggcagcctgcccctgtccatgagccacccctactgcggccccctggccaactag

SEQ ID NO: 176769 - DNA, 912 bp, synthetic construct
  misc_feature 1..912: note = Description of Artificial Sequence: Synthetic coding sequence
  source 1..912: mol_type = other DNA
atggagagcgtgacctttgaagatgtggccgtggagttcatccaggagtgggccctgctggacagcgcccggcgcagcctgtgcaagtacaggatgctggaccagtgcaggaccctggccagccggggcaccccaccctgcaagcccagctgtgtgtcccagctgggccagagagctgagcccaaggccacagagcggggcatcctgcgggccaccggggtggcctgggagagccagctgaagccagaggagctgcccagcatgcaggacctgctggaggaggccagcagccgggacatgcagatgggccctggcctcttcctgaggatgcagctggtgcccagcattgaggagcgggagacccccctgacccgggaggacaggcctgccctgcaggagcccccctggagcctgggctgcaccggcctgaaggccgccatgcagatccagagggtggtgattcctgtgcccaccctgggccacaggaacccctgggtggcccgggacagcgctgtgcctgcccgggaccctgcctggctgcaggaggacaaggtggaggaggaggccatggcccctggcctgcccacagcctgcagccaggagcctgtgacctttgctgatgtggccgtggtgttcaccccagaggagtgggtgttcctggacagcacccagaggagcctgtacagagatgtgatgctggagaactacagaaacctggcctctgtggccgaccagctgtgcaagcccaatgccctgagctacctggaggagcggggggagcagtggaccacagacagaggagtgctgagtgacacctgtgccgagccccagtgccagccccaggaggccatccccagccaggacaccttcacagagatcctgagcattgatgtgaagggcccccccaactag

SEQ ID NO: 176770 - DNA, 3360 bp, synthetic construct
  misc_feature 1..3360: note = Description of Artificial Sequence: Synthetic coding sequence
  source 1..3360: mol_type = other DNA
gctgctgaggagcggggctggaggccccggcgctgccgcagccagaggggcacctggctgaggaagcccaggtctgaggtgccccggccctatgcccccctgagcggcagcccccccatccgctggaggaggacccgctggagggctgctgccacccggcccctgggcctggccggccccaggagccccctgcgggccgcctgggtgtgggcccccagccgggtgcggcggcagcagaggagaagaggccggcctggagctggccggggcattgatgacctggaggaggacagcgactacaacccagcagaagatgagccccggggccggcagctgcggctgcagaggcccacccccagcaccccccggccccggcggcggcccggccggcccaggaagctgccccggctggagatcagtgacctgcctgatggagtggagggggagcccctggtgagcagccagagcggccagagccccccagagccccaggaccctgaggcccccagcagcagcggccctggccacctggtggccatgggcaaggtgtccaggacccctgtggaggccggcgtgtcccagagtgatgctgaaaatgctgcccccagctgcccagatgaacatgacaccctgccccggcggcggggccggcccagccgccgcttcctgggcaagaagtacaggaagtactactacaagagccccaagcccctgctgcggcccttcctgtgccgcatctgtggcagccgcttcctgagccatgaggacctgcgcttccacgtgaacagccatgaggccggggacccccagctgttcaagtgcctgcagtgcagctaccgcagccgccgctggagcagcctgaaggagcacatgttcaaccacgtgggcagcaagccctacaagtgtgatgagtgcagctacacctctgtgtacaggaaggatgtgatcagacatgctgctgtgcacagccgggacaggaagaagaggccagaccccacccccaagctgagcagcttcccctgccctgtgtgtggccgggtgtaccccatgcagaagaggctgacccagcacatgaagacccacagcacagagaagccccacatgtgtgacaagtgtgggaagagcttcaagaagcgctacaccttcaagatgcacctgctgacccacatccaggccgtggccaacagacgcttcaagtgtgagttctgtgaatttgtgtgtgaggacaagaaggccctgctgaaccaccagctgagccacgtgtctgacaagcccttcaagtgcagcttctgcccctaccgcaccttccgggaggacttcctgctgagccacgtggccgtgaagcacactggagccaagccctttgcctgtgagtactgccacttcagcaccaggcacaagaagaacctgcggctgcacgtgcgctgcagacatgccagcagctttgaggagtggggcagaagacaccctgaggagccccccagcagaagaagacccttcttcagcctgcagcagatcgaggagctgaagcagcagcacagcgctgcccctggccccccacccagcagccctggccccccagagatccccccagaggccaccaccttccagagcagcgaggcccccagcctgctgtgcagcgacaccctgggcggggccaccatcatctaccagcagggcgctgaggagagcacagccatggccacccagacagccctggacctgctgctgaacatgtctgcccagcgggagctgggcggcacagccctgcaggtggccgtggtgaagtcagaagatgtggaggccggcctggccagccctgggggccagcccagccctgagggcgccaccccccaggtggtgaccctgcacgtggccgagcccggcggcggcgctgctgctgagagccagctgggccccccagacctgccccagatcaccctggcccctggcccctttggaggcaccggctacagcgtcatcacagccccacccatggaggagggcaccagcgcccctggcaccccctacagcgaggagcctgctggggaggccgcccaggccgtggtggtgtctgacaccctgaaggaggccggcacccactacatcatggccacagatggcacccagctgcaccacatcgagctgacagcagatggcagcatctccttccccagcccagatgccctggccagcggggccaagtggcccctgctgcagtgtggcggcctgcccagagatggccctgagccccccagccctgccaagacccactgtgtgggggacagccagagcagcgccagcagccccccagccaccagcaaggccctgggcctggccgtgccccccagccccccatctgctgccacagctgccagcaagaagttcagctgcaagatctgtgccgaggccttccctggccgggcagagatggagagccacaagagggcccatgctggccctggggccttcaagtgcccagactgccccttcagcgcccggcagtggccagaggtgcgggcccacatggcccagcacagcagcctgcggccccaccagtgcagccagtgcagctttgccagcaagaacaagaaggacctgcggcggcacatgctgacccacaccaaggagaagccctttgcctgccacctgtgtggccagcgcttcaacagaaatggccacctgaagttccacatccagaggctgcacagcccagatggcaggaagagcggcacccccacagcccgggcccccacccagacccccacccagaccatcatcctgaacagtgatgatgagaccctggccaccctgcacacagccctgcagagcagccacggcgtgctgggccctgagcggctgcagcaggccctgagccaggagcacatcatcgtggcccaggagcagacagtgaccaaccaggaggaggccgcctacatccaggagatcaccacagcagatggccagacagtgcagcacctggtgaccagtgacaaccaggtgcagtacatcatcagccaggatggagtgcagcacctgctgccccaggagtatgtggtggtgcctgagggccaccacatccaggtgcaggagggccagatcacccacatccagtatgagcagggcgcccccttcctgcaggagagccagatccagtatgtgcctgtgtccccaggccagcagctggtgacccaggcccagctggaggccgccgcccacagcgctgtgacagctgtggctgatgctgccatggcccaggcccagggcctgtttggaacagatgagaccgtgcctgagcacatccagcagctgcagcaccagggcattgaatatgatgtgatcaccctggctgatgactag

SEQ ID NO: 176771 - DNA, 4029 bp, synthetic construct
  misc_feature 1..4029: note = Description of Artificial Sequence: Synthetic coding sequence
  source 1..4029: mol_type = other DNA
atggaggagaatgaggtggagagcagcagtgatgctgcccctggccctggccggcctgaggagcccagcgagagcggcctgggcgtgggcaccagcgaggccgtgtctgctgacagcagtgatgctgctgctgcccctggccaggccgaggctgatgacagcggcgtgggccagagcagtgaccggggcagccgcagccaggaggaggtgtctgagagcagcagcagcgctgaccccctgcccaacagctacctgcctgacagcagctctgtgagccacggccctgtggccggcgtgactggaggccccccagccctggtgcacagcagcgccctgcctgaccccaacatgctggtgtctgactgcacagccagcagcagtgacctgggcagcgccatcgacaagatcatcgagagcaccatcggccctgacctgatccagaactgcatcaccgtgaccagcgcagaagatggaggagctgagaccacccgctacctgatcctgcagggcccagatgatggagcccccatgaccagccccatgagcagcagcaccctggcccacagcctggccgccatcgaggccctggctgatggccccaccagcaccagcacctgcctggaggcccagggcggccccagcagccctgtgcagctgcccccagccagcggggctgaggagccagacctgcagagcctggaggccatgatggaggtggtggtggtgcagcagttcaagtgcaagatgtgccagtaccgcagcagcaccaaggccaccctgctgcggcacatgagggagcggcacttccggcctgtggccgctgctgctgctgctgctgggaagaagggccgcctgaggaagtggagcaccagcaccaagagccaggaggaggagggccctgaggaggaggatgatgatgacatcgtggatgctggggccattgatgacctggaggaggacagcgactacaacccagcagaagatgagccccggggccggcagctgcggctgcagaggcccacccccagcaccccccggcccaggagaagacctggccggcccaggaagctgccccggctggagatcagtgacctgcctgatggagtggagggggagcccctggtgagcagccagagcggccagagccccccagagccccaggaccctgaggcccccagcagcagcggccctggccacctggtggccatgggcaaggtgtccaggacccctgtggaggccggcgtgtcccagagtgatgctgaaaatgctgcccccagctgcccagatgaacatgacaccctgcccaggagaagaggccggcccagccgccgcttcctgggcaagaagtacaggaagtactactacaagagccccaagcccctgctgcggcccttcctgtgccgcatctgtggcagccgcttcctgagccatgaggacctgcgcttccacgtgaacagccatgaagctggggacccccagctgttcaagtgcctgcagtgcagctaccgcagccgccgctggagcagcctgaaggagcacatgttcaaccacgtgggcagcaagccctacaagtgtgatgaatgttcctacacctctgtgtacaggaaggatgtgatcagacatgctgctgtgcacagccgggacaggaagaagaggccagaccccacccccaagctgagcagcttcccctgccctgtgtgtggccgggtgtaccccatgcagaagaggctgacccagcacatgaagacccacagcacagagaagccccacatgtgtgacaagtgtgggaagagcttcaagaagcgctacaccttcaagatgcacctgctgacccacatccaggccgtggccaacagacgcttcaagtgtgagttctgtgaatttgtgtgtgaggacaagaaggccctgctgaaccaccagctgagccacgtgtctgacaagcccttcaagtgcagcttctgcccctaccgcaccttccgggaggacttcctgctgagccacgtggccgtgaagcacactggagccaagccctttgcctgtgagtactgccacttcagcaccaggcacaagaagaacctgcggctgcacgtgcgctgcagacatgccagcagctttgaggagtggggccgccgccaccctgaggagccccccagcagaagaagacccttcttcagcctgcagcagatcgaggagctgaagcagcagcacagcgctgcccctggccccccacccagcagccctggccccccagagatccccccagaggccaccaccttccagagcagcgaggcccccagcctgctgtgcagcgacaccctgggcggggccaccatcatctaccagcagggcgctgaggagagcacagccatggccacccagacagccctggacctgctgctgaacatgtctgcccagcgggagctgggcggcacagccctgcaggtggccgtggtgaagtcagaagatgtggaggccggcctggccagccctgggggccagcccagccctgagggcgccaccccccaggtggtgaccctgcacgtggccgagcccggcggcggcgctgctgctgagagccagctgggccccccagacctgccccagatcaccctggcccctggcccctttggaggcaccggctacagcgtcatcacagccccacccatggaggagggcaccagcgcccctggcaccccctacagcgaggagcctgctggggaggccgcccaggccgtggtggtgtctgacaccctgaaggaggccggcacccactacatcatggccacagatggcacccagctgcaccacatcgagctgacagcagatggcagcatctccttccccagcccagatgccctggccagcggggccaagtggcccctgctgcagtgtggcggcctgcccagagatggccctgagccccccagccctgccaagacccactgtgtgggggacagccagagcagcgccagcagccccccagccaccagcaaggccctgggcctggccgtgccccccagcccccccagcgctgccacagctgccagcaagaagttcagctgcaagatctgtgccgaggccttccctggccgggcagagatggagagccacaagagggcccacgccggccctggggccttcaagtgcccagactgccccttcagcgcccggcagtggccagaggtgcgggcccacatggcccagcacagcagcctgcggccccaccagtgcagccagtgcagctttgccagcaagaacaagaaggacctgcggcggcacatgctgacccacaccaaggagaagccctttgcctgccacctgtgtggccagcgcttcaacagaaatggccacctgaagttccacatccagaggctgcacagcccagatggcaggaagagcggcacccccacagcccgggcccccacccagacccccacccagaccatcatcctgaacagtgatgatgagaccctggccaccctgcacacagccctgcagagcagccatggagtgctgggccctgagcggctgcagcaggccctgagccaggagcacatcatcgtggcccaggagcagacagtgaccaaccaggaggaggccgcctacatccaggagatcaccacagcagatggccagacagtgcagcacctggtgaccagtgacaaccaggtgcagtacatcatcagccaggatggagtgcagcacctgctgccccaggagtatgtggtggtgcctgagggccaccacatccaggtgcaggagggccagatcacccacatccagtatgagcagggcgcccccttcctgcaggagagccagatccagtatgtgcctgtgtccccaggccagcagctggtgacccaggcccagctggaggccgccgcccacagcgctgtgacagctgtggctgatgctgccatggcccaggcccagggcctgtttggaacagatgaaacagtgcctgagcacatccagcagctgcagcaccagggcatcgagtatgatgtgatcaccctggctgatgactag

SEQ ID NO: 176772 - DNA, 3564 bp, synthetic construct
  misc_feature 1..3564: note = Description of Artificial Sequence: Synthetic coding sequence
  source 1..3564: mol_type = other DNA
atggccaccagctccatgcctgagagcgagagaaatgtggccaccaaggccagcggggcccccatgaccagccccatgagcagcagcaccctggcccacagcctggccgccatcgaggccctggctgatggccccaccagcaccagcacctgcctggaggcccagggcggccccagcagccctgtgcagctgcccccagccagcggggctgaggagccagacctgcagagcctggaggccatgatggaggtggtggtggtgcagcagttcaagtgcaagatgtgccagtaccgcagcagcaccaaggccaccctgctgcggcacatgagggagcggcacttccggcctgtggccgctgctgctgctgctgctgggaagaagggccgcctgaggaagtggagcaccagcaccaagagccaggaggaggagggccctgaggaggaggatgatgatgacatcgtggatgctggggccattgatgacctggaggaggacagcgactacaacccagcagaagatgagccccggggccggcagctgcggctgcagaggcccacccccagcaccccccggccccggcggcggcccggccggcccaggaagctgccccggctggagatcagtgacctgcctgatggagtggagggggagcccctggtgagcagccagagcggccagagccccccagagccccaggaccctgaggcccccagcagcagcggccctggccacctggtggccatgggcaaggtgtccaggacccctgtggaggccggcgtgtcccagagtgatgctgaaaatgctgcccccagctgcccagatgaacatgacaccctgccccggcggcggggccggcccagccgccgcttcctgggcaagaagtacaggaagtactactacaagagccccaagcccctgctgcggcccttcctgtgccgcatctgtggcagccgcttcctgagccatgaggacctgcgcttccacgtgaacagccatgaggccggggacccccagctgttcaagtgcctgcagtgcagctaccgcagccgccgctggagcagcctgaaggagcacatgttcaaccacgtgggcagcaagccctacaagtgtgatgagtgcagctacacctctgtgtacaggaaggatgtgatcagacatgctgctgtgcacagccgggacaggaagaagaggccagaccccacccccaagctgagcagcttcccctgccctgtgtgtggccgggtgtaccccatgcagaagaggctgacccagcacatgaagacccacagcacagagaagccccacatgtgtgacaagtgtgggaagagcttcaagaagcgctacaccttcaagatgcacctgctgacccacatccaggccgtggccaacagacgcttcaagtgtgagttctgtgaatttgtgtgtgaggacaagaaggccctgctgaaccaccagctgagccacgtgtctgacaagcccttcaagtgcagcttctgcccctaccgcaccttccgggaggacttcctgctgagccacgtggccgtgaagcacactggagccaagccctttgcctgtgagtactgccacttcagcaccaggcacaagaagaacctgcggctgcacgtgcgctgcagacatgccagcagctttgaggagtggggcagaagacaccctgaggagccccccagcagaagaagacccttcttcagcctgcagcagatcgaggagctgaagcagcagcacagcgctgcccctggccccccacccagcagccctggccccccagagatccccccagaggccaccaccttccagagcagcgaggcccccagcctgctgtgcagcgacaccctgggcggggccaccatcatctaccagcagggcgctgaggagagcacagccatggccacccagacagccctggacctgctgctgaacatgtctgcccagcgggagctgggcggcacagccctgcaggtggccgtggtgaagtcagaagatgtggaggccggcctggccagccctgggggccagcccagccctgagggcgccaccccccaggtggtgaccctgcacgtggccgagcccggcggcggcgctgctgctgagagccagctgggccccccagacctgccccagatcaccctggcccctggcccctttggaggcaccggctacagcgtcatcacagccccacccatggaggagggcaccagcgcccctggcaccccctacagcgaggagcctgctggggaggccgcccaggccgtggtggtgtctgacaccctgaaggaggccggcacccactacatcatggccacagatggcacccagctgcaccacatcgagctgacagcagatggcagcatctccttccccagcccagatgccctggccagcggggccaagtggcccctgctgcagtgtggcggcctgcccagagatggccctgagccccccagccctgccaagacccactgtgtgggggacagccagagcagcgccagcagccccccagccaccagcaaggccctgggcctggccgtgccccccagccccccatctgctgccacagctgccagcaagaagttcagctgcaagatctgtgccgaggccttccctggccgggcagagatggagagccacaagagggcccatgctggccctggggccttcaagtgcccagactgccccttcagcgcccggcagtggccagaggtgcgggcccacatggcccagcacagcagcctgcggccccaccagtgcagccagtgcagctttgccagcaagaacaagaaggacctgcggcggcacatgctgacccacaccaaggagaagccctttgcctgccacctgtgtggccagcgcttcaacagaaatggccacctgaagttccacatccagaggctgcacagcccagatggcaggaagagcggcacccccacagcccgggcccccacccagacccccacccagaccatcatcctgaacagtgatgatgagaccctggccaccctgcacacagccctgcagagcagccacggcgtgctgggccctgagcggctgcagcaggccctgagccaggagcacatcatcgtggcccaggagcagacagtgaccaaccaggaggaggccgcctacatccaggagatcaccacagcagatggccagacagtgcagcacctggtgaccagtgacaaccaggtgcagtacatcatcagccaggatggagtgcagcacctgctgccccaggagtatgtggtggtgcctgagggccaccacatccaggtgcaggagggccagatcacccacatccagtatgagcagggcgcccccttcctgcaggagagccagatccagtatgtgcctgtgtccccaggccagcagctggtgacccaggcccagctggaggccgccgcccacagcgctgtgacagctgtggctgatgctgccatggcccaggcccagggcctgtttggaacagatgagaccgtgcctgagcacatccagcagctgcagcaccagggcattgaatatgatgtgatcaccctggctgatgactag

SEQ ID NO: 176773 - DNA, 330 bp, synthetic construct
  misc_feature 1..330: note = Description of Artificial Sequence: Synthetic coding sequence
  source 1..330: mol_type = other DNA
atgctggagaactacagcaacctggtgtctgtgggctactgtgtgcacaagccagaggtgatcttccggctgcagcagggcgaggagccctggaagcaggaggaggagttccccagccagagcttccctgagatgggcttccaccacgtgcctgctggcctgaagctgctgagcagcagtgaccccccagccctggccagccagagcggccgcatcaccggcatgagccacagcatcccccctgtgatgggcagcttcaagttcaccaccagcatcttcacctgtgtgggcctcttccgcttcttcttcttctacctgtcctggttctag

SEQ ID NO: 176774 - DNA, 417 bp, synthetic construct
  misc_feature 1..417: note = Description of Artificial Sequence: Synthetic coding sequence
  source 1..417: mol_type = other DNA
atgaacaaggtggagcagaagagccaggagagcgtgtccttcaaggatgtgacagtgggcttcacccaggaggagtggcagcacctggaccccagccagagggccctgtacagagatgtgatgctggagaactacagcaacctggtgtctgtgggctactgtgtgcacaagccagaggtgatcttccggctgcagcagggcgaggagccctggaagcaggaggaggagttccccagccagagcttccctgaggtgtggacagctgaccacctgaaggagaggagccaggagaaccagagcaagcacctgtgggaggtggtgttcatcaacaatgagatgctgaccaaggagcagggagatgtgattggcatccccttcaacgtggatgcccctgagatgctgatgcccctggactag

SEQ ID NO: 176775 - DNA, 2433 bp, synthetic construct
  misc_feature 1..2433: note = Description of Artificial Sequence: Synthetic coding sequence
  source 1..2433: mol_type = other DNA
atgaacaaggtggagcagaagagccaggagagcgtgtccttcaaggatgtgacagtgggcttcacccaggaggagtggcagcacctggaccccagccagagggccctgtacagagatgtgatgctggagaactacagcaacctggtgtctgtgggctactgtgtgcacaagccagaggtgatcttccggctgcagcagggcgaggagccctggaagcaggaggaggagttccccagccagagcttccctgtgtggacagctgaccacctgaaggagaggagccaggagaaccagagcaagcacctgtgggaggtggtgttcatcaacaatgagatgctgaccaaggagcagggagatgtgattggcatccccttcaacgtggatgtgtcctccttccccagcaggaagatgttctgccagtgtgacagctgtggcatgtccttcaacacagtgtctgagctggtgatcagcaagatcaactacctgggcaagaagagtgatgagttcaatgcctgtgggaagctgctgctgaacatcaagcatgatgagacccacacccaggagaagaatgaggtgctgaagaacagaaacaccctgagccaccacgaggagaccctgcagcacgagaagatccagaccctggagcacaactttgagtacagcatctgccaggagaccctgctggagaaggctgtgttcaacacccagaagagagaaaatgctgaggagaacaactgtgactacaatgaatttggaagaaccctgtgtgacagcagcagcctgctcttccaccagatcagccccagccgggacaaccactatgagttcagtgactgtgagaagttcctgtgtgtgaagagcaccctgagcaagccccatggagtgtccatgaagcactatgactgtggggagagcggcaacaacttccggaggaagctgtgcctgagccacctgcagaagggggacaagggggagaagcactttgaatgtaatgaatgtgggaaggccttctgggagaagagccacctgaccaggcaccagagggtgcacacaggccagaagcccttccagtgcaatgaatgtgagaaggccttctgggacaagagcaacctgaccaagcaccagaggagccacactggagagaagccctttgaatgtaatgaatgtgggaaggccttcagccacaagagcgccctgaccctgcaccagaggacccacactggagagaagccctaccagtgcaatgcctgtgggaagaccttctgccagaagagtgacctgaccaagcaccagaggacccacacaggcctgaagccctatgaatgttatgaatgtgggaagagcttccgggtgaccagccacctgaaggtgcaccagaggacccacactggagagaagccctttgaatgtctggagtgtgggaagagcttcagcgagaagagcaacctgacccagcaccagaggatccacatcggggacaagagctatgaatgtaatgcctgtgggaagaccttctaccacaagagcctgctgaccaggcaccagatcatccacacaggctggaagccctatgaatgttatgaatgtgggaagaccttctgcctgaagagtgacctgactgtgcaccagaggacccacacaggccagaagccctttgcctgcccagaatgtgggaagttcttcagccacaagagcaccctgagccagcactaccgcacccacactggagagaagccctatgaatgtcatgaatgtgggaagatcttctacaacaagagctacctgaccaagcacaacagaacccacactggagagaagccctatgaatgtaatgaatgtgggaaggccttctaccagaagagccagctgacccagcaccagaggatccacatcggggagaagccctacaagtgcaatgaatgtgggaaggccttctgccacaagagcgccctgattgtgcaccagaggacccacacccaggagaagccctacaagtgcaatgaatgtgggaagagcttctgtgtgaagagcggcctcatcttccacgagaggaagcacactggagagaagccctatgaatgtaatgaatgtgggaagttcttccgccacaagagcagcctgactgtgcaccaccgggcccacactggagagaagagctgccagtgcaatgaatgtgggaagatcttctacaggaagtctgagctggcccagcaccagaggagccacactggagagaagccctatgagtgcaacacctgcaggaagaccttcagccagaagagcaacctgattgtgcaccagaggaggcacatcggggagaacctgatgaatgagatggacatccggaacttccagccccaggtgtccctgcacaatgccagcgagtacagccactgtggggagagcccagatgacatcctgaatgtgcagtag

SEQ ID NO: 176776 - DNA, 2436 bp, synthetic construct
  misc_feature 1..2436: note = Description of Artificial Sequence: Synthetic coding sequence
  source 1..2436: mol_type = other DNA
atgaacaaggtggagcagaagagccaggagagcgtgtccttcaaggatgtgacagtgggcttcacccaggaggagtggcagcacctggaccccagccagagggccctgtacagagatgtgatgctggagaactacagcaacctggtgtctgtgggctactgtgtgcacaagccagaggtgatcttccggctgcagcagggcgaggagccctggaagcaggaggaggagttccccagccagagcttccctgaggtgtggacagctgaccacctgaaggagaggagccaggagaaccagagcaagcacctgtgggaggtggtgttcatcaacaatgagatgctgaccaaggagcagggagatgtgattggcatccccttcaacgtggatgtgagcagcttccccagcaggaagatgttctgccagtgtgacagctgtggcatgtccttcaacacagtgtctgagctggtgatcagcaagatcaactacctgggcaagaagagtgatgagttcaatgcctgtgggaagctgctgctgaacatcaagcatgatgagacccacacccaggagaagaatgaggtgctgaagaacagaaacaccctgagccaccacgaggagaccctgcagcacgagaagatccagaccctggagcacaactttgagtacagcatctgccaggagaccctgctggagaaggctgtgttcaacacccagaagcgggagaatgctgaggagaacaactgtgactacaatgaatttggccgcaccctgtgtgacagcagcagcctgctcttccaccagatcagccccagccgggacaaccactatgagttcagtgactgtgagaagttcctgtgtgtgaagagcaccctgagcaagccccacggcgtgtccatgaagcactatgactgtggggagagcggcaacaacttccggaggaagctgtgcctgagccacctgcagaagggggacaagggggagaagcactttgagtgcaatgaatgtgggaaggccttctgggagaagagccacctgaccaggcaccagagggtgcacacaggccagaagcccttccagtgcaatgaatgtgagaaggccttctgggacaagagcaacctgaccaagcaccagaggagccacactggagagaagccctttgagtgcaatgaatgtgggaaggccttcagccacaagagcgccctgaccctgcaccagaggacccacactggagagaagccctaccagtgcaatgcctgtgggaagaccttctgccagaagagtgacctgaccaagcaccagaggacccacacaggcctgaagccctatgagtgctatgaatgtgggaagagcttccgggtgaccagccacctgaaggtgcaccagaggacccacactggagagaagccctttgagtgcctggagtgtgggaagagcttcagcgagaagagcaacctgacccagcaccagaggatccacatcggggacaagagctatgagtgcaatgcctgtgggaagaccttctaccacaagagcctgctgaccaggcaccagatcatccacacaggctggaagccctatgagtgctatgaatgtgggaagaccttctgcctgaagagtgacctgactgtgcaccagaggacccacacaggccagaagccctttgcctgcccagaatgtgggaagttcttcagccacaagagcaccctgagccagcactaccgcacccacactggagagaagccctatgagtgccatgaatgtgggaagatcttctacaacaagagctacctgaccaagcacaacagaacccacactggagagaagccctatgagtgcaatgaatgtgggaaggccttctaccagaagagccagctgacccagcaccagaggatccacatcggggagaagccctacaagtgcaatgaatgtgggaaggccttctgccacaagagcgccctgattgtgcaccagaggacccacacccaggagaagccctacaagtgcaatgaatgtgggaagagcttctgtgtgaagagcggcctcatcttccacgagaggaagcacactggagagaagccctatgagtgcaatgaatgtgggaagttcttccgccacaagagcagcctgactgtgcaccaccgggcccacactggagagaagagctgccagtgcaatgaatgtgggaagatcttctacaggaagtctgagctggcccagcaccagaggagccacactggagagaagccctatgagtgcaacacctgcaggaagaccttcagccagaagagcaacctgattgtgcaccagaggaggcacatcggggagaacctgatgaatgagatggacatccggaacttccagccccaggtgtccctgcacaatgccagcgagtacagccactgtggggagagcccagatgacatcctgaatgtgcagtag

SEQ ID NO: 176777 - DNA, 2454 bp, synthetic construct
  misc_feature 1..2454: note = Description of Artificial Sequence: Synthetic coding sequence
  source 1..2454: mol_type = other DNA
atggccaatgccacccggcggggcagcggcgtggagcagaagagccaggagagcgtgtccttcaaggatgtgacagtgggcttcacccaggaggagtggcagcacctggaccccagccagagggccctgtacagagatgtgatgctggagaactacagcaacctggtgtctgtgggctactgtgtgcacaagccagaggtgatcttccggctgcagcagggcgaggagccctggaagcaggaggaggagttccccagccagagcttccctgtgtggacagctgaccacctgaaggagaggagccaggagaaccagagcaagcacctgtgggaggtggtgttcatcaacaatgagatgctgaccaaggagcagggagatgtgattggcatccccttcaacgtggatgtgagcagcttccccagcaggaagatgttctgccagtgtgacagctgtggcatgtccttcaacacagtgtctgagctggtgatcagcaagatcaactacctgggcaagaagagtgatgagttcaatgcctgtgggaagctgctgctgaacatcaagcatgatgagacccacacccaggagaagaatgaggtgctgaagaacagaaacaccctgagccaccacgaggagaccctgcagcacgagaagatccagaccctggagcacaactttgagtacagcatctgccaggagaccctgctggagaaggctgtgttcaacacccagaagcgggagaatgctgaggagaacaactgtgactacaatgaatttggccgcaccctgtgtgacagcagcagcctgctcttccaccagatcagccccagccgggacaaccactatgagttcagtgactgtgagaagttcctgtgtgtgaagagcaccctgagcaagccccacggcgtgtccatgaagcactatgactgtggggagagcggcaacaacttccggaggaagctgtgcctgagccacctgcagaagggggacaagggggagaagcactttgagtgcaatgaatgtgggaaggccttctgggagaagagccacctgaccaggcaccagagggtgcacacaggccagaagcccttccagtgcaatgaatgtgagaaggccttctgggacaagagcaacctgaccaagcaccagaggagccacactggagagaagccctttgagtgcaatgaatgtgggaaggccttcagccacaagagcgccctgaccctgcaccagaggacccacactggagagaagccctaccagtgcaatgcctgtgggaagaccttctgccagaagagtgacctgaccaagcaccagaggacccacacaggcctgaagccctatgagtgctatgaatgtgggaagagcttccgggtgaccagccacctgaaggtgcaccagaggacccacactggagagaagccctttgagtgcctggagtgtgggaagagcttcagcgagaagagcaacctgacccagcaccagaggatccacatcggggacaagagctatgagtgcaatgcctgtgggaagaccttctaccacaagagcctgctgaccaggcaccagatcatccacacaggctggaagccctatgagtgctatgaatgtgggaagaccttctgcctgaagagtgacctgactgtgcaccagaggacccacacaggccagaagccctttgcctgcccagaatgtgggaagttcttcagccacaagagcaccctgagccagcactaccgcacccacactggagagaagccctatgagtgccatgaatgtgggaagatcttctacaacaagagctacctgaccaagcacaacagaacccacactggagagaagccctatgagtgcaatgaatgtgggaaggccttctaccagaagagccagctgacccagcaccagaggatccacatcggggagaagccctacaagtgcaatgaatgtgggaaggccttctgccacaagagcgccctgattgtgcaccagaggacccacacccaggagaagccctacaagtgcaatgaatgtgggaagagcttctgtgtgaagagcggcctcatcttccacgagaggaagcacactggagagaagccctatgagtgcaatgaatgtgggaagttcttccgccacaagagcagcctgactgtgcaccaccgggcccacactggagagaagagctgccagtgcaatgaatgtgggaagatcttctacaggaagtctgagctggcccagcaccagaggagccacactggagagaagccctatgagtgcaacacctgcaggaagaccttcagccagaagagcaacctgattgtgcaccagaggaggcacatcggggagaacctgatgaatgagatggacatccggaacttccagccccaggtgtccctgcacaatgccagcgagtacagccactgtggggagagcccagatgacatcctgaatgtgcagtag

SEQ ID NO: 176778 - DNA, 2433 bp, synthetic construct; identical to SEQ ID NO: 176775
  misc_feature 1..2433: note = Description of Artificial Sequence: Synthetic coding sequence
  source 1..2433: mol_type = other DNA

SEQ ID NO: 176779 - DNA, 417 bp, synthetic construct; identical to SEQ ID NO: 176774
  misc_feature 1..417: note = Description of Artificial Sequence: Synthetic coding sequence
  source 1..417: mol_type = other DNA

SEQ ID NO: 176780 - DNA, 2337 bp, synthetic construct
  misc_feature 1..2337: note = Description of Artificial Sequence: Synthetic coding sequence
  source 1..2337: mol_type = other DNA
atgaacaaggtggaccagaagttccagggctctgtgtccttcaaggatgtgacagtgggcttcacccaggaggagtggcagcacctggaccccagccagagggccctgtacagagatgtgatgctggagaactacagcaacctggtgtctgtgggctactgtgcccacaagccagaggtgatcttccggctggagcagggcgaggagccctggaggctggaggaggagttccccagccagagcttccctgaggtgtggacagctgaccacctgaaggagaggagccaggagaaccagagcaagcacctgtgggaggtggtgttcatcaacaatgagatgctgaccaaggagcagggcaatgtcatcggcatccccttcaacatggatgtgagcagcttccccagcaggaagatgttctgccagtatgacagccggggcatgtccttcaacacagtgtctgagctggtgatcagcaagatcaactacctgggcaagaagagtgatgagttcaatgcctgtgggaagctgctgctgaacatcaagcatgatgagacccacacccgggagaagaatgaggtgctgaagaacagaaacaccctgagccaccgggagaacaccctgcagcacgagaagatccagaccctggaccacaactttgagtacagcatctgccaggagaccctgctggagaaggctgtgttcaacaccaggaagcgggagaatgctgaggagaacaactgtgactacaatgaatttggccgcaccttctgtgacagcagcagcctgctcttccaccagatcccccccagcaaggacagccactatgagttcagtgactgtgagaagttcctgtgtgtgaagagcaccctgagcaagcatgatggagtgcctgtgaagcactatgactgtggggagagcggcaacaacttccggaggaagctgtgcctgagccagctgcagaagggggacaagggggagaagcactttgagtgcaatgaatgtgggaaggccttctgggagaagagccacctgaccaggcaccagagggtgcacactggagagaagcacttccagtgcaaccagtgtgggaagaccttctgggagaagagcaacctgaccaagcaccagaggagccacactggagagaagccctttgagtgcaatgaatgtgggaaggccttcagccacaagagcgccctgaccctgcaccagaggacccacactggagagaagccctaccagtgcaatgcctgtgggaagaccttctaccagaagagtgacctgaccaagcaccagaggacccacacaggccagaagccctatgagtgctatgaatgtgggaagagcttctgcatgaacagccacctgactgtgcaccagaggacccacactggagagaagccctttgagtgcctggagtgtgggaagagcttctgccagaagagccacctgacccagcaccagaggacccacatcggggacaagccctatgagtgcaatgcctgtgggaagaccttctaccacaagtctgtgctgaccaggcaccagatcatccacacaggcctgaagccctatgagtgctatgaatgtgggaagaccttctgcctgaagagtgacctgaccatccaccagaggacccacactggagagaagccctttgcctgcccagaatgtgggaagttcttcagccacaagagcaccctgagccagcactaccgcacccacactggagagaagccctatgagtgccatgaatgtgggaagatcttctacaacaagagctacctgaccaagcacaacagaacccacactggagagaagccctatgagtgcaatgaatgtgggaagaccttctgccagaagagccagctgacccagcaccagaggatccacatcggggagaagccctatgagtgcaatgaatgtgggaaggccttctgccacaagagcgccctgattgtgcaccagaggacccacacccaggagaagccctacaagtgcaatgaatgtgggaagagcttctgtgtgaagagcggcctcatcctgcacgagaggaagcacactggagagaagccctatgagtgcaatgaatgtgggaagagcttcagccacaagagcagcctgactgtgcaccaccgggcccacactggagagaagagctgccagtgcaatgaatgtgggaagatcttctacaggaagagtgacctggccaagcaccagaggagccacactggagagaagccctatgagtgcaacacctgcaggaagaccttcagccagaagagcaacctgattgtgcaccagaggacccacatcggggagaagccctatgaatag

SEQ ID NO: 176781 - DNA, 2235 bp, synthetic construct
  misc_feature 1..2235: note = Description of Artificial Sequence: Synthetic coding sequence
  source 1..2235: mol_type = other DNA
atgaacaaggtggaccagaagttccagggctctgtgtccttcaaggatgtgacagtgggcttcacccaggaggagtggcagcacctggaccccagccagagggccctgtacagagatgtgatgctggagaactacagcaacctggtgtctgtgggcacagctgaccacctgaaggagaggagccaggagaaccagagcaagcacctgtgggaggtggtgttcatcaacaatgagatgctgaccaaggagcagggcaatgtcatcggcatccccttcaacatggatgtgagcagcttccccagcaggaagatgttctgccagtatgacagccggggcatgtccttcaacacagtgtctgagctggtgatcagcaagatcaactacctgggcaagaagagtgatgagttcaatgcctgtgggaagctgctgctgaacatcaagcatgatgagacccacacccgggagaagaatgaggtgctgaagaacagaaacaccctgagccaccgggagaacaccctgcagcacgagaagatccagaccctggaccacaactttgagtacagcatctgccaggagaccctgctggagaaggctgtgttcaacaccaggaagcgggagaatgctgaggagaacaactgtgactacaatgaatttggccgcaccttctgtgacagcagcagcctgctcttccaccagatcccccccagcaaggacagccactatgagttcagtgactgtgagaagttcctgtgtgtgaagagcaccctgagcaagcatgatggagtgcctgtgaagcactatgactgtggggagagcggcaacaacttccggaggaagctgtgcctgagccagctgcagaagggggacaagggggagaagcactttgagtgcaatgaatgtgggaaggccttctgggagaagagccacctgaccaggcaccagagggtgcacactggagagaagcacttccagtgcaaccagtgtgggaagaccttctgggagaagagcaacctgaccaagcaccagaggagccacactggagagaagccctttgagtgcaatgaatgtgggaaggccttcagccacaagagcgccctgaccctgcaccagaggacccacactggagagaagccctaccagtgcaatgcctgtgggaagaccttctaccagaagagtgacctgaccaagcaccagaggacccacacaggccagaagccctatgagtgctatgaatgtgggaagagcttctgcatgaacagccacctgactgtgcaccagaggacccacactggagagaagccctttgagtgcctggagtgtgggaagagcttctgccagaagagccacctgacccagcaccagaggacccacatcggggacaagccctatgagtgcaatgcctgtgggaagaccttctaccacaagtctgtgctgaccaggcaccagatcatccacacaggcctgaagccctatgagtgctatgaatgtgggaagaccttctgcctgaagagtgacctgaccatccaccagaggacccacactggagagaagccctttgcctgcccagaatgtgggaagttcttcagccacaagagcaccctgagccagcactaccgcacccacactggagagaagccctatgagtgccatgaatgtgggaagatcttctacaacaagagctacctgaccaagcacaacagaacccacactggagagaagccctatgagtgcaatgaatgtgggaagaccttctgccagaagagccagctgacccagcaccagaggatccacatcggggagaagccctatgagtgcaatgaatgtgggaaggccttctgccacaagagcgccctgattgtgcaccagaggacccacacccaggagaagccctacaagtgcaatgaatgtgggaagagcttctgtgtgaagagcggcctcatcctgcacgagaggaagcacactggagagaagccctatgagtgcaatgaatgtgggaagagcttcagccacaagagcagcctgactgtgcaccaccgggcccacactggagagaagagctgccagtgcaatgaatgtgggaagatcttctacaggaagagtgacctggccaagcaccagaggagccacactggagagaagccctatgagtgcaacacctgcaggaagaccttcagccagaagagcaacctgattgtgcaccagaggacccacatcggggagaagccctatgaatag

SEQ ID NO: 176782 - DNA, 1683 bp, synthetic construct
  misc_feature 1..1683: note = Description of Artificial Sequence: Synthetic coding sequence
  source 1..1683: mol_type = other DNA
atgctgctgctgctgagtgaccagctgctgctgacagccctgaggaagcccaacccccaggccatggccgccctcttcctgagcgccccaccccaggccgaggtgacctttgaagatgtggccgtgtacctgagccgggaggagtggggccgcctgggccctgcccagaggggcctgtacagagatgtgatgctggagacctacggcaacctggtgtccctgggcgtgggccctgctggccccaagccaggagtcatcagccagctggagagaggagatgagccctgggtgctggatgtgcagggcaccagcggcaaggagcacctgcgggtgaacagccctgccctgggcaccaggacagagtacaaggagctgaccagccaggagacctttggagaggaggacccccagggcagcgagcctgtggaggcctgtgaccacatcagcaagtctgagggcagcctggagaagctggtggagcagaggggccccagggctgtgaccctgaccaatggagagagcagccgggagagcggcggcaacctgcggctgctgagcaggcctgtgcctgaccagaggccccacaagtgtgacatctgtgagcagagctttgagcagaggagctacctgaacaaccacaagagggtgcacaggagcaagaagaccaacacagtgaggaacagcggggagatcttcagcgccaacctggtggtgaaggaggaccagaagatccccaccgggaagaagctgcactactgcagctactgtgggaagaccttccgctacagcgccaacctggtgaagcaccagaggctgcacacagaggagaagccctacaagtgtgatgaatgtgggaaggccttcagccagagctgtgagttcatcaaccacaggaggatgcacagcggggagatcccctaccgctgtgatgaatgtgggaagaccttcacccggcggcccaacctgatgaagcaccagaggatccacactggagagaagccctacaagtgtggagaatgtgggaagcacttcagcgcctacagcagcctcatctaccaccagaggatccacactggagagaagccctacaagtgcaatgactgtgggaaggccttcagtgatggcagcatcctgatccgccacaggaggacccacactggagagaagccctttgagtgcaaggaatgtgggaagggcttcacccagagcagcaacctgatccagcaccagaggatccacactggagagaagccctacaagtgcaatgaatgtgagaaggccttcatccagaagaccaagctggtggagcaccagaggagccacactggagagaagccctatgagtgcaatgactgtgggaaggtgttcagccagagcacccacctgatccagcaccagaggatccacactggagagaagccctacaagtgcagtgaatgtgggaaggccttccacaacagcagccgcctcatccaccaccagaggctgcaccacggggagaagccctaccgctgcagcgactgcaagaaggccttcagccagagcacctacctgatccagcaccggcgcatccacactggagagaagccctacaagtgcagtgaatgtgggaaggccttccgccacagcagcaacatgtgccagcaccagaggatccacctgcgggaggacttctccatgtag

SEQ ID NO: 176783 - DNA, 1620 bp, synthetic construct
  misc_feature 1..1620: note = Description of Artificial Sequence: Synthetic coding sequence
  source 1..1620: mol_type = other DNA
atggccgccctcttcctgagcgccccaccccaggccgaggtgacctttgaagatgtggccgtgtacctgagccgggaggagtggggccgcctgggccctgcccagaggggcctgtacagagatgtgatgctggagacctacggcaacctggtgtccctgggcgtgggccctgctggccccaagccaggagtcatcagccagctggagagaggagatgagccctgggtgctggatgtgcagggcaccagcggcaaggagcacctgcgggtgaacagccctgccctgggcaccaggacagagtacaaggagctgaccagccaggagaccttcggggaggaggacccccagggcagcgagcctgtggaggcctgtgaccacatcagcaagtctgagggcagcctggagaagctggtggagcagaggggccccagggctgtgaccctgaccaacggggagagcagccgggagagcggcggcaacctgcggctgctgagcaggcctgtgcctgaccagaggccccacaagtgtgacatctgtgagcagagctttgagcagaggagctacctgaacaaccacaagagggtgcacaggagcaagaagaccaacacagtgagaaattctggagagatcttcagcgccaacctggtggtgaaggaggaccagaagatccccaccgggaagaagctgcactactgcagctactgcggcaagaccttccgctacagcgccaacctggtgaagcaccagaggctgcacacagaggagaagccctacaagtgtgatgaatgtgggaaggccttcagccagagctgtgagttcatcaaccacaggaggatgcacagcggggagatcccctaccgctgtgatgaatgtgggaagaccttcacccggcggcccaacctgatgaagcaccagaggatccacactggagagaagccctacaagtgtggggagtgtgggaagcacttcagcgcctacagcagcctcatctaccaccagaggatccacactggagagaagccctacaagtgcaatgactgtgggaaggccttcagtgatggcagcatcctgatccgccacaggaggacccacactggagagaagccctttgagtgcaaggaatgtgggaagggcttcacccagagcagcaacctgatccagcaccagaggatccacactggagagaagccctacaagtgcaatgaatgtgagaaggccttcatccagaagaccaagctggtggagcaccagaggagccacactggagagaagccctatgaatgtaatgactgtgggaaggtgttcagccagagcacccacctgatccagcaccagaggatccacactggagagaagccctacaagtgcagtgaatgtgggaaggccttccacaacagcagccgcctcatccaccaccagaggctgcaccacggggagaagccctaccgctgcagcgactgcaagaaggccttcagccagagcacctacctgatccagcaccggcgcatccacactggagagaagccctacaagtgcagtgaatgtgggaaggccttccgccacagcagcaacatgtgccagcaccagaggatccacctgcgggaggacttctccatgtag

SEQ ID NO: 176784 - DNA, 1560 bp, synthetic construct
  misc_feature 1..1560: note = Description of Artificial Sequence: Synthetic coding sequence
  source 1..1560: mol_type = other DNA
atgtacctgatccgggagagccacgccagcggcagcagctctgtgaccagcagctgcagcctgcccagcgagagccccaccctgcggcagtggaggccctgcagctgcctgccccaccccaggcctggggtcatcagccagctggagagaggagatgagccctgggtgctggatgtgcagggcaccagcggcaaggagcacctgcgggtgaacagccctgccctgggcaccaggacagagtacaaggagctgaccagccaggagaccttcggggaggaggacccccagggcagcgagcctgtggaggcctgtgaccacatcagcaagtctgagggcagcctggagaagctggtggagcagaggggccccagggctgtgaccctgaccaacggggagagcagccgggagagcggcggcaacctgcggctgctgagcaggcctgtgcctgaccagaggccccacaagtgtgacatctgtgagcagagctttgagcagaggagctacctgaacaaccacaagagggtgcacaggagcaagaagaccaacacagtgagaaattctggagagatcttcagcgccaacctggtggtgaaggaggaccagaagatccccaccgggaagaagctgcactactgcagctactgcggcaagaccttccgctacagcgccaacctggtgaagcaccagaggctgcacacagaggagaagccctacaagtgtgatgaatgtgggaaggccttcagccagagctgtgagttcatcaaccacaggaggatgcacagcggggagatcccctaccgctgtgatgaatgtgggaagaccttcacccggcggcccaacctgatgaagcaccagaggatccacactggagagaagccctacaagtgtggggagtgtgggaagcacttcagcgcctacagcagcctcatctaccaccagaggatccacactggagagaagccctacaagtgcaatgactgtgggaaggccttcagtgatggcagcatcctgatccgccacaggaggacccacactggagagaagccctttgagtgcaaggaatgtgggaagggcttcacccagagcagcaacctgatccagcaccagaggatccacactggagagaagccctacaagtgcaatgaatgtgagaaggccttcatccagaagaccaagctggtggagcaccagaggagccacactggagagaagccctatgaatgtaatgactgtgggaaggtgttcagccagagcacccacctgatccagcaccagaggatccacactggagagaagccctacaagtgcagtgaatgtgggaaggccttccacaacagcagccgcctcatccaccaccagaggctgcaccacggggagaagccctaccgctgcagcgactgcaagaaggccttcagccagagcacctacctgatccagcaccggcgcatccacactggagagaagccctacaagtgcagtgaatgtgggaaggccttccgccacagcagcaacatgtgccagcaccagaggatccacctgcgggaggacttctccatgtag

SEQ ID NO: 176785 - DNA, 1584 bp, synthetic construct
  misc_feature 1..1584: note = Description of Artificial Sequence: Synthetic coding sequence
  source 1..1584: mol_type = other DNA
atgacagctgagctgcgggaggccatggccctggccccctggggccctgtgaaggtgaagaaggaggaggaggaggaggagaacttccctggccaggccagcagccagcaggtgcacagcgagaacatcaaggtgtgggcccctgtgcagggcctgcagacaggcctggatggcagcgaggaggaggagaagggccagaacatctcctgggacatggctgtggtgctgaaggccacccaggaggccccagctgccagcaccctgggcagctacagcctgcccggcaccctggccaagtctgagatcctggagacccacggcaccatgaacttcctgggcgctgagaccaagaacctgcagctgctggtgcccaagacagagatctgtgaggaggccgagaagcccctcatcatcagcgagcgcatccagaaggctgacccccagggccctgagctgggggaggcctgtgagaagggcaacatgctgaagaggcagaggatcaagcgggagaagaaggacttccggcaggtgattgtgaatgactgccacctgcctgagagcttcaaggaggaggagaaccagaagtgcaagaagagcggcggcaagtacagcctgaacagcggggctgtgaagaaccccaagacccagctgggccagaagcccttcacctgcagcgtgtgtgggaagggcttcagccagagcgccaacctggtggtgcaccagaggatccacactggagagaagccctttgaatgtcatgaatgtgggaaggccttcatccagagcgccaacctggtggtgcaccagaggatccacacaggccagaagccctacgtgtgcagcaaatgtgggaaggccttcacccagagcagcaacctgactgtgcaccagaagatccacagcctggagaagaccttcaagtgcaatgaatgtgagaaggccttctcctacagcagccagctggcccggcaccagaaggtgcacatcacagagaagtgctatgaatgtaatgaatgtgggaagaccttcaccaggagcagcaacctgattgtgcaccagaggatccacactggagagaagccctttgcctgcaatgactgtgggaaggccttcacccagagcgccaacctgattgtgcaccagaggagccacactggagagaagccctatgagtgcaaggaatgtgggaaggccttcagctgcttcagccacctgattgtgcaccagaggatccacacagctgagaagccctatgactgcagtgaatgtgggaaggccttcagccagctgagctgcctgattgtgcaccagaggatccacagcggggacctgccctacgtgtgcaatgaatgtgggaaggccttcacctgcagcagctacctgctgatccaccagaggatccacaatggagagaagccctacacctgcaatgaatgtgggaaggccttccggcagaggagcagcctgactgtgcaccagaggacccacactggagagaagccctatgaatgtgagaagtgtggggccgccttcatcagcaacagccacctgatgaggcaccacaggacccacctggtggagtag

SEQ ID NO: 176786 - DNA, 405 bp, synthetic construct
  misc_feature 1..405: note = Description of Artificial Sequence: Synthetic coding sequence
  source 1..405: mol_type = other DNA
atgacagctgagctgcgggaggccatggccctggccccctggggccctgtgaaggtgaagaaggaggaggaggaggaggagaacttccctggccaggccagcagccagcaggtgcacagcgagaacatcaaggtgtgggcccctgtgcagggcctgcagacaggcctggatggcagcgaggaggaggagaagggccagaacatctcctgggacatggctgtggtgctgaaggccacccaggaggccccagctgccagcaccctgggcagctacagcctgcccggcaccctggccaagtctgagatcctggagacccacggcaccatgaacttcctgggcgctgagaccaagaacctgcagctgctggtgcccaagacagagatctgtgaggaggccgagaagtag

SEQ ID NO: 176787 - DNA, 339 bp, synthetic construct
  misc_feature 1..339: note = Description of Artificial Sequence: Synthetic coding sequence
  source 1..339: mol_type = other DNA
atgacagctgagctgcgggaggccatggccctggccccctggggccctgtgaaggtgaagaaggaggaggaggaggaggagaacttccctggccaggccagcagccagcaggtgcacagcgagaacatcaaggtgtgggcccctgtgcagggcctgcagacaggcctggatggcagcgaggaggaggagaagggccagaacatctcctgggacatggctgtggtgctgaaggccacccaggaggccccagctgccagcaccctgggcagctacagcctgcccggcaccctggccaagtctgagatcctggagacccacggcaccatgaacttcctgtag

SEQ ID NO: 176788 - DNA, 1104 bp, synthetic construct
  misc_feature 1..1104: note = Description of Artificial Sequence: Synthetic coding sequence
  source 1..1104: mol_type = other DNA
atgctgaagaggcagaggatcaagcgggagaagaaggacttccggcaggtgattgtgaatgactgccacctgcctgagagcttcaaggaggaggagaaccagaagtgcaagaagagcggcggcaagtacagcctgaacagcggggctgtgaagaaccccaagacccagctgggccagaagcccttcacctgcagcgtgtgtgggaagggcttcagccagagcgccaacctggtggtgcaccagaggatccacactggagagaagccctttgaatgtcatgaatgtgggaaggccttcatccagagcgccaacctggtggtgcaccagaggatccacacaggccagaagccctacgtgtgcagcaaatgtgggaaggccttcacccagagcagcaacctgactgtgcaccagaagatccacagcctggagaagaccttcaagtgcaatgaatgtgagaaggccttctcctacagcagccagctggcccggcaccagaaggtgcacatcacagagaagtgctatgaatgtaatgaatgtgggaagaccttcaccaggagcagcaacctgattgtgcaccagaggatccacactggagagaagccctttgcctgcaatgactgtgggaaggccttcacccagagcgccaacctgattgtgcaccagaggagccacactggagagaagccctatgagtgcaaggaatgtgggaaggccttcagctgcttcagccacctgattgtgcaccagaggatccacacagctgagaagccctatgactgcagtgaatgtgggaaggccttcagccagctgagctgcctgattgtgcaccagaggatccacagcggggacctgccctacgtgtgcaatgaatgtgggaaggccttcacctgcagcagctacctgctgatccaccagaggatccacaatggagagaagccctacacctgcaatgaatgtgggaaggccttccggcagaggagcagcctgactgtgcaccagaggacccacactggagagaagccctatgaatgtgagaagtgtggggccgccttcatcagcaacagccacctgatgaggcaccacaggacccacctggtggagtag

SEQ ID NO: 176789 - DNA, 981 bp, synthetic construct
  misc_feature 1..981: note = Description of Artificial Sequence: Synthetic coding sequence
  source 1..981: mol_type = other DNA
atggacctgacagccatctatgagagcctgctgagcctgagcccagatgtgcctgtgcccagcgaccatggaggaacagagagcagccctggctggggcagcagcggcccctggagcctgagccccagcgacagcagccccagcggcgtgaccagccggctgcccggccgcagcaccagcctggtggagggccgcagctgtggctgggtgcccccacctcctggctttgcccccctggccccccggctgggccctgagctgagccccagccccaccagccccacagccaccagcaccacccccagccgctacaagacagagctgtgcaggaccttcagcgagagcggccgctgccgctacggggccaagtgccagtttgcccacggcctgggggagctgcggcaggccaacagacaccccaagtacaagacagagctgtgccacaagttctacctgcagggccgctgcccctacggcagccgctgccacttcatccacaaccccagcgaggacctggccgcccctggccacccccctgtgctgcggcagagcatctccttcagcggcctgcccagcggccgccgcaccagccccccacctcctggcctggccggccccagcctgagcagcagcagcttcagccccagcagcagccccccacctcctggggacctgcccctgagccccagcgccttctctgctgcccctggcacccccctggcccggcgggaccccacccctgtgtgctgccccagctgccggcgggccacccccatctctgtgtggggccccctgggcggcctggtgaggaccccatctgtgcagagcctgggcagtgaccctgatgaatatgccagcagcggcagcagcctgggcggcagtgacagccctgtgtttgaagctggggtgtttgccccaccccagcctgtggccgccccccggcggctgcccatcttcaaccgcatctctgtgtctgagtag

SEQ ID NO: 176790 - DNA, 1017 bp, synthetic construct
  misc_feature 1..1017: note = Description of Artificial Sequence: Synthetic coding sequence
  source 1..1017: mol_type = other DNA
atgaccaccaccctggtgtctgccaccatctttgacctgtctgaggtgctgtgcaagggcaacaagatgctgaactacagcgcccccagcgctgggggctgcctgctggacaggaaggctgtgggcaccccagctgggggcggcttccccaggaggcacagcgtgaccctgcccagcagcaagttccaccagaaccagctgctgagcagcctgaagggggagcccgccccagccctgagcagccgggacagccgcttccgggacaggagcttcagcgagggcggggagcggctgctgcccacccagaagcagcccggcggcggccaggtgaacagcagccgctacaagacagagctgtgccggccctttgaagaaaatggagcctgcaagtatggagacaagtgccagtttgcccacggcatccacgagctgcggagcctgaccaggcaccccaagtacaagacagagctgtgcaggaccttccacaccatcggcttctgcccctacggcccccgctgccacttcatccacaatgctgaggagcggcgggccctggccggggcccgggacctgtctgctgaccggccccggctgcagcacagcttctcctttgctggcttccccagcgctgctgccacagctgctgccaccggcctgctggacagccccaccagcatcaccccaccacccatcctgtctgcagatgacctgctgggcagccccaccctgcctgatggcaccaacaacccctttgccttcagcagccaggagctggccagcctgtttgcccccagcatgggcctgcccggcggcggcagccccaccaccttcctgttccggcccatgtctgagagcccccacatgtttgacagcccccccagcccccaggacagcctgagtgaccaggagggctacctgagcagcagcagcagcagccacagcggcagtgacagccccaccctggacaacagccggcggctgcccatcttcagccggctgagcatcagtgatgactag

SEQ ID NO: 176791 - DNA, 501 bp, synthetic construct
  misc_feature 1..501: note = Description of Artificial Sequence: Synthetic coding sequence
  source 1..501: mol_type = other DNA
atgaacacctacaccaggtctgccagcttcacccccaagaccttcaccttccccctggcccagaacagaaccagccaccccaccaccaccagcaagctgaagtacctgggccggcccagccccaggagagatgccctgcaggccaatggagagggccctgaggtgggccctggaacagaggagcccgcccaccggctgcctgtgggcagcggcagcgctggggaggccgccgccagcctgggcacagcccgggtgcgcagcggccgggcagaatgtacagccaagctggccggagatggccacgcccggctggccagcgccttcctgcacagaagagctgccctgcccccacccctgggcacctgccggccccggctgggggagggcggcagcgccccagccctgggccccagcccccggcggggcagaagagtgtctgagggcctgcgggacagcctgccccccctgggcagcctgaccctgggcaagagccccaagtag

SEQ ID NO: 176792 - DNA, 966 bp, synthetic construct
  misc_feature 1..966: note = Description of Artificial Sequence: Synthetic coding sequence
  source 1..966: mol_type = other DNA
atgaccaccaccctggtgtctgccaccatctttgacctgtctgaggtgctgtgcaagggcaacaagatgctgaactacagcgcccccagcgctgggggctgcctgctggacaggaaggctgtgggcaccccagctgggggcggcttccccaggaggcacagcgtgaccctgcccagcagcaagttccaccagaaccagctgctgagcagcctgaagggggagcccgccccagccctgagcagccgggacagccgcttccgggacaggagcttcagcgagggcggggagcggctgctgcccacccagaagcagccctttgaggagaatggagcctgcaagtacggggacaagtgccagtttgcccacggcatccacgagctgcggagcctgaccaggcaccccaagtacaagacagagctgtgcaggaccttccacaccatcggcttctgcccctacggcccccgctgccacttcatccacaatgctgaggagcggcgggccctggccggggcccgggacctgtctgctgaccggccccggctgcagcacagcttctcctttgctggcttccccagcgctgctgccacagctgctgccaccggcctgctggacagccccaccagcatcaccccaccacccatcctgtctgcagatgacctgctgggcagccccaccctgcctgatggcaccaacaacccctttgccttcagcagccaggagctggccagcctgtttgcccccagcatgggcctgcccggcggcggcagccccaccaccttcctgttccggcccatgtctgagagcccccacatgtttgacagcccccccagcccccaggacagcctgagtgaccaggagggctacctgagcagcagcagcagcagccacagcggcagtgacagccccaccctggacaacagccggcggctgcccatcttcagccggctgagcatcagtgatgactag

SEQ ID NO: 176793 - DNA, 1017 bp, synthetic construct; identical to SEQ ID NO: 176790
  misc_feature 1..1017: note = Description of Artificial Sequence: Synthetic coding sequence
  source 1..1017: mol_type = other DNA

SEQ ID NO: 176794 - DNA, 1485 bp, synthetic construct
  misc_feature 1..1485: note = Description of Artificial Sequence: Synthetic coding sequence
  source 1..1485: mol_type = other DNA
atgagcaccaccctgctgagcgccttctatgatgtggacttcctgtgcaagacagagaagagcctggccaacctgaacctgaacaacatgctggacaagaaggctgtgggcacccctgtggccgccgcccccagcagcggctttgcccctggcttcctgcggcggcacagcgccagcaacctgcacgccctggcccacccagcccccagccctggcagctgcagccccaagtttcctggagctgccaacggcagcagctgtggcagcgctgctgctgggggccccaccagctatggcaccctgaaggagcccagcggcggcggcggcacagccctgctgaacaaggagaacaagttccgggaccgctccttctctgaaaatggagacaggagccagcacctgctgcacctgcagcagcagcagaagggcggcggcggcagccagatcaacagcacccgctacaagacagagctgtgccggccctttgaggagagcggcacctgcaagtacggggagaagtgccagtttgcccacggcttccacgagctgcggagcctgaccaggcaccccaagtacaagacagagctgtgcaggaccttccacaccatcggcttctgcccctacggcccccgctgccacttcatccacaatgctgatgaaagaagacctgcccccagcggcggggccagcggggacctgcgggccttcggcaccagagatgccctgcacctgggcttcccccgggagccccggcccaagctgcaccacagcctgtccttcagcggcttccccagcggccaccaccagcccccaggcggcctggagagccccctgctgctggacagccccaccagcaggaccccacctccacccagctgcagcagcgccagcagctgcagcagcagcgccagcagctgcagcagcgccagcgctgccagcacccccagcggggcccccacctgctgtgccagcgctgctgctgctgctgctgctgccctgctgtatggaactggaggagctgaggacctgctggcccctggggccccctgtgccgcctgcagcagcgccagctgtgccaacaatgcctttgcctttggacctgagctgagcagcctcatcacccccctggccatccagacccacaactttgctgctgtggccgctgctgcctactaccgcagccagcagcagcagcagcagcagggcctggcccccccagcccagcccccagccccacccagcgccaccctgcctgctggagctgctgccccacccagcccccccttctccttccagctgccccggcggctgagtgacagccctgtgtttgatgccccacccagccccccagacagcctgagtgaccgggacagctacctgagcggcagcctgagcagcggcagcctgagcggcagcgagagccccagcctggaccctggaagaaggctgcccatcttcagccggctgagcatcagtgatgactag

SEQ ID NO: 176795 - DNA, 651 bp, synthetic construct
  misc_feature 1..651: note = Description of Artificial Sequence: Synthetic coding sequence
  source 1..651: mol_type = other DNA
atgtctgccctgggccagatcaccatcaccgtgagccgctgctggaacacagaaagaaaccagacagacaagaacccctgcctgcatggagcctacctgcagctgcgggagaccgtgaagaacaagagcacccacctgaagaagcccctgatgaagcaggccccaccctggaaggaccacctgaccttccagcccctgcaccctgctgagaggaagacccaggtgtggcgctggcagagcggcaacagcagtgacctggagaccaccagcagcgccagcccctggcccaccggcagcaacagagatgtggtgctgaacaccctggccgagagctgctgcggcctgtctgagctgatcacagccccaccctatgccggcgtgtccatccagggcttcagccagatctgggtgctcttccccttctgtggcggcaccttccaccacaatgagaaggatgtgctgggcctgcaggactttgagcgggagagcgtgtccaccagccagagcaggaacatcagcctgctgaccctgggccagctgcagaactgtgtgattggcaagctgaccatcatcgacctgctgacagagcacctgctgggcgtgagacatggagtcatctgcttcccctggggcctgcccagcagcagctag

SEQ ID NO: 176796 - DNA, 1224 bp, synthetic construct
  misc_feature 1..1224: note = Description of Artificial Sequence: Synthetic coding sequence
  source 1..1224: mol_type = other DNA
atgcagcagaaggcctttgaggagagccgctacccctggcaggagagctttgaaaatgtggccgtgtgcctgcccctgcgctgcccccgctgtggggaccacacccgcttccgcagcctgagcagcctgcgggcccacctggagttcagccacagctatgaggagaggaccctgctgaccaagtgcagcctcttccccagcctgaaggacacagacctggtgaccagcagcgagctgctgaagccaggcaagctgcagagcagtggaaatgtggtgaagcagaagcccagctatgtgaacctgtacagcatcagccatgagcacagcaaggacaggaagccctttgaggtggtggccgagaggcctgtgtcctatgtgcagacctacacagccatggacctgcacgccgacagcctggatggcaccaggagcggccctggcctgcccaccagtgacaccaaggccagctttgaggcccacgtgcgggagaagttcaacaggatggtggaggccgtggacaggaccatcgagaagagaattgacaagctgaccaaggagctggcccagaagacagctgagctgctggaggtgcgggccgcctttgtgcagctgacccagaagaagcaggaggtgcagaggcgggagcgggccctgaaccggcaggtggatgtggccgtggagatgattgctgtgctgcggcagaggctgacagaaagtgaggaggagctgctgaggaaggaggaggaggtggtgaccttcaaccacttcctggaggccgctgctgagaaggaggtgcagggcaaggcccggctgcaggacttcatcgagaacctgctgcagagggtggagctggccgagaagcagctggagtactaccagagccagcaggccagcggctttgtgcgggacctgagcggccacgtgctgacagacatcagcagcaacaggaagcccaagtgcctgagccggggccacccccacagcgtgtgcaaccacccagacctgaaggcccacttccaccccaagggcaggaaccacctgaagaaggccaaggatgaccgggcctccatgcagcctgccaaggccatccacgagcaggccgagagcagccgggacctgtgccggccccccaagaagggggagctgctgggctttggaaggaagggcaacatccggcccaagatggccaagaagaagcccacagccatcgtgaacatcatctag

SEQ ID NO: 176797 - DNA, 1002 bp, synthetic construct
  misc_feature 1..1002: note = Description of Artificial Sequence: Synthetic coding sequence
  source 1..1002: mol_type = other DNA
atgcagcagaaggcctttgaggagagccgctacccctggcaggagagctttgaaaatgtggccgtgtgcctgcccctgcgctgcccccgctgtggggaccacacccgcttccgcagcctgagcagcctgcgggcccacctggagttcagccacagctatgaggagaggaccctgctgaccaagtgcagcctcttccccagcctgaaggacacagacctggtgaccagcagcgagctgctgaagccaggcaagctgcagagcagtggaaatgtggtgaagcagaagcccagctatgtgaacctgtacagcatcagccatgagcacagcaaggacaggaagccctttgaggtggtggccgagaggcctgtgtcctatgtgcagacctacacagccatggacctgcacgccgacagcctggatggcaccaggagcggccctggcctgcccaccagtgacaccaaggccagctttgaggcccacgtgcgggagaagttcaacaggatggtggaggccgtggacaggaccatcgagaagagaattgacaagctgaccaaggagctggcccagaagacagctgagctgctggaggtgcgggccgcctttgtgcagctgacccagaagaagcaggaggtgcagaggcgggagcgggccctgaaccggcaggtggatgtggccgtggagatgattgctgtgctgcggcagaggctgacagaaagtgaggaggagctgctgaggaaggaggaggaggtggtgaccttcaaccacttcctggaggccgctgctgagaaggaggtgcagggcaaggcccggctgcaggacttcatcgagaacctgctgcagagggtggagctggccgagaagcagctggagtactaccagagccagcaggccagcggctttgtgcgggacctgagcggccacgtgtcctggaagggagctggggaggcccggctggtgtgccagaatgacctggagctggaggagagcgccatcgtggagtag

SEQ ID NO: 176798 - DNA, 1389 bp, synthetic construct
  misc_feature 1..1389: note = Description of Artificial Sequence: Synthetic coding sequence
  source 1..1389: mol_type = other DNA
atgcagcagaaggcctttgaggagagccgctacccctggcaggagagctttgaaaatgtggccgtgtgcctgcccctgcgctgcccccgctgtggggaccacacccgcttccgcagcctgagcagcctgcgggcccacctggagttcagccacagctatgaggagaggaccctgctgaccaagtgcagcctcttccccagcctgaaggacacagacctggtgaccagcagcgagctgctgaagccaggcaagctgcagagcagtggaaatgtggtgaagcagaagcccagctatgtgaacctgtacagcatcagccatgagcacagcaaggacaggaagccctttgaggtggtggccgagaggcctgtgtcctatgtgcagacctacacagccatggacctgcacgccgacagcctggatggcaccaggagcggccctggcctgcccaccagtgacaccaaggccagctttgaggcccacgtgcgggagaagttcaacaggatggtggaggccgtggacaggaccatcgagaagagaattgacaagctgaccaaggagctggcccagaagacagctgagctgctggaggtgcgggccgcctttgtgcagctgacccagaagaagcaggaggtgcagaggcgggagcgggccctgaaccggcaggtggatgtggccgtggagatgattgctgtgctgcggcagaggctgacagaaagtgaggaggagctgctgaggaaggaggaggaggtggtgaccttcaaccacttcctggaggccgctgctgagaaggaggtgcagggcaaggcccggctgcaggacttcatcgagaacctgctgcagagggtggagctggccgagaagcagctggagtactaccagagccagcaggccagcggctttgtgcgggacctgagcggccacgtgtcctggaagggagctggggaggcccggctggtgtgccagaatgacctggagctggagatcttcggccacatcaaccaccacctgagcggcctgaaggacagccactgcctggtgttcctgcaggcccctcctgtgccctggatcatcctggccagcttcctgtggatcctgggcaacccctggaccagcagcacagccacagctggcttcagccagatctgggtgctcttccccttctgtggcggcaccttccaccacaatgagaaggatgtgctgggcctgcaggactttgagcgggagagcgtgtccaccagccagagcaggaacatcagcctgctgaccctgggccagctgcagaactgtgtgattggcaagctgaccatcatcgacctgctgacagagcacctgctgggcgtgagacatggagtcatctgcttcccctggggcctgcccagcagcagctag

SEQ ID NO: 176799 - DNA, 162 bp, synthetic construct
  misc_feature 1..162: note = Description of Artificial Sequence: Synthetic coding sequence
  source 1..162: mol_type = other DNA
atgcagcagaaggcctttgaggagagccgctacccctggcaggagagctttgaaaatgtggccgtgtgcctgcccctgcgctgcccccgctgtggggaccacacccgcttccgcagcctgagcagcctgcgggcccacctggagttcagccacagctactag

SEQ ID NO: 176800 - DNA, 1893 bp, synthetic construct
  misc_feature 1..1893: note = Description of Artificial Sequence: Synthetic coding sequence
  source 1..1893: mol_type = other DNA
atgtctgtgtcctctggagtgcagatcctgaccaagccagagaccgtggacagaagaagatctgctgagaccaccaaggaggccggccggcccctggagatggctgtgtctgagcctgaggccagcgctgctgagtggaagcagctggaccctgcccagagcaacctgtacaatgatgtgatgctggagaactactgcaaccaggcctccatgggctgccaggcccccaagccagacatgatcagcaagctggagaagggggaggccccctggctgggcaagggcaagaggcccagccagggctgccccagcaagatcgcccggcccaagcagaaggagacagatggcaaggtgcagaaggatgatgaccagctggagaacatccagaagagccagaacaagctgctgcgggaggtggccgtgaagaagaagacccaggccaagaagaatggaagtgactgtggcagcctgggcaagaagaacaacctgcacaagaagcacgtgcccagcaagaagaggctgctgaagtttgagagctgtgggaagatcctgaagcagaacctggacctgcctgaccacagcaggaactgtgtgaagaggaagagtgatgctgccaaggagcacaagaagagcttcaaccacagcctgagtgacaccaggaagggcaagaagcagacaggcaagaagcatgagaagctgagcagccacagcagcagtgacaagtgcaacaagacaggcaagaagcatgacaagctgtgctgccacagcagcagccacatcaagcaggacaagatccagacaggagagaagcatgagaagagccccagcctgagcagcagcaccaagcatgagaagccccaggcctgtgtgaagccctatgagtgcaaccagtgtgggaaggtgctgagccacaagcagggcctgattgaccaccagagggtgcacactggagagaagccctatgagtgcaatgaatgtggcatcgccttcagccagaagagccacctggtggtgcaccagaggacccacactggagagaagccctatgagtgcatccagtgtgggaaggcccacggccacaagcacgccctgacagaccacctgcgcatccacactggagagaagccctatgaatgtgctgaatgtgggaagaccttccgccacagcagcaacctgatccagcacgtgcgcagccacactggagagaagccctatgagtgcaaggaatgtgggaagagcttccgctacaacagcagcctgacagaacatgtgaggacccacactggagagatcccctatgagtgcaatgaatgtgggaaggccttcaagtacagcagcagcctgaccaagcacatgaggatccacactggagagaagccctttgagtgcaatgaatgtgggaaggccttcagcaagaagagccacctgatcatccaccagaggacccacaccaaggagaagccctacaagtgcaatgaatgtgggaaggccttcggccacagcagcagcctgacctaccacatgaggacccacactggagagagcccctttgagtgcaaccagtgtgggaagggcttcaagcagatcgagggcctgacccagcaccagagggtgcacactggagagaagccctatgagtgcaatgaatgtgggaaggccttcagccagaagagccacctgattgtgcaccagaggacccacactggagagaagccctatgagtgcaatgaatgtgagaaggccttcaatgccaagagccagctggtgatccaccagaggagccacactggagagaagccctatgagtgcaatgaatgtgggaagaccttcaagcagaatgccagcctgaccaagcacgtgaagacccacagcgaggacaagagccatgaatag

SEQ ID NO: 176801 - DNA, 1938 bp, synthetic construct
  misc_feature 1..1938: note = Description of Artificial Sequence: Synthetic coding sequence
  source 1..1938: mol_type = other DNA
atgtctgtgtcctctggagtgcagatcctgaccaagccagagaccgtggacagaagaagatctgctgagaccaccaaggaggccggccggcccctggagatggctgtgtctgagcctgaggccagcgctgctgtgtctgtgaccttcaagcacgtgaccatggccttcacccagaaggagtggaagcagctggaccctgcccagagcaacctgtacaatgatgtgatgctggagaactactgcaaccaggcctccatgggctgccaggcccccaagccagacatgatcagcaagctggagaagggggaggccccctggctgggcaagggcaagaggcccagccagggctgccccagcaagatcgcccggcccaagcagaaggagacagatggcaaggtgcagaaggatgatgaccagctggagaacatccagaagagccagaacaagctgctgcgggaggtggccgtgaagaagaagacccaggccaagaagaatggaagtgactgtggcagcctgggcaagaagaacaacctgcacaagaagcacgtgcccagcaagaagaggctgctgaagtttgagagctgtgggaagatcctgaagcagaacctggacctgcctgaccacagcaggaactgtgtgaagaggaagagtgatgctgccaaggagcacaagaagagcttcaaccacagcctgagtgacaccaggaagggcaagaagcagacaggcaagaagcatgagaagctgagcagccacagcagcagtgacaagtgcaacaagacaggcaagaagcatgacaagctgtgctgccacagcagcagccacatcaagcaggacaagatccagacaggagagaagcatgagaagagccccagcctgagcagcagcaccaagcatgagaagccccaggcctgtgtgaagccctatgagtgcaaccagtgtgggaaggtgctgagccacaagcagggcctgattgaccaccagagggtgcacactggagagaagccctatgaatgtaatgaatgtggcatcgccttcagccagaagagccacctggtggtgcaccagaggacccacactggagagaagccctatgagtgcatccagtgtgggaaggcccacggccacaagcacgccctgacagaccacctgcgcatccacactggagagaagccctatgaatgtgccgagtgtgggaagaccttccgccacagcagcaacctgatccagcacgtgcgcagccacactggagagaagccctatgagtgcaaggaatgtgggaagagcttccgctacaacagcagcctgacagagcacgtgaggacccacactggagagatcccctatgaatgtaatgaatgtgggaaggccttcaagtacagcagcagcctgaccaagcacatgaggatccacactggagagaagccctttgaatgtaatgaatgtgggaaggccttcagcaagaagagccacctgatcatccaccagaggacccacaccaaggagaagccctacaagtgcaatgaatgtgggaaggccttcggccacagcagcagcctgacctaccacatgaggacccacactggagagagcccctttgagtgcaaccagtgtgggaagggcttcaagcagatcgagggcctgacccagcaccagagggtgcacactggagagaagccctatgaatgtaatgaatgtgggaaggccttcagccagaagagccacctgattgtgcaccagaggacccacactggagagaagccctatgaatgtaatgaatgtgagaaggccttcaatgccaagagccagctggtgatccaccagaggagccacactggagagaagccctatgaatgtaatgaatgtgggaagaccttcaagcagaatgccagcctgaccaagcacgtgaagacccacagcgaggacaagagccatgaatag

SEQ ID NO: 176802 - DNA, 1896 bp, synthetic construct
  misc_feature 1..1896: note = Description of Artificial Sequence: Synthetic coding sequence
  source 1..1896: mol_type = other DNA
atgtctgtgtcctctggagtgcagatcctgaccaagccagagaccgtggacagaagaagatctgctgagaccaccaaggaggccggccggcccctggagatggctgtgtctgagcctgaggccagcgctgccaaggagtggaagcagctggaccctgcccagagcaacctgtacaatgatgtgatgctggagaactactgcaaccaggcctccatgggctgccaggcccccaagccagacatgatcagcaagctggagaagggggaggccccctggctgggcaagggcaagaggcccagccagggctgccccagcaagatcgcccggcccaagcagaaggagacagatggcaaggtgcagaaggatgatgaccagctggagaacatccagaagagccagaacaagctgctgcgggaggtggccgtgaagaagaagacccaggccaagaagaatggaagtgactgtggcagcctgggcaagaagaacaacctgcacaagaagcacgtgcccagcaagaagaggctgctgaagtttgagagctgtgggaagatcctgaagcagaacctggacctgcctgaccacagcaggaactgtgtgaagaggaagagtgatgctgccaaggagcacaagaagagcttcaaccacagcctgagtgacaccaggaagggcaagaagcagacaggcaagaagcatgagaagctgagcagccacagcagcagtgacaagtgcaacaagacaggcaagaagcatgacaagctgtgctgccacagcagcagccacatcaagcaggacaagatccagacaggagagaagcatgagaagagccccagcctgagcagcagcaccaagcatgagaagccccaggcctgtgtgaagccctatgagtgcaaccagtgtgggaaggtgctgagccacaagcagggcctgattgaccaccagagggtgcacactggagagaagccctatgaatgtaatgaatgtggcatcgccttcagccagaagagccacctggtggtgcaccagaggacccacactggagagaagccctatgagtgcatccagtgtgggaaggcccacggccacaagcacgccctgacagaccacctgcgcatccacactggagagaagccctatgaatgtgccgagtgtgggaagaccttccgccacagcagcaacctgatccagcacgtgcgcagccacactggagagaagccctatgagtgcaaggaatgtgggaagagcttccgctacaacagcagcctgacagagcacgtgaggacccacactggagagatcccctatgaatgtaatgaatgtgggaaggccttcaagtacagcagcagcctgaccaagcacatgaggatccacactggagagaagccctttgaatgtaatgaatgtgggaaggccttcagcaagaagagccacctgatcatccaccagaggacccacaccaaggagaagccctacaagtgcaatgaatgtgggaaggccttcggccacagcagcagcctgacctaccacatgaggacccacactggagagagcccctttgagtgcaaccagtgtgggaagggcttcaagcagatcgagggcctgacccagcaccagagggtgcacactggagagaagccctatgaatgtaatgaatgtgggaaggccttcagccagaagagccacctgattgtgcaccagaggacccacactggagagaagccctatgaatgtaatgaatgtgagaaggccttcaatgccaagagccagctggtgatccaccagaggagccacactggagagaagccctatgaatgtaatgaatgtgggaagaccttcaagcagaatgccagcctgaccaagcacgtgaagacccacagcgaggacaagagccatgaatag

SEQ ID NO: 176803 - DNA, 1653 bp, synthetic construct
  misc_feature 1..1653: note = Description of Artificial Sequence: Synthetic coding sequence
  source 1..1653: mol_type = other DNA
atgcccctgcagggctctgtgtccttcaaggatgtgacagtggacttcacccaggaggagtggcagcagctggaccctgcccagaaggccctgtacagagatgtgatgctggagaactactgccactttgtgtctgtgggcttccacatggccaagccagacatgatcaggaagctggagcagggcgaggagctgtggacccagaggatcttccccagctacagctacctggaggaggatggcaagacagaagatgtgctggtgaagttcaaggagtaccaggacagacacagccggcccctcatcttcatcaaccacaagaagctgatcaaggagaggagcaacatctacggcaagaccttcaccctgggcaagaaccgcatcagcaagaccatcctgtgtgagtacaagccagatggcaaggtgctgaagaacatcagcgagctggtgatccggaacatcagccccatcaaggagaagtttggagacagcacaggctgggagaagagcctgctgaacaccaagcatgagaagatccaccctgctgtgaacctgcacaagcagacagagcgggtgctgagcggcaagcaggagctgatccagcaccagaaggtgcaggcccctgagcagccctttgaccacaatgaatgtgagaagagcttcctgatgaagggcatgctgttcacccacacccgggcccacagaggagagaggacctttgagtacaacaaggatggcatcgccttcatcgagaagagcagcctgtctgtgcaccccagcaacctgatggagaagaagcccagcgcctacaacaagtatggcaagttcctgtgcaggaagcctgtgttcatcatgccccagaggccccagacagaggagaagcccttccactgcccctactgcggcaacaacttccggaggaagagctacctgattgagcaccagaggatccacactggagagaagccctacgtgtgcaaccagtgtgggaaggccttccggcagaagacagccctgaccctgcacgagaagacccacatcgagggcaagcccttcatctgcatcgactgtgggaagagcttccggcagaaggccaccctgaccaggcaccacaagacccacactggagagaaggcctatgaatgtccccagtgtggcagcgccttcaggaagaagagctacctgattgaccaccagaggacccacactggagagaagccctaccagtgcaatgaatgtgggaaggccttcatccagaagaccaccctgactgtgcaccagaggacccacactggagagaagccctacatctgcaatgaatgtgggaagagcttctgccagaagaccaccctgaccctgcaccagaggatccacactggagagaagccctacatctgcaatgaatgtgggaagagcttccggcagaaggccatcctgactgtgcaccaccgcatccacactggagagaagagcaatggctgcccccagtgtgggaaggccttcagcaggaagagcaacctgatccgccaccagaagacccacactggagagaagccctatgagtgcaagcagtgtgggaagttcttcagctgcaagagcaacctgattgtgcaccagaagacccacaaggtggagaccaccggcatccagtag

SEQ ID NO: 176804 - DNA, 1650 bp, synthetic construct
  misc_feature 1..1650: note = Description of Artificial Sequence: Synthetic coding sequence
  source 1..1650: mol_type = other DNA
atgagccagggctctgtgtccttcaaggatgtgacagtggacttcacccaggaggagtggcagcagctggaccctgcccagaaggccctgtacagagatgtgatgctggagaactactgccactttgtgtctgtgggcttccacatggccaagccagacatgatcaggaagctggagcagggcgaggagctgtggacccagaggatcttccccagctacagctacctggaggaggatggcaagacagaagatgtgctggtgaagttcaaggagtaccaggacagacacagccggcccctcatcttcatcaaccacaagaagctgatcaaggagaggagcaacatctacggcaagaccttcaccctgggcaagaaccgcatcagcaagaccatcctgtgtgagtacaagccagatggcaaggtgctgaagaacatcagcgagctggtgatccggaacatcagccccatcaaggagaagtttggagacagcacaggctgggagaagagcctgctgaacaccaagcatgagaagatccaccctgctgtgaacctgcacaagcagacagagcgggtgctgagcggcaagcaggagctgatccagcaccagaaggtgcaggcccctgagcagccctttgaccacaatgaatgtgagaagagcttcctgatgaagggcatgctgttcacccacacccgggcccacagaggagagaggacctttgagtacaacaaggatggcatcgccttcatcgagaagagcagcctgtctgtgcaccccagcaacctgatggagaagaagcccagcgcctacaacaagtatggcaagttcctgtgcaggaagcctgtgttcatcatgccccagaggccccagacagaggagaagcccttccactgcccctactgcggcaacaacttccggaggaagagctacctgattgagcaccagaggatccacactggagagaagccctacgtgtgcaaccagtgtgggaaggccttccggcagaagacagccctgaccctgcacgagaagacccacatcgagggcaagcccttcatctgcatcgactgtgggaagagcttccggcagaaggccaccctgaccaggcaccacaagacccacactggagagaaggcctatgagtgcccccagtgtggcagcgccttcaggaagaagagctacctgattgaccaccagaggacccacactggagagaagccctaccagtgcaatgaatgtgggaaggccttcatccagaagaccaccctgactgtgcaccagaggacccacactggagagaagccctacatctgcaatgaatgtgggaagagcttctgccagaagaccaccctgaccctgcaccagaggatccacactggagagaagccctacatctgcaatgaatgtgggaagagcttccggcagaaggccatcctgactgtgcaccaccgcatccacactggagagaagagcaatggctgcccccagtgtgggaaggccttcagcaggaagagcaacctgatccgccaccagaagacccacactggagagaagccctatgagtgcaagcagtgtgggaagttcttcagctgcaagagcaacctgattgtgcaccagaagacccacaaggtggagaccaccggcatccagtag

SEQ ID NO: 176805 - DNA, 1503 bp, synthetic construct
  misc_feature 1..1503: note = Description of Artificial Sequence: Synthetic coding sequence
  source 1..1503: mol_type = other DNA
atggaggagagccacttcaacagcaacccctacttctggcccagcatccccaccgtgtctggccagatcgagaacaccatgttcatcaacaagatgaaggaccagctgctgcctgagaagggctgcggcctggccccaccccactaccccaccctgctgactgtgcctgcctctgtgtccctgcccagcggcatctccatggacacagagagcaagagtgaccagctgaccccccacagccaggcctctgtgacccagaacatcaccgtggtgcctgtgcccagcacaggcctgatgacagctggccctggcctggtgatcaccagccccagcggcagcctggtgaccacagccagcagcgcccagaccttccccatcagcgcccccatgattgtgtctgccctgcccccaggcagccaggccctgcaggtggtgcctgacctgagcaagaaggtggccagcaccctgacagaggagggcggcggcggcggcggcggcggcggctctgtggcccccaagccaccccggggcaggaagaagaagaggatgctggagagcggcctgcctgagatgaatgacccctacgtgctgagcccagaagatgatgatgaccaccagaaggatggcaagacctaccgctgcaggatgtgcagcctgaccttctacagcaagtctgagatgcagatccacagcaagagccacacagagaccaagccccacaagtgcccccactgcagcaagacctttgccaacagcagctacctggcccagcacatccgcatccacagcggggccaagccctacagctgcaacttctgtgagaagagcttccggcagctgagccacctgcagcagcacacccgcatccacactggagaccggccctacaagtgtgcccaccctggctgtgagaaggccttcacccagctgagcaacctgcagagccaccggcggcagcacaacaaggacaagcccttcaagtgccacaactgccaccgggcctacacagatgctgccagcctggaggtgcacctgagcacccacacagtgaagcacgccaaggtgtacacctgcaccatctgcagccgggcctacaccagcgagacctacctgatgaagcacatgaggaagcacaaccccccagacctgcagcagcaggtgcaggccgctgctgctgctgctgctgtggcccaggcccaggcccaggcccaggcccaggcccaggcccaggcccaggcccaggcccaggcccaggccagccaggccagccagcagcagcagcagcagcagcagcagcagcagcagcagcagcagcagcccccaccccacttccagagccctggagctgccccccagggcggcggcggcggggacagcaaccccaaccccccaccccagtgcagctttgacctgaccccctacaagacagctgagcaccacaaggacatctgcctgactgtgaccaccagcaccatccaggtggagcacctggccagcagctag

SEQ ID NO: 176806 - DNA, 1734 bp, synthetic construct
  misc_feature 1..1734: note = Description of Artificial Sequence: Synthetic coding sequence
  source 1..1734: mol_type = other DNA
atggaggagagccacttcaacagcaacccctacttctggcccagcatccccaccgtgtctggccagatcgagaacaccatgttcatcaacaagatgaaggaccagctgctgcctgagaagggctgcggcctggccccaccccactaccccaccctgctgactgtgcctgcctctgtgtccctgcccagcggcatctccatggacacagagagcaagagtgaccagctgaccccccacagccaggcctctgtgacccagaacatcaccgtggtgcctgtgcccagcacaggcctgatgacagctggggtgtcctgcagccagcgctggaggcgggagggcagccagagccggggccctggcctggtgatcaccagccccagcggcagcctggtgaccacagccagcagcgcccagaccttccccatcagcgcccccatgattgtgtctgccctgcccccaggcagccaggccctgcaggtggtgcctgacctgagcaagaaggtggccagcaccctgacagaggagggcggcggcggcggcggcggcggcggctctgtggcccccaagccaccccggggcaggaagaagaagaggatgctggagagcggcctgcctgagatgaatgacccctacgtgctgagcccagaagatgatgatgaccaccagaaggatggcaagacctaccgctgcaggatgtgcagcctgaccttctacagcaagtctgagatgcagatccacagcaagagccacacagagaccaagccccacaagtgcccccactgcagcaagacctttgccaacagcagctacctggcccagcacatccgcatccacagcggggccaagccctacagctgcaacttctgtgagaagagcttccggcagctgagccacctgcagcagcacacccgcatccacagcaagatgcacacagagaccatcaagccccacaagtgcccccactgcagcaagacctttgccaacaccagctacctggcccagcacctgcgcatccacagcggggccaagccctacaactgcagctactgccagaaggccttccggcagctgagccacctgcagcagcacacccgcatccacactggagaccggccctacaagtgtgcccaccctggctgtgagaaggccttcacccagctgagcaacctgcagagccaccggcggcagcacaacaaggacaagcccttcaagtgccacaactgccaccgggcctacacagatgctgccagcctggaggtgcacctgagcacccacacagtgaagcacgccaaggtgtacacctgcaccatctgcagccgggcctacaccagcgagacctacctgatgaagcacatgaggaagcacaaccccccagacctgcagcagcaggtgcaggccgctgctgctgctgctgctgtggcccaggcccaggcccaggcccaggcccaggcccaggcccaggcccaggcccaggcccaggcccaggccagccaggccagccagcagcagcagcagcagcagcagcagcagcagcagcagcagcagcagcccccaccccacttccagagccctggggccgccccccagggcggcggcggcggggacagcaaccccaaccccccaccccagtgcagctttgacctgaccccctacaagacagctgagcaccacaaggacatctgcctgactgtgaccaccagcaccatccaggtggagcacctggccagcagctag

SEQ ID NO: 176807 - DNA, 1551 bp, synthetic construct
  misc_feature 1..1551: note = Description of Artificial Sequence: Synthetic coding sequence
  source 1..1551: mol_type = other DNA
atggaggagagccacttcaacagcaacccctacttctggcccagcatccccaccgtgtctggccagatcgagaacaccatgttcatcaacaagatgaaggaccagctgctgcctgagaagggctgcggcctggccccaccccactaccccaccctgctgactgtgcctgcctctgtgtccctgcccagcggcatctccatggacacagagagcaagagtgaccagctgaccccccacagccaggcctctgtgacccagaacatcaccgtggtgcctgtgcccagcacaggcctgatgacagctggggtgtcctgcagccagcgctggaggcgggagggcagccagagccggggccctggcctggtgatcaccagccccagcggcagcctggtgaccacagccagcagcgcccagaccttccccatcagcgcccccatgattgtgtctgccctgcccccaggcagccaggccctgcaggtggtgcctgacctgagcaagaaggtggccagcaccctgacagaggagggcggcggcggcggcggcggcggcggctctgtggcccccaagccaccccggggcaggaagaagaagaggatgctggagagcggcctgcctgagatgaatgacccctacgtgctgagcccagaagatgatgatgaccaccagaaggatggcaagacctaccgctgcaggatgtgcagcctgaccttctacagcaagtctgagatgcagatccacagcaagagccacacagagaccaagccccacaagtgcccccactgcagcaagacctttgccaacagcagctacctggcccagcacatccgcatccacagcggggccaagccctacagctgcaacttctgtgagaagagcttccggcagctgagccacctgcagcagcacacccgcatccacactggagaccggccctacaagtgtgcccaccctggctgtgagaaggccttcacccagctgagcaacctgcagagccaccggcggcagcacaacaaggacaagcccttcaagtgccacaactgccaccgggcctacacagatgctgccagcctggaggtgcacctgagcacccacacagtgaagcacgccaaggtgtacacctgcaccatctgcagccgggcctacaccagcgagacctacctgatgaagcacatgaggaagcacaaccccccagacctgcagcagcaggtgcaggccgctgctgctgctgctgctgtggcccaggcccaggcccaggcccaggcccaggcccaggcccaggcccaggcccaggcccaggcccaggccagccaggccagccagcagcagcagcagcagcagcagcagcagcagcagcagcagcagcagcccccaccccacttccagagccctggagctgccccccagggcggcggcggcggggacagcaaccccaaccccccaccccagtgcagctttgacctgaccccctacaagacagctgagcaccacaaggacatctgcctgactgtgaccaccagcaccatccaggtggagcacctggccagcagctag

SEQ ID NO: 176808 - DNA, 1551 bp, synthetic construct; identical to SEQ ID NO: 176807
  misc_feature 1..1551: note = Description of Artificial Sequence: Synthetic coding sequence
  source 1..1551: mol_type = other DNA

SEQ ID NO: 176809 - DNA, 1734 bp, synthetic construct; identical to SEQ ID NO: 176806
  misc_feature 1..1734: note = Description of Artificial Sequence: Synthetic coding sequence
  source 1..1734: mol_type = other DNA

SEQ ID NO: 176810 - DNA, 1008 bp, synthetic construct
  misc_feature 1..1008: note = Description of Artificial Sequence: Synthetic coding sequence
  source 1..1008: mol_type = other DNA
atggaggagagccacttcaacagcaacccctacttctggcccagcatccccaccgtgtctggccagatcgagaacaccatgttcatcaacaagatgaaggaccagctgctgcctgagaagggctgcggcctggccccaccccactaccccaccctgctgactgtgcctgcctctgtgtccctgcccagcggcatctccatggacacagagagcaagagtgaccagctgaccccccacagccaggcctctgtgacccagaacatcaccgtggtgcctgtgcccagcacaggcctgatgacagctggggtgtcctgcagccagcgctggaggcgggagggcagccagagccggggccctggcctggtgatcaccagccccagcggcagcctggtgaccacagccagcagcgcccagaccttccccatcagcgcccccatgattgtgtctgccctgcccccaggcagccaggccctgcaggtggtgcctgacctgagcaagaaggtggccagcaccctgacagaggagggcggcggcggcggcggcggcggcggctctgtggcccccaagccaccccggggcaggaagaagaagaggatgctggagagcggcctgcctgagatgaatgacccctacgtgctgagcccagaagatgatgatgaccaccagaaggatggcaagacctacagaagtgagggcaactgtggcactggaaatggccagagcctgggcctgatggattctgtgcccggcagcaccaccaacctgctgtgtgaccccggctgcaggatgtgcagcctgaccttctacagcaagtctgagatgcagatccacagcaagagccacacagagaccaagccccacaagtgcccccactgcagcaagacctttgccaacagcagctacctggcccagcacatccgcatccacagcggggccaagccctacagctgcaacttctgtgagaagagcttccggcagctgagccacctgcagcagcacaccaggtag

SEQ ID NO: 176811 - DNA, 834 bp, synthetic construct
  misc_feature 1..834: note = Description of Artificial Sequence: Synthetic coding sequence
  source 1..834: mol_type = other DNA
atggaggagagccacttcaacagcaacccctacttctggcccagcatccccaccgtgtctggccagatcgagaacaccatgttcatcaacaagatgaaggaccagctgctgcctgagaagggctgcggcctggccccaccccactaccccaccctgctgactgtgcctgcctctgtgtccctgcccagcggcatctccatggacacagagagcaagagtgaccagctgaccccccacagccaggcctctgtgacccagaacatcaccgtggtgcctgtgcccagcacaggcctgatgacagctggccctggcctggtgatcaccagccccagcggcagcctggtgaccacagccagcagcgcccagaccttccccatcagcgcccccatgattgtgtctgccctgcccccaggcagccaggccctgcaggtggtgcctgacctgagcaagaaggtggccagcaccctgacagaggagggcggcggcggcggcggcggcggcggctctgtggcccccaagccaccccggggcaggaagaagaagaggatgctggagagcggcctgcctgagatgaatgacccctacgtgctgagcccagaagatgatgatgaccaccagaaggatggcaagacctaccgctgcaggatgtgcagcctgaccttctacagcaagtctgagatgcagatccacagcaagagccacacagagaccaagccccacaagtgcccccactgcagcaagacctttgccaacagcagctacctggcccagcacatccgcatccacagcggggccaagccctacagctgcaacttctgtgagaagagcttctag

SEQ ID NO: 176812 - DNA, 1386 bp, synthetic construct
  misc_feature 1..1386: note = Description of Artificial Sequence: Synthetic coding sequence
  source 1..1386: mol_type = other DNA
atggaggagagccacttcaacagcaacccctacttctggcccagcatccccaccgtgtctggccagatcgagaacaccatgttcatcaacaagatgaaggaccagctgctgcctgagaagggctgcggcctggccccaccccactaccccaccctgctgactgtgcctgcctctgtgtccctgcccagcggcatctccatggacacagagagcaagagtgaccagctgaccccccacagccaggcctctgtgacccagaacatcaccgtggtgcctgtgcccagcacaggcctgatgacagctgccctgcaggtggtgcctgacctgagcaagaaggtggccagcaccctgacagaggagggcggcggcggcggcggcggcggcggctctgtggcccccaagccaccccggggcaggaagaagaagaggatgctggagagcggcctgcctgagatgaatgacccctacgtgctgagcccagaagatgatgatgaccaccagaaggatggcaagacctaccgctgcaggatgtgcagcctgaccttctacagcaagtctgagatgcagatccacagcaagagccacacagagaccaagccccacaagtgcccccactgcagcaagacctttgccaacagcagctacctggcccagcacatccgcatccacagcggggccaagccctacagctgcaacttctgtgagaagagcttccggcagctgagccacctgcagcagcacacccgcatccacactggagaccggccctacaagtgtgcccaccctggctgtgagaaggccttcacccagctgagcaacctgcagagccaccggcggcagcacaacaaggacaagcccttcaagtgccacaactgccaccgggcctacacagatgctgccagcctggaggtgcacctgagcacccacacagtgaagcacgccaaggtgtacacctgcaccatctgcagccgggcctacaccagcgagacctacctgatgaagcacatgaggaagcacaaccccccagacctgcagcagcaggtgcaggccgctgctgctgctgctgctgtggcccaggcccaggcccaggcccaggcccaggcccaggcccaggcccaggcccaggcccaggcccaggccagccaggccagccagcagcagcagcagcagcagcagcagcagcagcagcagcagcagcagcccccaccccacttccagagccctggggccgccccccagggcggcggcggcggggacagcaaccccaaccccccaccccagtgcagctttgacctgaccccctacaagacagctgagcaccacaaggacatctgcctgactgtgaccaccagcaccatccaggtggagcacctggccagcagctag

SEQ ID NO: 176813 - DNA, 1161 bp, synthetic construct
  misc_feature 1..1161: note = Description of Artificial Sequence: Synthetic coding sequence
  source 1..1161: mol_type = other DNA
atgatcctgggcagcctgagcagagctggccccctgcccctgctgcggcagccccccatcatgcagccccccctggacctgaagcagatcctgcccttccccctggagcccgcccccaccctgggcctcttcagcaactacagcaccatggaccctgtgcagaaggctgtgctgagccacaccttcggcggccccctgctgaagaccaagaggcctgtgatcagctgcaacatctgccagatccgcttcaacagccagagccaggccgaggcccactacaagggcaacagacatgcccggcgggtgaagggcattgaagctgccaagacccggggccgggagcccggggtgcgggagcccggggaccctgcccctcctggcagcacccccaccaatggagatggagtggcccccaggcctgtgtccatggagaatggcctgggccctgcccctggcagccctgagaagcagcccggcagccccagccccccatccatccctgagaccggccagggcgtgaccaagggggagggcggcaccccagccccagccagcctgcccggcggcagcaaggaggaggaggagaaggccaagaggctgctgtactgtgccctgtgcaaggtggccgtgaacagcctgagccagctggaggcccacaacaagggcaccaagcacaagaccatcctggaggcccggagcggcctgggccccatcaaggcctacccccggctgggcccccccaccccaggagagcctgaggccccagcccaggacaggaccttccactgtgagatctgcaatgtgaaggtgaacagcgaggtgcagctgaagcagcacatcagcagcagaagacacagagatggagtggccggcaagcccaaccccctgctgagccgccacaagaagagcagaggagctggggagctggccggcaccctgaccttcagcaaggagctgcccaagagcctggccggcggcctgctgcccagccccctggccgtggccgctgtgatggctgctgctgctggcagccccctgagcctgcggcctgccccagctgcccccctgctgcagggcccccccatcacccaccccctgctgcacccagcccctggccccatcagaacagcccacggccccatcctcttcagcccctactag

SEQ ID NO: 176814 - DNA, 918 bp, synthetic construct
  misc_feature 1..918: note = Description of Artificial Sequence: Synthetic coding sequence
  source 1..918: mol_type = other DNA
atgatcctgggcagcctgagcagagctggccccctgcccctgctgcggcagccccccatcatgcagccccccctggacctgaagcagatcctgcccttccccctggagcccgcccccaccctgggcctcttcagcaactacagcaccatggaccctgtgcagaaggctgtgctgagccacaccttcggcggccccctgctgaagaccaagaggcctgtgatcagctgcaacatctgccagatccgcttcaacagccagagccaggccgaggcccactacaagggcaacagacatgcccggcgggtgaagggcattgaagctgccaagacccggggccgggagcccggggtgcgggagcccggggaccctgcccctcctggcagcacccccaccaatggagatggagtggccccccggcccggcaccaagcacaagaccatcctggaggcccggagcggcctgggccccatcaaggcctacccccggctgggcccccccaccccaggagagcctgaggccccagcccaggacaggaccttccactgtgagatctgcaatgtgaaggtgaacagcgaggtgcagctgaagcagcacatcagcagccgccgccacagagatggagtggccggcaagcccaaccccctgctgagccgccacaagaagagcagaggagctggggagctggccggcaccctgaccttcagcaaggagctgcccaagagcctggccggcggcctgctgcccagccccctggccgtggccgctgtgatggctgctgctgctggcagccccctgagcctgcggcctgccccagctgcccccctgctgcagggcccccccatcacccaccccctgctgcacccagcccctggccccatcagaacagcccacggccccatcctcttcagcccctactag

SEQ ID NO: 176815 - DNA, 1101 bp, synthetic construct
  misc_feature 1..1101: note = Description of Artificial Sequence: Synthetic coding sequence
  source 1..1101: mol_type = other DNA
atgcagccccccctggacctgaagcagatcctgcccttccccctggagcccgcccccaccctgggcctcttcagcaactacagcaccatggaccctgtgcagaaggctgtgctgagccacaccttcggcggccccctgctgaagaccaagaggcctgtgatcagctgcaacatctgccagatccgcttcaacagccagagccaggccgaggcccactacaagggcaacagacatgcccggcgggtgaagggcattgaagctgccaagacccggggccgggagcccggggtgcgggagcccggggaccctgcccctcctggcagcacccccaccaatggagatggagtggcccccaggcctgtgtccatggagaatggcctgggccctgcccctggcagccctgagaagcagcccggcagccccagccccccatccatccctgagaccggccagggcgtgaccaagggggagggcggcaccccagccccagccagcctgcccggcggcagcaaggaggaggaggagaaggccaagaggctgctgtactgtgccctgtgcaaggtggccgtgaacagcctgagccagctggaggcccacaacaagggcaccaagcacaagaccatcctggaggcccggagcggcctgggccccatcaaggcctacccccggctgggcccccccaccccaggagagcctgaggccccagcccaggacaggaccttccactgtgagatctgcaatgtgaaggtgaacagcgaggtgcagctgaagcagcacatcagcagcagaagacacagagatggagtggccggcaagcccaaccccctgctgagccgccacaagaagagcagaggagctggggagctggccggcaccctgaccttcagcaaggagctgcccaagagcctggccggcggcctgctgcccagccccctggccgtggccgctgtgatggctgctgctgctggcagccccctgagcctgcggcctgccccagctgcccccctgctgcagggcccccccatcacccaccccctgctgcacccagcccctggccccatcagaacagcccacggccccatcctcttcagcccctactag

SEQ ID NO: 176816 - DNA, 699 bp, synthetic construct
  misc_feature 1..699: note = Description of Artificial Sequence: Synthetic coding sequence
  source 1..699: mol_type = other DNA
atgcagccccccctggacctgaagcagatcctgcccttccccctggagcccgcccccaccctgggcctcttcagcaactacagcaccatggaccctgtgcagaaggctgtgctgagccacaccttcggcggccccctgctgaagaccaagaggcctgtgatcagctgcaacatctgccagatccgcttcaacagccagagccaggccgaggcccactacaagggcaacagacatgcccggcgggtgaagggcattgaagctgccaagacccggggccgggagcccggggtgcgggagcccggggaccctgcccctcctggcagcacccccaccaatggagatggagtggcccccaggcctgtgtccatggagaatggcctgggccctgcccctggcagccctgagaagcagcccggcagccccagccccccatccatccctgagaccggccagggcgtgaccaagggggagggcggcaccccagccccagccagcctgcccggcggcagcaaggaggaggaggagaaggccaagaggctgctgtactgtgccctgtgcaaggtggccgtgaacagcctgagccagctggaggcccacaacaagggcaccaagcacaagaccatcctggaggcccggagcggcctgggccccatcaaggcctacccccggctgggcccccccaccccaggagagccctag

SEQ ID NO: 176817 - DNA, 1101 bp, synthetic construct; identical to SEQ ID NO: 176815
  misc_feature 1..1101: note = Description of Artificial Sequence: Synthetic coding sequence
  source 1..1101: mol_type = other DNA

SEQ ID NO: 176818 - DNA, 498 bp, synthetic construct
  misc_feature 1..498: note = Description of Artificial Sequence: Synthetic coding sequence
  source 1..498: mol_type = other DNA
atgcagccccccctggacctgaagcagatcctgcccttccccctggagcccgcccccaccctgggcctcttcagcaactacagcaccatggaccctgtgcagaaggctgtgctgagccacaccttcggcggccccctgctgaagaccaagaggcctgtgatcagctgcaacatctgccagatccgcttcaacagccagagccaggccgaggcccactacaagggcaacagacatgcccggcgggtgaagggcattgaagctgccaagacccggggccgggagcccggggtgcgggagcccggggaccctgcccctcctggcagcacccccaccaatggagatggagtggcccccaggcctgtgtccatggagaatggcctgggccctgcccctggcagccctgagaagcagcccggcagccccagccccccatccatccctgagaccggccagggcgtgaccaagggggagggcggcaccccagccccagccagctag

SEQ ID NO: 176819 - DNA, 438 bp, synthetic construct
  misc_feature 1..438: note = Description of Artificial Sequence: Synthetic coding sequence
  source 1..438: mol_type = other DNA
atgcagccccccctggacctgaagcagatcctgcccttccccctggagcccgcccccaccctgggcctcttcagcaactacagcaccatggaccctgtgcagaaggctgtgctgagccacaccttcggcggccccctgctgaagaccaagaggcctgtgatcagctgcaacatctgccagatccgcttcaacagccagagccaggccgaggcccactacaagggcaacagacatgcccggcgggtgaagggcattgaagctgccaagacccggggccgggagcccggggtgcgggagcccggggaccctgcccctcctggcagcacccccaccaatggagatggagtggcccccaggcctgtgtccatggagaatggcctgggccctgcccctggcagccctgagaagcagcccggcagccccagcccccccagctag

SEQ ID NO: 176820 - DNA, 1101 bp, synthetic construct; identical to SEQ ID NO: 176815
  misc_feature 1..1101: note = Description of Artificial Sequence: Synthetic coding sequence
  source 1..1101: mol_type = other DNA

SEQ ID NO: 176821 - DNA, 858 bp, synthetic construct
  misc_feature 1..858: note = Description of Artificial Sequence: Synthetic coding sequence
  source 1..858: mol_type = other DNA
atgcagccccccctggacctgaagcagatcctgcccttccccctggagcccgcccccaccctgggcctcttcagcaactacagcaccatggaccctgtgcagaaggctgtgctgagccacaccttcggcggccccctgctgaagaccaagaggcctgtgatcagctgcaacatctgccagatccgcttcaacagccagagccaggccgaggcccactacaagggcaacagacatgcccggcgggtgaagggcattgaagctgccaagacccggggccgggagcccggggtgcgggagcccggggaccctgcccctcctggcagcacccccaccaatggagatggagtggccccccggcccggcaccaagcacaagaccatcctggaggcccggagcggcctgggccccatcaaggcctacccccggctgggcccccccaccccaggagagcctgaggccccagcccaggacaggaccttccactgtgagatctgcaatgtgaaggtgaacagcgaggtgcagctgaagcagcacatcagcagccgccgccacagagatggagtggccggcaagcccaaccccctgctgagccgccacaagaagagcagaggagctggggagctggccggcaccctgaccttcagcaaggagctgcccaagagcctggccggcggcctgctgcccagccccctggccgtggccgctgtgatggctgctgctgctggcagccccctgagcctgcggcctgccccagctgcccccctgctgcagggcccccccatcacccaccccctgctgcacccagcccctggccccatcagaacagcccacggccccatcctcttcagcccctactag

SEQ ID NO: 176822 - DNA, 1110 bp, synthetic construct
  misc_feature 1..1110: note = Description of Artificial Sequence: Synthetic coding sequence
  source 1..1110: mol_type = other DNA
atgatgcagcccagcctggacatcaagcccttcatgtccttccctgtggacagcagcagcgctgtgggcctcttccccaacttcaacaccatggaccctgtgcagaaggctgtgatcaaccacacctttggagtgtccatcccccccaagaagaagcaggtgatcagctgcaatgtgtgccagctgcgcttcaacagcgacagccaggccgaggcccactacaagggcagcaagcacgccaagaaggtgaaggccctggatgccaccaagaacaagcccaagatggtgcccagcaaggacagcgccaaggccaaccccagctgcagcatcacccccatcaccggcaacaacagcgacaagtctgaggacaagggcaagctgaaggccagcagcagcagccagcccagcagcagcgagagcggcagcttcctgctgaagagcggcaccacccccctgcccccaggggccgccaccagccccagcaagagcaccaatggagcccctggcaccgtggtggagagcgaggaggagaaggccaagaagctgctgtactgcagcctgtgcaaggtggccgtgaacagcctgagccagctggaggcccacaacacaggcagcaagcacaagaccatggtggaggccagaaatggagctggccccatcaagagctacccccggcccggcagccggctgaagatgcagaatggcagcaaaggaagtggcctgcagaacaagaccttccactgtgagatctgtgatgtgcacgtgaacagcgagatccagctgaagcagcacatcagcagccgccgccacaaggacagagtggccggcaagcccctgaagcccaagtacagcccctacaacaagctgcagaggagccccagcatcctggccgccaagctggccttccagaaggacatgatgaagcccctggccccagccttcctgagcagccccctggccgctgctgctgctgtgtcctctgccctgagcctgcccccccggcccagcgccagcctcttccaggccccagccatccccccagccctgctgcggcccggccacggccccatccgggccaccccagccagcatcctgtttgccccctactag

SEQ ID NO: 176823 - DNA, 1188 bp, synthetic construct
  misc_feature 1..1188: note = Description of Artificial Sequence: Synthetic coding sequence
  source 1..1188: mol_type = other DNA
atgtggagcggcctgcccagccggggcagcacctgccacaccaccaccctgcctgccctggtgaggacccccaccctgatgatgcagcccagcctggacatcaagcccttcatgtccttccctgtggacagcagcagcgctgtgggcctcttccccaacttcaacaccatggaccctgtgcagaaggctgtgatcaaccacacctttggagtgtccatcccccccaagaagaagcaggtgatcagctgcaatgtgtgccagctgcgcttcaacagcgacagccaggccgaggcccactacaagggcagcaagcacgccaagaaggtgaaggccctggatgccaccaagaacaagcccaagatggtgcccagcaaggacagcgccaaggccaaccccagctgcagcatcacccccatcaccggcaacaacagcgacaagtctgaggacaagggcaagctgaaggccagcagcagcagccagcccagcagcagcgagagcggcagcttcctgctgaagagcggcaccacccccctgcccccaggggccgccaccagccccagcaagagcaccaatggagcccctggcaccgtggtggagagcgaggaggagaaggccaagaagctgctgtactgcagcctgtgcaaggtggccgtgaacagcctgagccagctggaggcccacaacacaggcagcaagcacaagaccatggtggaggccagaaatggagctggccccatcaagagctacccccggcccggcagccggctgaagatgcagaatggcagcaaaggaagtggcctgcagaacaagaccttccactgtgagatctgtgatgtgcacgtgaacagcgagatccagctgaagcagcacatcagcagccgccgccacaaggacagagtggccggcaagcccctgaagcccaagtacagcccctacaacaagctgcagaggagccccagcatcctggccgccaagctggccttccagaaggacatgatgaagcccctggccccagccttcctgagcagccccctggccgctgctgctgctgtgtcctctgccctgagcctgcccccccggcccagcgccagcctcttccaggccccagccatccccccagccctgctgcggcccggccacggccccatccgggccaccccagccagcatcctgtttgccccctactag

SEQ ID NO: 176824 - DNA, 1110 bp, synthetic construct; identical to SEQ ID NO: 176822
  misc_feature 1..1110: note = Description of Artificial Sequence: Synthetic coding sequence
  source 1..1110: mol_type = other DNA

SEQ ID NO: 176825 - DNA, 1416 bp, synthetic construct
  misc_feature 1..1416: note = Description of Artificial Sequence: Synthetic coding sequence
  source 1..1416: mol_type = other DNA
atgaacatggccaacttcctgcggggctttgaggagaagggcatcaagaatgacaggcctgaggaccagctgagcaaggagaagaagaagatcctcttctccttctgtgaggtgtgcaacatccagctgaacagcgctgcccaggcccaggtgcacagcaatggcaagagccacaggaagagggtgaagcagctgagtgatggccagcccccacctccagcccaggccagccccagcagcaacagcagcacaggcagcacctgccacaccaccaccctgcctgccctggtgaggacccccaccctgatgatgcagcccagcctggacatcaagcccttcatgtccttccctgtggacagcagcagcgctgtgggcctcttccccaacttcaacaccatggaccctgtgcagaaggctgtgatcaaccacacctttggagtgtccatcccccccaagaagaagcaggtgatcagctgcaatgtgtgccagctgcgcttcaacagcgacagccaggccgaggcccactacaagggcagcaagcacgccaagaaggtgaaggccctggatgccaccaagaacaagcccaagatggtgcccagcaaggacagcgccaaggccaaccccagctgcagcatcacccccatcaccggcaacaacagcgacaagtctgaggacaagggcaagctgaaggccagcagcagcagccagcccagcagcagcgagagcggcagcttcctgctgaagagcggcaccacccccctgcccccaggggccgccaccagccccagcaagagcaccaatggagcccctggcaccgtggtggagagcgaggaggagaaggccaagaagctgctgtactgcagcctgtgcaaggtggccgtgaacagcctgagccagctggaggcccacaacacaggcagcaagcacaagaccatggtggaggccagaaatggagctggccccatcaagagctacccccggcccggcagccggctgaagatgcagaatggcagcaaaggaagtggcctgcagaacaagaccttccactgtgagatctgtgatgtgcacgtgaacagcgagatccagctgaagcagcacatcagcagccgccgccacaaggacagagtggccggcaagcccctgaagcccaagtacagcccctacaacaagctgcagaggagccccagcatcctggccgccaagctggccttccagaaggacatgatgaagcccctggccccagccttcctgagcagccccctggccgctgctgctgctgtgtcctctgccctgagcctgcccccccggcccagcgccagcctcttccaggccccagccatccccccagccctgctgcggcccggccacggccccatccgggccaccccagccagcatcctgtttgccccctactag

SEQ ID NO: 176826 - DNA, 96 bp, synthetic construct
  misc_feature 1..96: note = Description of Artificial Sequence: Synthetic coding sequence
  source 1..96: mol_type = other DNA
atgaacatggccaacttcctgcggggctttgaggagaagggcatcaagaatgacaggcctgaggaccagctgagcaaggagaagaagaagatctag

SEQ ID NO: 176827 - DNA, 417 bp, synthetic construct
  misc_feature 1..417: note = Description of Artificial Sequence: Synthetic coding sequence
  source 1..417: mol_type = other DNA
atgctgggcagcacctgccacaccaccaccctgcctgccctggtgaggacccccaccctgatgatgcagcccagcctggacatcaagcccttcatgtccttccctgtggacagcagcagcgctgtgggcctcttccccaacttcaacaccaagaggcggggcctgtttgagaccaacaagttctgccagatggaccctgtgcagaaggccgtcatcaaccacaccttcggcgtgtccatcccccccaagaagaagcaggtgatcagctgcaatgtgtgccagctgcgcttcaacagcgacagccaggccgaggcccactacaagggcagcaagcacgccaagaaggtgaaggccctggatgccaccaagaacaagcccaagatggtgcccagcaaggacagcgccaaggccaactag

SEQ ID NO: 176828 - DNA, 228 bp, synthetic construct
  misc_feature 1..228: note = Description of Artificial Sequence: Synthetic coding sequence
  source 1..228: mol_type = other DNA
atgaacatggccaacttcctgcggggctttgaggagaagggcatcaagaatgacaggcctgaggaccagctgagcaaggagaagaagaagatcctcttctccttctgtgaggtgtgcaacatccagctgaacagcgctgcccaggcccaggtgcacagcaatggcaagagccacaggaagagggtgaagcagctgagtgatggccagcccccacctccagcccagtag

SEQ ID NO: 176829 - DNA, 792 bp, synthetic construct
  misc_feature 1..792: note = Description of Artificial Sequence: Synthetic coding sequence
  source 1..792: mol_type = other DNA
atgatgcagcccagcctggacatcaagcccttcatgtccttccctgtggacagcagcagcgctgtgggcctcttccccaacttcaacaccatggaccctgtgcagaaggctgtgatcaaccacacctttggagtgtccatcccccccaagaagaagcaggtgatcagctgcaatgtgtgccagctgcgcttcaacagcgacagccaggccgaggcccactacaagggcagcaagcacgccaagaaggtgaaggccctggatgccaccaagaacaagcccaagatggtgcccagcaaggacagcgccaaggccaaccccagctgcagcatcacccccatcaccggcaacaacagcgacaagtctgaggacaagggcaagctgaaggccagcagcagcagccagcccagcagcagcgagagcggcagcttcctgctgaagagcggcaccacccccctgcccccaggggccgccaccagccccagcaagagcaccaatggagcccctggcaccgtggtggagagcgaggaggagaaggccaagaagctgctgtactgcagcctgtgcaaggtggccgtgaacagcctgagccagctggaggcccacaacacaggcagcaagcacaagaccatggtggaggccagaaatggagctggccccatcaagagctacccccggcccggcagccggctgaagatgcagaatggcagcaaaggaagtggcctgcagaacaagaccttccactgtgagatctgtgatgtgcacgtgaacagcgagatccagctgaagcagtag

SEQ ID NO: 176830 - DNA, 1002 bp, synthetic construct
  misc_feature 1..1002: note = Description of Artificial Sequence: Synthetic coding sequence
  source 1..1002: mol_type = other DNA
atgtctgccaagctgggcaagagcagcagcctgctgacccagaccagcgaggagtgcaatggcatcctgacagagaagatggaggaggaggagcagacctgtgaccctgacagcagcctgcactggagcagcagctacagccctgagaccttccggcagcagttccggcagtttggctaccaggacagccctggcccccatgaggccctgagccggctgtgggagctgtgccacctgtggctgcggcctgaggtgcacaccaaggagcagatcctggagctgctggtgctggagcagttcctggccatcctgcccaaggagctgcaggcctgggtgcagaagcaccacccagaaaatggagaggagaccgtgaccatgctggaggatgtggagcgggagctggatggccccaagcagatcttcttcggccgcaggaaggacatgattgctgagaagctggcccccagcgagatcacagaggagctgcccagcagccagctgatgcctgtgaagaagcagctgcagggcgcctcctgggagctgcagagcctgcggccccatgatgaggacatcaagaccaccaacgtgaagagcgccagccggcagaagaccagcctgggcatcgagctgcactgcaatgtgagcaacatcctgcacatgaatggcagccagagcagcacctaccggggcacctatgagcaggacggccgctttgagaagaggcagggcaaccccagctggaagaagcagcagaagtgtgatgaatgtgggaagatcttcagccagagcagcgccctgatcctgcaccagaggatccacagcggcaagaagccctatgcctgtgatgaatgtgccaaggccttcagccgcagcgccatcctgatccagcacaggaggacccacacagacagcaaatatgagcacgccatcgccgaggcccagaagaacatgtacttcaagacccggctgaagtgccccaggagcctgagcggcggccgctag

SEQ ID NO: 176831 - DNA, 1008 bp, synthetic construct
  misc_feature 1..1008: note = Description of Artificial Sequence: Synthetic coding sequence
  source 1..1008: mol_type = other DNA
atgtctgccaagctgggcaagagcagcagcctgctgacccagaccagcgaggagtgcaatggcatcctgacagagaagatggaggaggaggagcagacctgtgaccctgacagcagcctgcactggagcagcagctacagccctgagaccttccggcagcagttccggcagtttggctaccaggacagccctggcccccatgaggccctgagccggctgtgggagctgtgccacctgtggctgcggcctgaggtgcacaccaaggagcagatcctggagctgctggtgctggagcagttcctggccatcctgcccaaggagctgcaggcctgggtgcagaagcaccacccagaaaatggagaggagaccgtgaccatgctggaggatgtggagcgggagctggatggccccaagcagatcttcttcggccgcaggaaggacatgattgctgagaagctggcccccagcgagatcacagaggagctgcccagcagccagctgatgcctgtgaagaagcagctgcagggcgcctcctgggagctgcagagcctgcggccccatgatgaggacatcaagaccaccaacgtgaagagcgccagccggcagaagaccagcctgggcatcgagctgcactgcaatgtgagcaacatcctgcacatgaatggcagccagagcagcacctaccggggcacctatgagcaggacggccgctttgagaagaggcagggcaaccccagctggaagaagcagcagaagtgtgatgaatgtgggaagatcttcagccagagcagcgccctgatcctgcaccagaggatccacagcggcaagaagccctatgcctgtgatgaatgtgccaaggccttcagccgcagcgccatcctgatccagcacaggaggacccacactggagagaagccctacaagtgccacgactgtgggaaggccttcagccagagcagcaacctcttccgccacaggaagaggcacatcaggaagaaggtgccctag

SEQ ID NO: 176832 - DNA, 828 bp, synthetic construct
  misc_feature 1..828: note = Description of Artificial Sequence: Synthetic coding sequence
  source 1..828: mol_type = other DNA
atggctgtggagagcggggtcatcagcaccctcatcccccaggaccccccagagcaggagctgatcctggtgaaggtggaggacaacttctcctgggatgagaagttcaagcagaatggcagcacccagagctgccaggagctgttccggcagcagttcaggaagttctgctaccaggagaccccaggcccccgggaggccctgagccggctgcaggagctgtgctaccagtggctgatgcctgagctgcacaccaaggagcagatcctggagctgctggtgctggagcagttcctgagcatcctgcctgaggagctgcagatctgggtgcagcagcacaaccctgagagcggggaggaggccgtgaccctgctggaggacctggagcgggagtttgatgatcctggccagcaggtgcctgccagcccccagggccctgctgtgccctggaaggacctgacctgcctgcgggccagccaggagagcacagacatccacctgcagcccctgaagacccagctgaagtcctggaagccctgcctgagccccaagagtgactgtgagaacagcgagacagccaccaaggagggcatcagcgaggagaagagccagggcctgccccaggagcccagcttccggggcatcaagctgagccggccccccaaggccagcagcgccatccgctgggagtgtgtgtccccaggcagcttccctggggacatcatcgctgctgaggccacccacagcaccatcagctgctttgccatcaacaccctgcctgccaccatcctgcccagcaagaatgtgaacaggaagtacttctcctag

SEQ ID NO: 176833 - DNA, 1605 bp, synthetic construct
  misc_feature 1..1605: note = Description of Artificial Sequence: Synthetic coding sequence
  source 1..1605: mol_type = other DNA
atggctgtggagagcggggtcatcagcaccctcatcccccaggaccccccagagcaggagctgatcctggtgaaggtggaggacaacttctcctgggatgagaagttcaagcagaatggcagcacccagagctgccaggagctgttccggcagcagttcaggaagttctgctaccaggagaccccaggcccccgggaggccctgagccggctgcaggagctgtgctaccagtggctgatgcctgagctgcacaccaaggagcagatcctggagctgctggtgctggagcagttcctgagcatcctgcctgaggagctgcagatctgggtgcagcagcacaaccctgagagcggggaggaggccgtgaccctgctggaggacctggagcgggagtttgatgatcctggccagcaggtgcctgccagcccccagggccctgctgtgccctggaaggacctgacctgcctgcgggccagccaggagagcacagacatccacctgcagcccctgaagacccagctgaagtcctggaagccctgcctgagccccaagagtgactgtgagaacagcgagacagccaccaaggagggcatcagcgaggagaagagccagggcctgccccaggagcccagcttccggggcatcagcgagcacgagagcaacctggtgtggaagcagggcagcgccaccggggagaagctgcggagccccagccagggcggcagcttcagccaggtgatcttcaccaacaagagcctgggcaagagggacctgtatgatgaggccgagcgctgcctgatcctgaccacagacagcatcatgtgccagaaggtgcccccagaggagcggccctaccgctgtgatgtgtgtggccacagcttcaagcagcacagcagcctgacccagcaccagaggatccacactggagagaagccctacaagtgcaaccagtgtgggaaggccttcagcctgcggagctacctgatcatccaccagaggatccacagcggggagaaggcctatgagtgcagtgaatgtgggaaggccttcaaccagagcagcgccctgatccgccacaggaagatccacactggagagaaggcctgcaagtgcaatgaatgtgggaaggccttcagccagagcagctacctgatcatccaccagaggatccacactggagagaagccctatgagtgcaatgaatgtgggaagaccttcagccagagcagcaagctgatccgccaccagaggatccacactggagagcggccctatgagtgcaatgaatgtgggaaggccttccggcagagcagcgagctgatcacccaccagaggatccacagcggggagaagccctatgagtgcagtgaatgtgggaaggccttcagcctgagcagcaacctgatccgccaccagaggatccacagcggggaggagccctaccagtgcaatgaatgtgggaagaccttcaagaggagcagcgccctggtgcagcaccagaggatccacagcggagatgaggcctacatctgcaatgaatgtgggaaggccttccgccacaggtctgtgctgatgaggcaccagagggtgcacaccatcaagtag

SEQ ID NO: 176834 - DNA, 738 bp, synthetic construct
  misc_feature 1..738: note = Description of Artificial Sequence: Synthetic coding sequence
  source 1..738: mol_type = other DNA
atggctgtggagagcggggtcatcagcaccctcatcccccaggaccccccagagcaggagctgatcctggtgaaggtggaggacaacttctcctgggatgagaagttcaagcagaatggcagcacccagagctgccaggagctgttccggcagcagttcaggaagttctgctaccaggagaccccaggcccccgggaggccctgagccggctgcaggagctgtgctaccagtggctgatgcctgagctgcacaccaaggagcagatcctggagctgctggtgctggagcagttcctgagcatcctgcctgaggagctgcagatctgggtgcagcagcacaaccctgagagcggggaggaggccgtgaccctgctggaggacctggagcgggagtttgatgatcctggccagcaggtgcctgccagcccccagggccctgctgtgccctggaaggacctgacctgcctgcgggccagccaggagagcacagacatccacctgcagcccctgaagacccagctgaagtcctggaagccctgcctgagccccaagtctgagctgagccggccccccaaggccagcagcgccatccgctgggagtgtgtgtccccaggcagcttccctggggacatcatcgctgctgaggccacccacagcaccatcagctgctttgccatcaacaccctgcctgccaccatcctgcccagcaagaatgtgaacaggaagtacttctcctag

SEQ ID NO: 176835 - DNA, 2340 bp, synthetic construct
  misc_feature 1..2340: note = Description of Artificial Sequence: Synthetic coding sequence
  source 1..2340: mol_type = other DNA
atggccgccaacggggacagccccccctggagccctgccctggccgctgagggccggggcagcagctgtgaggcctctgtgtcctttgaagatgtgacagtggacttcagcaaggaggagtggcagcacctggaccctgcccagaggcggctgtactgggatgtgaccctggagaactacagccacctgctgtctgtgggctaccagatccccaagtctgaggccgccttcaagctggagcagggcgagggcccctggatgctggagggggaggccccccaccagagctgcagcggggaggccatcggcaagatgcagcagcagggcatccctgggggcatcttcttccactgtgaaagatttgaccagcccatcggggaggacagcctgtgcagcatcctggaggagctgtggcaggacaatgaccagctggagcagaggcaggagaaccagaacaacctgctgagccacgtgaaggtgctgatcaaggagcggggctatgagcacaagaacatcgagaagatcatccacgtgaccaccaagctggtgcccagcatcaagaggctgcacaactgtgacaccatcctgaagcacaccctgaacagccacaaccacaacagaaattctgccaccaagaacctgggcaagatctttggaaatggaaacaacttcccccacagccccagcagcaccaagaatgaaaatgccaagacaggagccaacagctgtgaacatgaccactatgagaagcacctgagccacaagcaggcccccacccaccaccagaagatccaccctgaggagaagctgtatgtgtgcacagaatgtgtgatgggcttcacccagaagagccacctgtttgagcaccagagaattcatgctggggagaagagccgggagtgtgacaagagcaacaaggtgttcccccagaagccccaggtggatgtgcaccccagcgtgtacaccggggagaagccctacctgtgcacccagtgtgggaaggtgttcaccctgaagagcaacctgatcacccaccagaagatccacacaggccagaagccctacaagtgcagtgaatgtgggaaggccttcttccagaggagtgacctcttccgccacctgcgcatccacactggagagaagccctatgagtgcagtgaatgtgggaagggcttcagccagaacagcgacctgagcatccaccagaagacccacactggagagaagcactatgagtgcaatgaatgtgggaaggccttcaccaggaagagcgccctgaggatgcaccagaggatccacactggagagaagccctacgtgtgtgccgactgtgggaaggccttcatccagaagagccacttcaacacccaccagaggatccacactggagagaagccctatgagtgcagcgactgtgggaagagcttcaccaagaagagccagctgcacgtgcaccagaggatccacactggagagaagccctacatctgcacagaatgtgggaaggtgttcacccacaggaccaacctgaccacccaccagaagacccacactggagagaagccctacatgtgtgctgaatgtgggaaggccttcacagaccagagcaacctgatcaagcaccagaagacccacactggagagaagccctacaagtgcaatggctgtgggaaggccttcatctggaagagccggctgaagatccaccagaagagccacatcggggagcggcactatgagtgcaaggactgtgggaaggccttcatccagaagagcaccctgtctgtgcaccagaggatccacactggagagaagccctacgtgtgcccagaatgtgggaaggccttcatccagaagagccacttcatcgcccaccaccgcatccacactggagagaagccctatgagtgcagcgactgtgggaagtgcttcaccaagaagagccagctgcgggtgcaccagaagatccacactggagagaagcccaacatctgtgctgaatgtgggaaggccttcacagacaggagcaacctgatcacccaccagaagatccacacccgggagaagccctatgaatgtggggactgtgggaagaccttcacctggaagagccggctgaacatccaccagaagagccacactggagagcggcactatgagtgcagcaaatgtgggaaggccttcatccagaaggccaccctgtccatgcaccagatcatccacacaggcaagaagccctatgcctgcacagagtgccagaaggccttcacagacaggagcaacctgatcaagcaccagaagatgcacagcggggagaagcgctacaaggccagtgactag

SEQ ID NO: 176836 - DNA, 2340 bp, synthetic construct; identical to SEQ ID NO: 176835
  misc_feature 1..2340: note = Description of Artificial Sequence: Synthetic coding sequence
  source 1..2340: mol_type = other DNA

SEQ ID NO: 176837 - DNA, 2370 bp, synthetic construct
  misc_feature 1..2370: note = Description of Artificial Sequence: Synthetic coding sequence
  source 1..2370: mol_type = other DNA
atgggcaccctgccccacggcccccggccctggctgcagagagatgtggccgcccacgtgtctgctgaccatgctgccctgaacagcatcgtgtccctgcaggcctctgtgtcctttgaagatgtgacagtggacttcagcaaggaggagtggcagcacctggaccctgcccagaggcggctgtactgggatgtgaccctggagaactacagccacctgctgtctgtgggctaccagatccccaagtctgaggccgccttcaagctggagcagggcgagggcccctggatgctggagggggaggccccccaccagagctgcagcggggaggccatcggcaagatgcagcagcagggcatccctgggggcatcttcttccactgtgaaagatttgaccagcccatcggggaggacagcctgtgcagcatcctggaggagctgtggcaggacaatgaccagctggagcagaggcaggagaaccagaacaacctgctgagccacgtgaaggtgctgatcaaggagcggggctatgagcacaagaacatcgagaagatcatccacgtgaccaccaagctggtgcccagcatcaagaggctgcacaactgtgacaccatcctgaagcacaccctgaacagccacaaccacaacagaaattctgccaccaagaacctgggcaagatctttggaaatggaaacaacttcccccacagccccagcagcaccaagaatgaaaatgccaagacaggagccaacagctgtgaacatgaccactatgagaagcacctgagccacaagcaggcccccacccaccaccagaagatccaccctgaggagaagctgtatgtgtgcacagaatgtgtgatgggcttcacccagaagagccacctgtttgagcaccagagaattcatgctggggagaagagccgggagtgtgacaagagcaacaaggtgttcccccagaagccccaggtggatgtgcaccccagcgtgtacaccggggagaagccctacctgtgcacccagtgtgggaaggtgttcaccctgaagagcaacctgatcacccaccagaagatccacacaggccagaagccctacaagtgcagtgaatgtgggaaggccttcttccagaggagtgacctcttccgccacctgcgcatccacactggagagaagccctatgagtgcagtgaatgtgggaagggcttcagccagaacagcgacctgagcatccaccagaagacccacactggagagaagcactatgagtgcaatgaatgtgggaaggccttcaccaggaagagcgccctgaggatgcaccagaggatccacactggagagaagccctacgtgtgtgccgactgtgggaaggccttcatccagaagagccacttcaacacccaccagaggatccacactggagagaagccctatgagtgcagcgactgtgggaagagcttcaccaagaagagccagctgcacgtgcaccagaggatccacactggagagaagccctacatctgcacagaatgtgggaaggtgttcacccacaggaccaacctgaccacccaccagaagacccacactggagagaagccctacatgtgtgctgaatgtgggaaggccttcacagaccagagcaacctgatcaagcaccagaagacccacactggagagaagccctacaagtgcaatggctgtgggaaggccttcatctggaagagccggctgaagatccaccagaagagccacatcggggagcggcactatgagtgcaaggactgtgggaaggccttcatccagaagagcaccctgtctgtgcaccagaggatccacactggagagaagccctacgtgtgcccagaatgtgggaaggccttcatccagaagagccacttcatcgcccaccaccgcatccacactggagagaagccctatgagtgcagcgactgtgggaagtgcttcaccaagaagagccagctgcgggtgcaccagaagatccacactggagagaagcccaacatctgtgctgaatgtgggaaggccttcacagacaggagcaacctgatcacccaccagaagatccacacccgggagaagccctatgaatgtggggactgtgggaagaccttcacctggaagagccggctgaacatccaccagaagagccacactggagagcggcactatgagtgcagcaaatgtgggaaggccttcatccagaaggccaccctgtccatgcaccagatcatccacacaggcaagaagccctatgcctgcacagagtgccagaaggccttcacagacaggagcaacctgatcaagcaccagaagatgcacagcggggagaagcgctacaaggccagtgactag

SEQ ID NO: 176838 - DNA, 537 bp, synthetic construct
  misc_feature 1..537: note = Description of Artificial Sequence: Synthetic coding sequence
  source 1..537: mol_type = other DNA
atgggcaccctgccccacggcccccggccctggctgcagagagatgtggccgcccacgtgtctgctgaccatgctgccctgaacagcatcgtgtccctgcaggcctctgtgtcctttgaagatgtgacagtggacttcagcaaggaggagtggcagcacctggaccctgcccagaggcggctgtactgggatgtgaccctggagaactacagccacctgctgtctgtgggctaccagatccccaagtctgaggccgccttcaagctggagcagggcgagggcccctggatgctggagggggaggccccccaccagagctgcagcggggaggccatcggcaagatgcagcagcagggcatccctgggggcatcttcttccactgtgaaagatttgaccagcccatcggggaggacagcctgtgcagcatcctggaggagctgtggcaggacaatgaccagctggagcagaggcaggagaaccagaacaacctgctgagccacgtgaaggtgctgatcaaggagcggggctatgaatag

SEQ ID NO: 176839 - DNA, 3855 bp, synthetic construct
  misc_feature 1..3855: note = Description of Artificial Sequence: Synthetic coding sequence
  source 1..3855: mol_type = other DNA
atgcacaagaagagggtggaggagggggaggccagtgacttcagcctggcctgggacagctctgtgacagctgctgggggcctggagggggagccagaatgtgaccagaagaccagccgggccctggaggacagaaattctgtgaccagccaggaggagagaaatgaagatgatgaggacatggaggatgagagcatctacacctgtgaccactgccagcaggactttgagagcctggccgacctgacagaccaccgggcccaccgctgccctggagatggagatgatgacccccagctgtcctgggtggccagcagccccagcagcaaggatgtggccagccccacccagatgattggagatggctgtgacctgggcctgggggaggaggagggcggcaccggcctgccctacccctgccagttctgtgacaagagcttcatccggctgagctacctgaagagacatgagcagatccacagcgacaagctgcccttcaagtgcacctactgcagccgcctcttcaagcacaagaggagccgggacagacacatcaagctgcacactggagacaagaagtaccactgccatgaatgtgaggccgccttcagcagaagtgaccacctgaagatccacctgaagacccacagcagcagcaagcccttcaagtgcaccgtgtgcaagaggggcttcagcagcaccagcagcctgcagagccacatgcaggcccacaagaagaacaaggagcacctggccaagtctgagaaggaggccaagaaggatgacttcatgtgtgactactgtgaggacaccttcagccagacagaggagctggagaagcacgtgctgaccaggcacccccagctgtctgagaaggctgacctgcagtgcatccactgcccagaggtgtttgtggatgagaacaccctgctggcccacatccaccaggcccacgccaaccagaagcacaagtgccccatgtgcccagagcagttcagctctgtggagggcgtgtactgccacctggacagccaccggcagcctgacagcagcaaccacagcgtgtccccagaccctgtgctgggctctgtggcctccatgagcagcgccaccccagacagcagcgcctctgtggagcggggcagcaccccagacagcaccctgaagcccctgcggggccagaagaagatgagagatgatggccagggctggaccaaggtggtgtacagctgcccctactgcagcaagagggacttcaacagcctggccgtgctggagatccacctgaagaccatccacgccgacaagccccagcagagccacacctgccagatctgcctggacagcatgcccaccctgtacaacctgaatgaacatgtgaggaagctgcacaagaaccacgcctaccctgtgatgcagtttggaaacatcagcgccttccactgcaactactgcccagagatgtttgctgacatcaacagcctgcaggagcacatccgggtgagccactgcggccccaatgccaaccccagtgatggcaacaatgccttcttctgcaaccagtgcagcatgggcttcctgacagagagcagcctgacagagcacatccagcaggcccactgcagcgtgggcagcgccaagctggagagccctgtggtgcagcccacccagagcttcatggaggtgtacagctgcccctactgcaccaacagccccatcttcggcagcatcctgaagctgaccaagcacatcaaggagaaccacaagaacatccccctggcccacagcaagaagagcaaggccgagcagagccctgtgtccagtgatgtggaggtgagcagccccaagaggcagaggctgagcgccagcgccaacagcatcagcaatggagagtacccctgcaaccagtgtgacctgaagttcagcaactttgagagcttccagacccacctgaagctgcacctggagctgctgctgaggaagcaggcctgcccccagtgcaaggaggactttgacagccaggagagcctgctgcagcacctgactgtgcactacatgaccaccagcacccactacgtgtgtgagagctgtgacaagcagttcagctctgtggatgacctgcagaagcacctgctggacatgcacacctttgtgctgtaccactgcaccctgtgccaggaggtgtttgacagcaaggtgtccatccaggtgcacctggccgtgaagcacagcaatgagaagaagatgtaccgctgcacagcctgcaactgggacttcaggaaggaggccgacctgcaggtgcacgtgaagcacagccacctgggcaacccagccaaggcccacaagtgcatcttctgtggggagaccttcagcacagaggtggagctgcagtgccacatcaccacccacagcaagaagtacaactgcaagttctgcagcaaggccttccacgccatcatcctgctggagaagcacctgcgggagaagcactgtgtgtttgatgctgccacagaaaatggaacagccaatggagtgccccccatggccaccaagaaggccgagcctgctgacctgcagggcatgctgctgaagaaccctgaggcccccaacagccatgaggcctctgaagatgatgtggatgccagcgagcccatgtatggctgtgacatctgtggggccgcctacaccatggaggtgctgctgcagaaccaccggctgcgggaccacaacatccggcctggagaagatgatggcagcaggaagaaggccgagttcatcaagggcagccacaagtgcaatgtgtgcagcaggaccttcttctctgaaaatggcctgcgggagcacctgcagacccaccggggccctgccaagcactacatgtgccccatctgtggggagcgcttccccagcctgctgaccctgacagagcacaaggtgacccacagcaagagcctggacaccggcacctgccgcatctgcaagatgcccctgcagagcgaggaggagttcatcgagcactgccagatgcacccagacctgaggaacagcctgaccggcttccgctgtgtggtgtgcatgcagacagtgaccagcaccctggagctgaagatccacggcaccttccacatgcagaagctggccggcagcagcgctgccagcagccccaacggccagggcctgcagaagctgtacaagtgtgccctgtgcctgaaggagttccgcagcaagcaggacctggtgaagctggatgtgaatggcctgccctacggcctgtgtgccggctgcatggcccggagcgccaacggccaggtgggcggcctggcccctcctgagcctgctgaccggccctgtgccggcctgcgctgcccagagtgcagcgtgaagtttgaatctgctgaggacctggagagccacatgcaggtggaccaccgggacctgaccccagagaccagcggccccaggaagggcacccagaccagccctgtgcccaggaagaagacctaccagtgcatcaagtgccagatgacctttgaaaatgaaagagagatccagatccacgtggccaaccacatgattgaggagggcatcaaccacgagtgcaagctgtgcaaccagatgtttgacagccctgccaagctgctgtgccacctgattgagcacagctttgagggcatgggcggcaccttcaagtgccctgtgtgcttcaccgtgtttgtgcaggccaacaagctgcagcagcacatctttgctgtgcacggccaggaggacaagatctatgactgcagccagtgcccccagaagttcttcttccagacagagctgcagaaccacaccatgagccagcacgcccagtag

SEQ ID NO: 176840 - DNA, 3504 bp, synthetic construct
  misc_feature 1..3504: note = Description of Artificial Sequence: Synthetic coding sequence
  source 1..3504: mol_type = other DNA
atgattggagatggctgtgacctgggcctgggggaggaggagggcggcaccggcctgccctacccctgccagttctgtgacaagagcttcatccggctgagctacctgaagagacatgagcagatccacagcgacaagctgcccttcaagtgcacctactgcagccgcctcttcaagcacaagaggagccgggacagacacatcaagctgcacactggagacaagaagtaccactgccatgaatgtgaggccgccttcagcagaagtgaccacctgaagatccacctgaagacccacagcagcagcaagcccttcaagtgcaccgtgtgcaagaggggcttcagcagcaccagcagcctgcagagccacatgcaggcccacaagaagaacaaggagcacctggccaagtctgagaaggaggccaagaaggatgacttcatgtgtgactactgtgaggacaccttcagccagacagaggagctggagaagcacgtgctgaccaggcacccccagctgtctgagaaggctgacctgcagtgcatccactgcccagaggtgtttgtggatgagaacaccctgctggcccacatccaccaggcccacgccaaccagaagcacaagtgccccatgtgcccagagcagttcagctctgtggagggcgtgtactgccacctggacagccaccggcagcctgacagcagcaaccacagcgtgtccccagaccctgtgctgggctctgtggcctccatgagcagcgccaccccagacagcagcgcctctgtggagcggggcagcaccccagacagcaccctgaagcccctgcggggccagaagaagatgagagatgatggccagggctggaccaaggtggtgtacagctgcccctactgcagcaagagggacttcaacagcctggccgtgctggagatccacctgaagaccatccatgctgacaagccccagcagagccacacctgccagatctgcctggacagcatgcccaccctgtacaacctgaatgagcacgtgaggaagctgcacaagaaccacgcctaccctgtgatgcagtttggaaacatcagcgccttccactgcaactactgcccagagatgtttgctgacatcaacagcctgcaggagcacatccgggtgagccactgcggccccaatgccaaccccagtgatggcaacaatgccttcttctgcaaccagtgcagcatgggcttcctgacagagagcagcctgacagagcacatccagcaggcccactgcagcgtgggcagcgccaagctggagagccctgtggtgcagcccacccagagcttcatggaggtgtacagctgcccctactgcaccaacagccccatcttcggcagcatcctgaagctgaccaagcacatcaaggagaaccacaagaacatccccctggcccacagcaagaagagcaaggccgagcagagccctgtgtccagtgatgtggaggtgagcagccccaagaggcagaggctgagcgccagcgccaacagcatcagcaatggagagtacccctgcaaccagtgtgacctgaagttcagcaactttgagagcttccagacccacctgaagctgcacctggagctgctgctgaggaagcaggcctgcccccagtgcaaggaggactttgacagccaggagagcctgctgcagcacctgactgtgcactacatgaccaccagcacccactacgtgtgtgagagctgtgacaagcagttcagctctgtggatgacctgcagaagcacctgctggacatgcacacctttgtgctgtaccactgcaccctgtgccaggaggtgtttgacagcaaggtgtccatccaggtgcacctggccgtgaagcacagcaatgagaagaagatgtaccgctgcacagcctgcaactgggacttcaggaaggaggccgacctgcaggtgcacgtgaagcacagccacctgggcaacccagccaaggcccacaagtgcatcttctgtggggagaccttcagcacagaggtggagctgcagtgccacatcaccacccacagcaagaagtacaactgcaagttctgcagcaaggccttccacgccatcatcctgctggagaagcacctgcgggagaagcactgtgtgtttgatgctgccacagaaaatggaacagccaacggggtgccccccatggccaccaagaaggccgagcctgctgacctgcagggcatgctgctgaagaaccctgaggcccccaacagccatgaggcctctgaagatgatgtggatgccagcgagcccatgtatggctgtgacatctgtggggccgcctacaccatggaggtgctgctgcagaaccaccggctgcgggaccacaacatccggcctggagaagatgatggcagcaggaagaaggccgagttcatcaagggcagccacaagtgcaatgtgtgcagcaggaccttcttctctgaaaatggcctgcgggagcacctgcagacccaccggggccctgccaagcactacatgtgccccatctgtggggagcgcttccccagcctgctgaccctgacagagcacaaggtgacccacagcaagagcctggacaccggcacctgccgcatctgcaagatgcccctgcagagcgaggaggagttcatcgagcactgccagatgcacccagacctgaggaacagcctgaccggcttccgctgtgtggtgtgcatgcagacagtgaccagcaccctggagctgaagatccacggcaccttccacatgcagaagctggccggcagcagcgctgccagcagccccaacggccagggcctgcagaagctgtacaagtgtgccctgtgcctgaaggagttccgcagcaagcaggacctggtgaagctggatgtgaatggcctgccctacggcctgtgtgccggctgcatggcccggagcgccaacggccaggtgggcggcctggcccctcctgagcctgctgaccggccctgtgccggcctgcgctgcccagaatgttctgtgaagtttgagagcgctgaggacctggagagccacatgcaggtggaccaccgggacctgaccccagagaccagcggccccaggaagggcacccagaccagccctgtgcccaggaagaagacctaccagtgcatcaagtgccagatgacctttgaaaatgaaagagagatccagatccacgtggccaaccacatgattgaggagggcatcaaccacgagtgcaagctgtgcaaccagatgtttgacagccctgccaagctgctgtgccacctgattgagcacagctttgagggcatgggcggcaccttcaagtgccctgtgtgcttcaccgtgtttgtgcaggccaacaagctgcagcagcacatctttgctgtgcacggccaggaggacaagatctatgactgcagccagtgcccccagaagttcttcttccagacagagctgcagaaccacaccatgagccagcacgcccagtag

SEQ ID NO: 176841 - DNA, 3855 bp, synthetic construct; identical to SEQ ID NO: 176839
  misc_feature 1..3855: note = Description of Artificial Sequence: Synthetic coding sequence
  source 1..3855: mol_type = other DNA

SEQ ID NO: 176842 - DNA, 2430 bp, synthetic construct
  misc_feature 1..2430: note = Description of Artificial Sequence: Synthetic coding sequence
  source 1..2430: mol_type = other DNA
atgggccccctgaccttcatggatgtggccatcgagttctgcctggaggagtggcagtgcctggacatcgcccagcagaacctgtacagaaatgtgatgctggagaactacagaaacctggtgttcctgggcattgctgtgtccaagccagacctgatcacctgcctggagcaggagaaggagccctgggagcccatgagaagacatgagatggtggccaagccccctgtgatgtgcagccacttcacccaggacttctggccagagcagcacatcaaggaccccttccagaaggccaccctgcggcgctacaagaactgtgagcacaagaatgtgcacctgaagaaggaccacaagtctgtggatgagtgcaaggtgcacagaggaggctacaacggcttcaaccagtgcctgcctgccacccagagcaagatcttcctgtttgacaagtgtgtgaaggccttccacaagttcagcaacagcaacagacacaagatcagccacacagagaagaagctgttcaagtgcaaggaatgtgggaagagcttctgcatgctgccccacctggcccagcacaagatcatccacaccagggtgaacttctgcaagtgtgagaagtgtgggaaggccttcaactgccccagcatcatcaccaagcacaagaggatcaacacaggagagaagccctacacctgtgaggagtgtgggaaggtgttcaactggagcagccggctgaccacccacaagaagaactacacccgctacaagctgtacaagtgtgaggagtgtgggaaggccttcaacaagagcagcatcctgaccacccacaagatcatcagaactggagagaagttctacaagtgcaaggaatgtgccaaggccttcaaccagagcagcaacctgacagagcacaagaagatccaccctggagagaagccctacaagtgtgaggagtgtgggaaggccttcaactggcccagcaccctgaccaagcacaagaggatccacactggagagaagccctacacctgtgaggagtgtgggaaggccttcaaccagttcagcaacctgaccacccacaagaggatccacacagctgagaagttctacaagtgcacagaatgtggggaggccttcagccgcagcagcaacctgaccaagcacaagaagatccacacagagaagaagccctacaagtgtgaggagtgtgggaaggccttcaagtggagcagcaagctgacagagcacaagctgacccacactggagagaagccctacaagtgtgaggagtgtgggaaggccttcaactggcccagcaccctgaccaagcacaaccgcatccacactggagagaagccctacaagtgtgaggtgtgtgggaaggccttcaaccagttcagcaacctgaccacccacaagaggatccacacagctgagaagccctacaagtgtgaggagtgtgggaaggccttcagccgcagcagcaacctgaccaagcacaagaagatccacatcgagaagaagccctacaagtgtgaggagtgtgggaaggccttcaagtggagcagcaagctgacagagcacaagatcacccacactggagagaagccctacaagtgtgaggagtgtgggaaggccttcaaccacttcagcatcctgaccaagcacaagaggatccacactggagagaagccctacaagtgtgaggagtgtgggaaggccttcacccagagcagcaacctgaccacccacaagaagatccacactggagagaagttctacaagtgtgaggagtgtgggaaggccttcacccagagcagcaacctgaccacccacaagaagatccacactggaggcaagccctacaagtgtgaggagtgtgggaaggccttcaaccagttcagcaccctgaccaagcacaagatcatccacacagaggagaagccctacaagtgtgaggagtgtgggaaggccttcaagtggagcagcaccctgaccaagcacaagatcatccacactggagagaagccctacaagtgtgaggagtgtgggaaggccttcaagctgagcagcaccctgagcacccacaagatcatccacactggagagaagccctacaagtgtgagaagtgtgggaaggccttcaacagaagcagcaacctgattgagcacaagaagatccacactggagagcagccctacaagtgtgaggagtgtgggaaggccttcaactacagcagccacctgaacacccacaagaggatccacaccaaggagcagccctacaagtgcaaggaatgtgggaaggccttcaaccagtacagcaacctgaccacccacaacaagatccacactggagagaagctgtacaagccagaagatgtgaccgtcatcctgaccaccccccagaccttcagcaacatcaagtag

SEQ ID NO: 176843 - DNA, 2427 bp, synthetic construct
  misc_feature 1..2427: note = Description of Artificial Sequence: Synthetic coding sequence
  source 1..2427: mol_type = other DNA
ggccccctgaccttcatggatgtggccatcgagttctgcctggaggagtggcagtgcctggacatcgcccagcagaacctgtacagaaatgtgatgctggagaactacagaaacctggtgttcctgggcattgctgtgtccaagccagacctgatcacctgcctggagcaggagaaggagccctgggagcccatgagaagacatgagatggtggccaagccccctgtgatgtgcagccacttcacccaggacttctggccagagcagcacatcaaggaccccttccagaaggccaccctgcggcgctacaagaactgtgagcacaagaatgtgcacctgaagaaggaccacaagtctgtggatgagtgcaaggtgcaccggggcggctacaacggcttcaaccagtgcctgcctgccacccagagcaagatcttcctgtttgataaatgtgtgaaggccttccacaagttcagcaacagcaacagacacaagatcagccacacagagaagaagctgttcaagtgcaaggaatgtgggaagagcttctgcatgctgccccacctggcccagcacaagatcatccacaccagggtgaacttctgcaagtgtgagaagtgtgggaaggccttcaactgccccagcatcatcaccaagcacaagaggatcaacacaggagagaagccctacacctgtgaagaatgtgggaaggtgttcaactggagcagccggctgaccacccacaagaagaactacacccgctacaagctgtacaagtgtgaagaatgtgggaaggccttcaacaagagcagcatcctgaccacccacaagatcatcagaactggagagaagttctacaagtgcaaggaatgtgccaaggccttcaaccagagcagcaacctgacagagcacaagaagatccaccctggagagaagccctacaagtgtgaagaatgtgggaaggccttcaactggcccagcaccctgaccaagcacaagaggatccacactggagagaagccctacacctgtgaagaatgtgggaaggccttcaaccagttcagcaacctgaccacccacaagaggatccacacagctgagaagttctacaagtgcacagaatgtggggaggccttcagccgcagcagcaacctgaccaagcacaagaagatccacacagagaagaagccctacaagtgtgaagaatgtgggaaggccttcaagtggagcagcaagctgacagagcacaagctgacccacactggagagaagccctacaagtgtgaagaatgtgggaaggccttcaactggcccagcaccctgaccaagcacaaccgcatccacactggagagaagccctacaagtgtgaggtgtgtgggaaggccttcaaccagttcagcaacctgaccacccacaagaggatccacacagctgagaagccctacaagtgtgaagaatgtgggaaggccttcagccgcagcagcaacctgaccaagcacaagaagatccacatcgagaagaagccctacaagtgtgaagaatgtgggaaggccttcaagtggagcagcaagctgacagagcacaagatcacccacactggagagaagccctacaagtgtgaagaatgtgggaaggccttcaaccacttcagcatcctgaccaagcacaagaggatccacactggagagaagccctacaagtgtgaagaatgtgggaaggccttcacccagagcagcaacctgaccacccacaagaagatccacactggagagaagttctacaagtgtgaagaatgtgggaaggccttcacccagagcagcaacctgaccacccacaagaagatccacactggaggcaagccctacaagtgtgaagaatgtgggaaggccttcaaccagttcagcaccctgaccaagcacaagatcatccacacagaggagaagccctacaagtgtgaagaatgtgggaaggccttcaagtggagcagcaccctgaccaagcacaagatcatccacactggagagaagccctacaagtgtgaagaatgtgggaaggccttcaagctgagcagcaccctgagcacccacaagatcatccacactggagagaagccctacaagtgtgagaagtgtgggaaggccttcaacagaagcagcaacctgattgagcacaagaagatccacactggagagcagccctacaagtgtgaagaatgtgggaaggccttcaactacagcagccacctgaacacccacaagaggatccacaccaaggagcagccctacaagtgcaaggaatgtgggaaggccttcaaccagtacagcaacctgaccacccacaacaagatccacactggagagaagctgtacaagccagaagatgtgaccgtcatcctgaccaccccccagaccttcagcaacatcaagtag

SEQ ID NO: 176844 - DNA, 2412 bp, synthetic construct
  misc_feature 1..2412: note = Description of Artificial Sequence: Synthetic coding sequence
  source 1..2412: mol_type = other DNA
atggatgtggccatcgagttctgcctggaggagtggcagtgcctggacatcgcccagcagaacctgtacagaaatgtgatgctggagaactacagaaacctggtgttcctgggcattgctgtgtccaagccagacctgatcacctgcctggagcaggagaaggagccctgggagcccatgagaagacatgagatggtggccaagccccctgtgatgtgcagccacttcacccaggacttctggccagagcagcacatcaaggaccccttccagaaggccaccctgcggcgctacaagaactgtgagcacaagaatgtgcacctgaagaaggaccacaagtctgtggatgagtgcaaggtgcacagaggaggctacaacggcttcaaccagtgcctgcctgccacccagagcaagatcttcctgtttgacaagtgtgtgaaggccttccacaagttcagcaacagcaacagacacaagatcagccacacagagaagaagctgttcaagtgcaaggaatgtgggaagagcttctgcatgctgccccacctggcccagcacaagatcatccacaccagggtgaacttctgcaagtgtgagaagtgtgggaaggccttcaactgccccagcatcatcaccaagcacaagaggatcaacacaggagagaagccctacacctgtgaggagtgtgggaaggtgttcaactggagcagccggctgaccacccacaagaagaactacacccgctacaagctgtacaagtgtgaggagtgtgggaaggccttcaacaagagcagcatcctgaccacccacaagatcatcagaactggagagaagttctacaagtgcaaggaatgtgccaaggccttcaaccagagcagcaacctgacagagcacaagaagatccaccctggagagaagccctacaagtgtgaggagtgtgggaaggccttcaactggcccagcaccctgaccaagcacaagaggatccacactggagagaagccctacacctgtgaggagtgtgggaaggccttcaaccagttcagcaacctgaccacccacaagaggatccacacagctgagaagttctacaagtgcacagaatgtggggaggccttcagccgcagcagcaacctgaccaagcacaagaagatccacacagagaagaagccctacaagtgtgaggagtgtgggaaggccttcaagtggagcagcaagctgacagagcacaagctgacccacactggagagaagccctacaagtgtgaggagtgtgggaaggccttcaactggcccagcaccctgaccaagcacaaccgcatccacactggagagaagccctacaagtgtgaggtgtgtgggaaggccttcaaccagttcagcaacctgaccacccacaagaggatccacacagctgagaagccctacaagtgtgaggagtgtgggaaggccttcagccgcagcagcaacctgaccaagcacaagaagatccacatcgagaagaagccctacaagtgtgaggagtgtgggaaggccttcaagtggagcagcaagctgacagagcacaagatcacccacactggagagaagccctacaagtgtgaggagtgtgggaaggccttcaaccacttcagcatcctgaccaagcacaagaggatccacactggagagaagccctacaagtgtgaggagtgtgggaaggccttcacccagagcagcaacctgaccacccacaagaagatccacactggagagaagttctacaagtgtgaggagtgtgggaaggccttcacccagagcagcaacctgaccacccacaagaagatccacactggaggcaagccctacaagtgtgaggagtgtgggaaggccttcaaccagttcagcaccctgaccaagcacaagatcatccacacagaggagaagccctacaagtgtgaggagtgtgggaaggccttcaagtggagcagcaccctgaccaagcacaagatcatccacactggagagaagccctacaagtgtgaggagtgtgggaaggccttcaagctgagcagcaccctgagcacccacaagatcatccacactggagagaagccctacaagtgtgagaagtgtgggaaggccttcaacagaagcagcaacctgattgagcacaagaagatccacactggagagcagccctacaagtgtgaggagtgtgggaaggccttcaactacagcagccacctgaacacccacaagaggatccacaccaaggagcagccctacaagtgcaaggaatgtgggaaggccttcaaccagtacagcaacctgaccacccacaacaagatccacactggagagaagctgtacaagccagaagatgtgaccgtcatcctgaccaccccccagaccttcagcaacatcaagtag

SEQ ID NO: 176845 - DNA, 1713 bp, synthetic construct
  misc_feature 1..1713: note = Description of Artificial Sequence: Synthetic coding sequence
  source 1..1713: mol_type = other DNA
atggagaacctgaagagcggcgtgtaccccctgaaggaggccagcggctgccctggagctgacaggaacctgctggtgtacagcttctatgagaagggccccctgaccttcagagatgtggccatcgagttcagcctggaggagtggcagtgcctggacacagcccagcaggacctgtacaggaaggtgatgctggagaactacagaaacctggtgttcctggccggcattgctgtgtccaagccagacctgatcacctgcctggagcagggcaaggagccctggaacatgaagagacatgccatggtggaccagccccctgtgacctacagccactttgcccaggacctgtggccagagcagggcatcaaggacagcttccaggaggtgatcctgcggcgctatggaaaatgtggccacgaggacctgcagctgaggacaggctgcaagtctgtggatgagtgcaacctgcacaaggagtgctatgatgagctgaaccagtgcctgaccaccacccagagcgagatcttccagtatgacaagtatgtgaatgtgttctacaagttcagcaaccccaacatccagaagatccgccacacaggcaagaagcccttcaagtgcaagaagtgtgacaagagcttctgcatgctgctgcacctgacccagcacaagaggatccacatccgggagaacagctaccagtgtgaagaatgtgggaaggtgttcaactggttcagcaccctgaccaggcaccggcgcatccacactggagagaagccctacaagtgtgagcagtgtgggaaggccttcaagcagagcagcaccctgaccacccacaagatcatccacactggagagaagccctaccgctgtgaagaatgtgggaagaccttcaacagaagcagccacctgaccacccacaagaggatccacactggagagaagccctaccgctgtgaagaatgtggccgggccttcaacagaagcagccacctgaccacccacaagatcatccacactggagagaagccctacaagtgtgaagaatgtgggaaggccttcaaccagagcagcaccctgaccacccacaagatcatccacgccggggagaagccctacaagtgtgaagaatgtgggaaggccttctaccgcttctcctacctgaccaagcacaagatcatccacactggagagaagttctacaagtgtgaagaatgtgggaagggcttcaactggagcagcaccctgaccaagcacaagaggatccacactggagagaagccctacaagtgtgagcagtgtgggaaggccttcaatgaaagcagcaacctgacagcccacaagatcatccacactggagagaagccctacaagtgtgaagaatgtgggaaggccttcaacagaagccccaagctgacagcccacaaggtgatccacagcggggagaagccctacaagtgtgaagaatgtgggaaggccttcaaccagttcagcaacctgaccaagcacaagatcacccacatcggggacaccagctacaagtacctggagtgtgacaaggccttcagccagagcagcaccctgaccaagcacaaggtgatccacactggagagaagccctacaactgtgaggagtatggcaaggccttcaaccagagcagcaacctgattgagcagagcaacagctactggagggagaccctgcagatgtag

SEQ ID NO: 176846 - DNA, 1413 bp, synthetic construct
  misc_feature 1..1413: note = Description of Artificial Sequence: Synthetic coding sequence
  source 1..1413: mol_type = other DNA
atggccgccaccctgctgatggccggcagccaggcccctgtgacctttgaggacatggccatgtacctgacccgggaggagtggaggcccctggatgctgcccagagggacctgtacagagatgtgatgcaggagaactatggaaatgtggtgtccctggactttgagatccgctcagaaaatgaggtgaaccccaagcaggagatcagtgaagatgtgcagtttggcaccaccagcgagaggcctgcagaaaatgctgaggagaaccctgagagcgaggagggctttgagagcggggacagaagtgagcggcagtggggagacctgacagctgaggagtgggtgtcctaccccctgcagcctgtgacagacctgctggtgcacaaggaggtgcacacaggcatccgctaccacatctgcagccactgcggcaaggccttcagccagatcagtgacctgaacagacaccagaagacccacactggagaccggccctacaagtgctatgaatgtgggaagggcttcagccgcagcagccacctgatccagcaccagaggacccacactggagagcggccctatgactgcaatgaatgtgggaagagctttggccgcagcagccacctgatccagcaccagaccatccacactggagagaagccccacaagtgcaatgaatgtgggaagagcttctgccgcctgagccacctgatccagcaccagaggacccacagcggggagaagccctatgaatgtgaggagtgtgggaagagcttcagccgcagcagccacctggcccagcaccagaggacccacactggagagaagccctatgaatgtaatgaatgtggccggggcttcagcgagaggagtgacctgatcaagcactacagagtgcacactggagagcggccctacaagtgtgatgaatgtgggaagaacttcagccagaacagcgacctggtgcgccacagaagagcccacactggagagaagccctaccactgcaatgaatgtggggagaacttcagccgcatcagccacctggtgcagcaccagaggacccacactggagagaagccctatgaatgtaatgcctgtgggaagagcttcagccgcagcagccacctgatcacccaccagaagatccacactggagagaagccctatgaatgtaatgaatgctggaggagctttggagagaggagtgacctgatcaagcaccagaggacccacactggagagaagccctatgaatgtgtgcagtgtgggaagggcttcacccagagcagcaacctgatcacccaccagagggtgcacactggagagaagccctatgaatgtacagaatgtgagaagagcttcagccgcagcagcgccctgatcaagcacaagagggtgcacacagactag

SEQ ID NO: 176847 - DNA, 1413 bp, synthetic construct; identical to SEQ ID NO: 176846
  misc_feature 1..1413: note = Description of Artificial Sequence: Synthetic coding sequence
  source 1..1413: mol_type = other DNA

SEQ ID NO: 176848 - DNA, 909 bp, synthetic construct
  misc_feature 1..909: note = Description of Artificial Sequence: Synthetic coding sequence
  source 1..909: mol_type = other DNA
atggccgccaccctgctgatggccggcagccaggcccctgtgacctttgaggacatggccatgtacctgacccgggaggagtggaggcccctggatgctgcccagagggacctgtacagagatgtgatgcaggagaactatggaaatgtggtgtccctggactttgagatccgctcagaaaatgaggtgaaccccaagcaggagatcagtgaagatgtgcagtttggcaccaccagcgagaggcctgcagaaaatgctgaggagaaccctgagagcgaggagggctttgagagcggggacagaagtgagcggcagtggggagacctgacagctgaggagtgggtgtcctaccccctgcagcctgtgacagacctgctggtgcacaaggaggtgcacacaggcatccgctaccacatctgcagccactgcggcaaggccttcagccagatcagtgacctgaacagacaccagaagacccacactggagaccggccctacaagtgctatgaatgtgggaagggcttcagccgcagcagccacctgatccagcaccagaggacccacactggagagcggccctatgactgcaatgaatgtgggaagagctttggccgcagcagccacctgatccagcaccagaccatccacactggagagaagccccacaagtgcaatgaatgtgggaagagcttctgccgcctgagccacctgatccagcaccagaggacccacagcggggagaagccctatgaatgtgaggagtgtgggaagagcttcagccgcagcagccacctggcccagcaccagaggacccacactggagagaagccctatgaatgtacagaatgtgagaagagcttcagccgcagcagcgccctgatcaagcacaagagggtgcacacagactag

SEQ ID NO: 176849 - DNA, 1848 bp, synthetic construct
  misc_feature 1..1848: note = Description of Artificial Sequence: Synthetic coding sequence
  source 1..1848: mol_type = other DNA
atggattctgtggcctttgaagatgtggccgtgaacttcacccatgaggagtgggccctgctgggccccagccagaagaacctgtacagagatgtgatgagggagaccatccggaacctgaactgcatcggcatgaagtgggagaaccagaacattgatgaccagcaccagaacctgcggaggaacccccgctgtgatgtggtggagagatttgggaagagcaaggatggcagccagtgtggggagaccctgagccagatccggaacagcatcgtgaacaagaacaccccagcccgggtggatgcctgtggcagctctgtgaatggagaggtgatcatgggccacagcagcctgaactgctacatccgggtggacaccggccacaagcaccgggagtgccacgagtatgcagagaagagctacacccacaagcagtgtgggaagggcctgagctaccgccacagcttccagacctgtgagcggccccacacaggcaagaagccctatgactgcaaggaatgtgggaagaccttcagcagccctggcaacctgcggcggcacatggtggtgaagggaggagatggcccctacaagtgtgagctgtgtgggaaggccttcttctggcccagcctgctgaggatgcatgagaggacccacactggagagaagccctatgagtgcaagcagtgcagcaaggccttccctgtgtacagcagctacctgcggcatgagaagatccacactggagagaagccctatgagtgcaagcagtgcagcaaggccttcccagactacagcagctacctgcggcatgagaggacccacactggagagaagccctacaagtgcaagcagtgtgggaaggccttctctgtgtctggcagcctgcgggtgcatgagcgcatccacactggagagaagccctacacctgcaagcagtgtgggaaggccttctgccacctgggcagcttccagaggcacatgatcatgcacagcggagatggcccccacaagtgcaagatctgtgggaagggctttgacttccctggcagcgcccgcatccacgagggcacccacaccctggagaagccctatgagtgcaagcagtgtgggaagctgctgagccacaggagcagcttcagaagacacatgatggcccacactggagatggcccccacaagtgcaccgtgtgtgggaaggcctttgacagccccagcgtcttccagagacatgagaggacccacactggagagaagccctatgagtgcaagcagtgtgggaaggccttccgcaccagcagcagcctgaggaagcatgagaccacccacactggagagcagccctacaagtgcaagtgtgggaaggccttcagtgacctcttctccttccagagccatgagaccacccacagcgaggaggagccctatgagtgcaaggaatgtgggaaggccttcagcagcttcaagtacttctgcagacatgagaggacccacagcgaggagaagagctatgagtgccagatctgtgggaaggccttcagccgcttctcctacctgaagacccatgagaggacccacacagctgagaagccctatgagtgcaagcagtgcaggaaggccttcttctggcccagcttcctgctgcggcatgagaggacccacactggagagcggccctatgagtgcaagcactgcggcaaggccttcagccgcagcagcttctgccgggagcacgagaggacccacactggagagaagccctatgagtgcaaggaatgtgggaaggccttcagcagcctgagcagcttcaacagacacaagaggacccactggaaggacatcctgtag

SEQ ID NO: 176850 - DNA, 1992 bp, synthetic construct
  misc_feature 1..1992: note = Description of Artificial Sequence: Synthetic coding sequence
  source 1..1992: mol_type = other DNA
atggccctgtgctacggcaccttctggggctaccccaagatgctggaggccgccaacctgatggagggcctggtggacatcggcccctgggtgaccctgccccggggccagcctgaggtgctggagtggggcctgcccaaggaccaggacagcgtggcctttgaagatgtggccgtgaacttcacccatgaggagtgggccctgctgggccccagccagaagaacctgtacagagatgtgatgagggagaccatccggaacctgaactgcatcggcatgaagtgggagaaccagaacattgatgaccagcaccagaacctgcggaggaacccccgctgtgatgtggtggagagatttgggaagagcaaggatggcagccagtgtggggagaccctgagccagatccggaacagcatcgtgaacaagaacaccccagcccgggtggatgcctgtggcagctctgtgaatggagaggtgatcatgggccacagcagcctgaactgctacatccgggtggacaccggccacaagcaccgggagtgccacgagtatgcagagaagagctacacccacaagcagtgtgggaagggcctgagctaccgccacagcttccagacctgtgagcggccccacacaggcaagaagccctatgactgcaaggaatgtgggaagaccttcagcagccctggcaacctgcggcggcacatggtggtgaagggaggagatggcccctacaagtgtgagctgtgtgggaaggccttcttctggcccagcctgctgaggatgcatgagaggacccacactggagagaagccctatgagtgcaagcagtgcagcaaggccttccctgtgtacagcagctacctgcggcatgagaagatccacactggagagaagccctatgagtgcaagcagtgcagcaaggccttcccagactacagcagctacctgcggcatgagaggacccacactggagagaagccctacaagtgcaagcagtgtgggaaggccttctctgtgtctggcagcctgcgggtgcatgagcgcatccacactggagagaagccctacacctgcaagcagtgtgggaaggccttctgccacctgggcagcttccagaggcacatgatcatgcacagcggagatggcccccacaagtgcaagatctgtgggaagggctttgacttccctggcagcgcccgcatccacgagggcacccacaccctggagaagccctatgagtgcaagcagtgtgggaagctgctgagccacaggagcagcttcagaagacacatgatggcccacactggagatggcccccacaagtgcaccgtgtgtgggaaggcctttgacagccccagcgtcttccagagacatgagaggacccacactggagagaagccctatgagtgcaagcagtgtgggaaggccttccgcaccagcagcagcctgaggaagcatgagaccacccacactggagagcagccctacaagtgcaagtgtgggaaggccttcagtgacctcttctccttccagagccatgagaccacccacagcgaggaggagccctatgagtgcaaggaatgtgggaaggccttcagcagcttcaagtacttctgcagacatgagaggacccacagcgaggagaagagctatgagtgccagatctgtgggaaggccttcagccgcttctcctacctgaagacccatgagaggacccacacagctgagaagccctatgagtgcaagcagtgcaggaaggccttcttctggcccagcttcctgctgcggcatgagaggacccacactggagagcggccctatgagtgcaagcactgcggcaaggccttcagccgcagcagcttctgccgggagcacgagaggacccacactggagagaagccctatgagtgcaaggaatgtgggaaggccttcagcagcctgagcagcttcaacagacacaagaggacccactggaaggacatcctgtag

SEQ ID NO: 176851 - DNA, 1914 bp, synthetic construct
  misc_feature 1..1914: note = Description of Artificial Sequence: Synthetic coding sequence
  source 1..1914: mol_type = other DNA
atggccctgtgctacggcaccttctggggctaccccaagatgctggaggccgccaacctgatggagggcctggtggacatcggcccctgggtgaccctgccccggggccagcctgaggtgctggagtggggcctgcccaaggaccaggacagcgtggcctttgaagatgtggccgtgaacttcacccatgaggagtgggccctgctgggccccagccagaagaacctgtacagagatgtgatgagggagaccatccggaacctgaactgcatcggcatgaagtgggagaaccagaacattgatgaccagcaccagaacctgcggaggaacccccgctgtgatgtggtggagagatttgggaagagcaaggatggcagccagtgtggggagaccctgagccagatccggaacagcatcgtgaacaagaacaccccagcccgggtggatgcctgtggcagctctgtgaatggagaggtgatcatgggccacagcagcctgaactgctacatccgggtggacaccggccacaagcaccgggagtgccacgagtatgcagagaagagctacacccacaagcagtgtgggaagggcctgagctaccgccacagcttccagacctgtgagcggccccacacaggcaagaagccctatgactgcaaggaatgtgggaagaccttcagcagccctggcaacctgcggcggcacatggtggtgaagggaggagatggcccctacaagtgtgagctgtgtgggaaggccttcttctggcccagcctgctgaggatgcatgagaggacccacactggagagaagccctatgagtgcaagcagtgcagcaaggccttccctgtgtacagcagctacctgcggcatgagaagatccacactggagagaagccctatgagtgcaagcagtgcagcaaggccttcccagactacagcagctacctgcggcatgagaggacccacactggagagaagccctacaagtgcaagcagtgtgggaaggccttctctgtgtctggcagcctgcgggtgcatgagcgcatccacactggagagaagccctacacctgcaagcagtgtgggaaggccttctgccacctgggcagcttccagaggcacatgatcatgcacagcggagatggcccccacaagtgcaagatctgtgggaagggctttgacttccctggcagcgcccgcatccacgagggcacccacaccctggagaagccctatgagtgcaagcagtgtgggaagctgctgagccacaggagcagcttcagaagacacatgatggcccacactggagatggcccccacaagtgcaccgtgtgtgggaaggcctttgacagccccagcgtcttccagagacatgagaggacccacactggagagaagccctatgagtgcaagcagtgtgggaaggccttccgcaccagcagcagcctgaggaagcatgagaccacccacactggagagcagccctacaagtgcaagtgtgggaaggccttcagtgacctcttctccttccagagccatgagaccacccacagcgaggaggagccctatgagtgcaaggaatgtgggaaggccttcagcagcttcaagtacttctgcagacatgagaggacccacagcgaggagaagagctatgagtgccagatctgtgggaaggccttcagccgcttctcctacctgaagacccatgagaggacccacacagctgagaagccctatgagtgcaagcagtgcaggaaggccttcttctggcccagcttcctgctgcggcatgagaggacccacactggagagcggccctatgagtgcaagcactgcggcaaggccttcagccgcagcagcttctgccgggagcacgagaggacccacactggagagaagccctatgaatag

SEQ ID NO: 176852 - DNA, 1770 bp, synthetic construct
  misc_feature 1..1770: note = Description of Artificial Sequence: Synthetic coding sequence
  source 1..1770: mol_type = other DNA
atggattctgtggcctttgaagatgtggccgtgaacttcacccatgaggagtgggccctgctgggccccagccagaagaacctgtacagagatgtgatgagggagaccatccggaacctgaactgcatcggcatgaagtgggagaaccagaacattgatgaccagcaccagaacctgcggaggaacccccgctgtgatgtggtggagagatttgggaagagcaaggatggcagccagtgtggggagaccctgagccagatccggaacagcatcgtgaacaagaacaccccagcccgggtggatgcctgtggcagctctgtgaatggagaggtgatcatgggccacagcagcctgaactgctacatccgggtggacaccggccacaagcaccgggagtgccacgagtatgcagagaagagctacacccacaagcagtgtgggaagggcctgagctaccgccacagcttccagacctgtgagcggccccacacaggcaagaagccctatgactgcaaggaatgtgggaagaccttcagcagccctggcaacctgcggcggcacatggtggtgaagggaggagatggcccctacaagtgtgagctgtgtgggaaggccttcttctggcccagcctgctgaggatgcatgagaggacccacactggagagaagccctatgagtgcaagcagtgcagcaaggccttccctgtgtacagcagctacctgcggcatgagaagatccacactggagagaagccctatgagtgcaagcagtgcagcaaggccttcccagactacagcagctacctgcggcatgagaggacccacactggagagaagccctacaagtgcaagcagtgtgggaaggccttctctgtgtctggcagcctgcgggtgcatgagcgcatccacactggagagaagccctacacctgcaagcagtgtgggaaggccttctgccacctgggcagcttccagaggcacatgatcatgcacagcggagatggcccccacaagtgcaagatctgtgggaagggctttgacttccctggcagcgcccgcatccacgagggcacccacaccctggagaagccctatgagtgcaagcagtgtgggaagctgctgagccacaggagcagcttcagaagacacatgatggcccacactggagatggcccccacaagtgcaccgtgtgtgggaaggcctttgacagccccagcgtcttccagagacatgagaggacccacactggagagaagccctatgagtgcaagcagtgtgggaaggccttccgcaccagcagcagcctgaggaagcatgagaccacccacactggagagcagccctacaagtgcaagtgtgggaaggccttcagtgacctcttctccttccagagccatgagaccacccacagcgaggaggagccctatgagtgcaaggaatgtgggaaggccttcagcagcttcaagtacttctgcagacatgagaggacccacagcgaggagaagagctatgagtgccagatctgtgggaaggccttcagccgcttctcctacctgaagacccatgagaggacccacacagctgagaagccctatgagtgcaagcagtgcaggaaggccttcttctggcccagcttcctgctgcggcatgagaggacccacactggagagcggccctatgagtgcaagcactgcggcaaggccttcagccgcagcagcttctgccgggagcacgagaggacccacactggagagaagccctatgaatag

SEQ ID NO: 176853 - DNA, 1623 bp, synthetic construct
  misc_feature 1..1623: note = Description of Artificial Sequence: Synthetic coding sequence
  source 1..1623: mol_type = other DNA
atgggcatcgtggagaaggccagcagcagcagtgacagcgtgacctttgaagatgtggccgtgaacttcacccaggaggagtggaccctgctggaccccagccagaagaagctgtacagagatgtgatgtgggagaccttcaggaacctggccaccatcggcaccaagcagaaggagtggaacatcgaggagcagtacaagaaccagggcaggaacctgaggaaccacatggtggagcggctgtgtgagagcaaggagggcagccatggaggagagggcttcagccagatcgccaacctgagcctgaacaagaagacccccagcggcggcaagctgtgggagagctctgtgtgtgggaaggtgctgagccaccacagcagcctgaacagacacatccgcagctacaccaggcacaagctgtacaagtgccaggagtatggagagaagccctacaagtgcaagaagtgtgggaagcccttctcctacctgcagagcttcaagaagcacaagaggacccacagcgctggcatcgtgtacaagtgcaaggcctgtgggaaggccttcagctgccagaggagcttccagatccacggccgcacccacactggagacaagcccttcaagtgcaaggaatgtgggaaggccttccgctaccaccagagcgcccagaagcatgagaaggcccacactggagagaagccctacaagtgcaaggaatgtgggaagcccttcatctaccgccacagcgcccgggcccatgaaagaaaccacacagtgcagaagagatatgagtgcaagcagtgtgggaagacctacatcagctctgtgggcttccaggcccacgagaggacccacactggagagaagccctatgagtgcaagaagtgtgggaaggtgtttgtgtaccacaacagcgcccagagacatgagaagacccacactggagagaagccctacaagtgcaaggaatgtgggaaggccttctcctaccactgcacagcccagaagcatgaaagaaaccacacagcccagaagcactatgagtgcaagctgtgtgggaagacctacctgagccccctgggcttccaggcccacgagagcacccacactggagacaagccctttgagtgcaagaagtgtgggaaggccttccgctactactacagcgcccagagacatgagaggacccacactggagagaagccctacaagtgcaaggaatgtgggaaggccttctactgctgcagcagcgccaggagacatgagaggatgcacacagccaagaagcagtatgagtgcaagaagtgtgggaagacctacatcaccctggccggcttccagatccacgagaggacccacactggagagaagccctatgagtgcaagcagtgtgggaaggccttcagcagcagcagctacatccacatccacgagcgcatccacactggagagaagccctatgagtgcaaggaatgtgggaagcccttctccttcctgaccggcttccgggtgcacatgaggatgcacactggagagaagccctacaagtgcaaggactgtggaaatgccttcatctggagggccagcctgcagtaccacgtgaagaaggtgcatgctgagtag

SEQ ID NO: 176854 - DNA, 1848 bp, synthetic construct; identical to SEQ ID NO: 176849
  misc_feature 1..1848: note = Description of Artificial Sequence: Synthetic coding sequence
  source 1..1848: mol_type = other DNA

SEQ ID NO: 176855 - DNA, 984 bp, synthetic construct
  misc_feature 1..984: note = Description of Artificial Sequence: Synthetic coding sequence
  source 1..984: mol_type = other DNA
atggaggtggccgtgcctgtgaagcaggaggccgagggcctggccctggacagcccctggcaccgcttccgccgcttccacctgggagatgcccctggcccccgggaggccctgggcctgctgcgggccctgtgccgggactggctgcggcctgaggtgcacaccaaggagcagatgctggagctgctggtgctggagcagttcctgagcgccctgcctgctgacacccaggcctgggtgtgcagccggcagccccagagcggggaggaggccgtggccctgctggaggagctgtggggccctgctgccagcccagatggcagcagcgccaccagggtgccccaggatgtgacccagggccctggggccaccggcggcaaggaggacagcggcatgatccccctggccggcacagcccctggagctgagggccctgcccctggggacagccaggccgtgcggccctacaagcaggagcccagcagcccccccctggcccctggcctgcctgccttcctggccgcccctggcaccaccagctgcccagaatgtgggaagaccagcctgaagccagcccacctgctgcggcaccggcagagccacagcggggagaagccccacgcctgcccagaatgtgggaaggccttccggaggaaggagcacctgcggcggcaccgggacacccaccctggcagccctggcagccctggccctgccctgcggcccctgcctgcccgggagaagccccacgcctgctgtgaatgtgggaagaccttctactggagggagcacctggtgcgccacaggaagacccacagcggggcccggccctttgcctgctgggagtgtgggaaaggatttggaagaagagagcacgtgctgcggcaccagaggatccacggccgggccgccgccagcgcccagggcgctgtggcccctggcccagatggcggcggccccttccccccctggcccctgggctag

SEQ ID NO: 176856 - DNA, 1557 bp, synthetic construct
  misc_feature 1..1557: note = Description of Artificial Sequence: Synthetic coding sequence
  source 1..1557: mol_type = other DNA
atggctgtggccctgggctgtgccatccaggccagcctgaaccagggctctgtgttccaggagtatgacacagactgtgaggtgttccggcagcgcttccggcagttccagtaccgggaggccgccggcccccatgaggccttcaacaagctgtgggagctgtgctgccagtggctgaagcccaagatgaggagcaaggagcagatcctggagctgctggtgctggagcagttcctgaccatcctgcccacagaaattgagacctgggtgcgggagcactgcccagagaaccgggagcgggtggtgtccctgattgaggacctgcagcgggagctggagatccctgagcagcaggtggacatgcatgacatgctgctggaggagctggcccctgtgggcacagcccacatcccccccaccatgcacctggagagccctgccctgcaggtgatgggccctgcccaggaggcccctgtggccgaggcctggatcccccaggccggccccccagagctgaactacggggccactggagagtgccagaacttcctggaccccggctaccccctgcccaagctggacatgaacttcagcctggagaaccgggaggagccctgggtgaaggagctgcaggacagcaaggagatgaagcagctgctggacagcaagattggatttgagatcggcattgaaaatgaggaggacaccagcaagcagaagaagatggagaccatgtaccccttcatcgtgaccctggagggcaatgccctgcagggccccatcctgcagaaggactatgtgcagctggagaaccagtgggagaccccacctgaggacctgcagacagacctggccaagctggtggaccagcagaaccccaccctgggggagaccccagagaacagcaacctggaggagcccctgaaccccaagccccacaagaagaagagccctggagagaagccccaccgctgcccccagtgtgggaagtgctttgccaggaagagccagctgaccggccaccagaggatccacagcggggaggagccccacaagtgcccagaatgtgggaagcgcttcctgcggagcagtgacctgtaccgccaccagaggctgcacactggagagcggccctatgagtgcaccgtgtgcaagaagcgcttcacccggcgcagccacctgattggccaccagaggacccacagcgaggaggagacctacaagtgcctggagtgtgggaagagcttctgccacggcagcagcctgaagaggcacctgaagacccacactggagagaagccccaccgctgccacaactgtgggaagagcttcagccggctgacagccctgaccctgcaccagaggacccacacagaggagcggcccttcaagtgcaactactgtgggaagagcttccggcagaggcccagcctggtgatccacctgcgcatccacactggagagaagccctacaagtgcacccactgcagcaagagcttccggcagagagctggcctcatcatgcaccaggtgacccacttccggggcctcatctag

SEQ ID NO: 176857 - DNA, 384 bp, synthetic construct
  misc_feature 1..384: note = Description of Artificial Sequence: Synthetic coding sequence
  source 1..384: mol_type = other DNA
atggctgtggccctgggctgtgccatccaggccagcctgaaccagggctctgtgttccaggagtatgacacagactgtgaggtgttccggcagcgcttccggcagttccagtaccgggaggccgccggcccccatgaggccttcaacaagctgtgggagctgtgctgccagtggctgaagcccaagatgaggagcaaggagcagatcctggagctgctggtgctggagcagttcctgaccatcctgcccacagaaattgagacctgggtgcgggagcactgcccagagaaccgggagcgggtggtgtccctgattgaggacctgcagcgggagctggagatccctgagcagcagacctttgctgctgagtacagccactactag

SEQ ID NO: 176858 - DNA, 495 bp, synthetic construct
  misc_feature 1..495: note = Description of Artificial Sequence: Synthetic coding sequence
  source 1..495: mol_type = other DNA
atggctgtggccctgggctgtgccatccaggccagcctgaaccagggctctgtgttccaggagtatgacacagactgtgaggtgttccggcagcgcttccggcagttccagtaccgggaggccgccggcccccatgaggccttcaacaagctgtgggagctgtgctgccagtggctgaagcccaagatgaggagcaaggagcagatcctggagctgctggtgctggagcagttcctgaccatcctgcccacagaaattgagacctgggtgcgggagcactgcccagagaaccgggagcgggtggtgtccctgattgaggacctgcagcgggagctggagatccctgagcagcaggtgaggaaagaatgtggcatcttcgtcatcggccccaaggaggtggccgaggccgccggcacccggccccacatctgcctgtatgtgatcccccagccccaggacttcagccgggtgctcttcctgttcctgttctgctag

SEQ ID NO: 176859 - DNA, 2049 bp, synthetic construct
  misc_feature 1..2049: note = Description of Artificial Sequence: Synthetic coding sequence
  source 1..2049: mol_type = other DNA
atgaccaagagcaaggaggccgtgaccttcaaggatgtggccgtggtgttcagcgaggaggagctgcagctgctggacctggcccagaggaagctgtacagagatgtgatgctggagaacttcagaaatgtggtgtctgtgggccaccagagcaccccagatggcctgccccagctggagcgggaggagaagctgtggatgatgaagatggccacccagagggacaacagcagcggggccaagaacctgaaggagatggagaccctgcaggaggtgggcctgcgctacctgccccatgaggagctgttctgcagccagatctggcagcagatcacccgggagctgatcaagtaccaggacagcgtggtgaacatccagaggacaggctgccagctggagaagagagatgacctgcactacaaggatgagggcttcagcaaccagagcagccacctgcaggtgcaccgggtgcacactggagagaagccctacaagggggagcactgtgtgaagagcttctcctggagcagccacctgcagatcaaccagagggcccatgctggggagaagccctacaagtgtgagaagtgtgacaatgccttccgccgcttcagcagcctgcaggcccaccagagggtgcacagccgggccaagagctacaccaatgatgccagctaccgctccttcagccagaggagccacctgccccaccaccagagggtgcccactggagagaacccctacaagtatgaggagtgtggcagaaatgtgggcaagagcagccactgccaggcccccctcatcgtgcacactggagagaagccctacaagtgtgaggagtgtggggtgggcttcagccagaggagctacctgcaggtgcacctgaaggtgcacacaggcaagaagccctacaagtgtgaggagtgtgggaagagcttctcctggaggagccggctgcaggcccacgagcgcatccacactggagagaagccctacaagtgcaatgcctgtgggaagagcttctcctacagcagccacctgaacatccactgccgcatccacactggagagaagccctacaagtgtgaggagtgtgggaagggcttctctgtgggcagccacctgcaggcccaccagatcagccacactggagagaagccctacaagtgtgaggagtgtgggaagggcttctgccgggccagcaacctgctggaccaccagaggggccacactggagagaagccctaccagtgtgatgcctgtgggaagggcttcagccgcagcagtgacttcaacatccacttccgggtgcacactggagagaagccctacaagtgtgaggagtgtgggaagggcttcagccaggccagcaacctgctggcccaccagaggggccacactggagagaagccctacaagtgtggcacctgtgggaagggcttcagccgcagcagtgacctgaatgtgcactgccgcatccacactggagagaagccctacaagtgtgagcgctgtgggaaggccttcagccagttcagcagcctgcaggtgcaccagagggtgcacactggagagaagccctaccagtgtgccgagtgtgggaagggcttctctgtgggcagccagctgcaggcccaccagcgctgccacactggagagaagccctaccagtgtgaggagtgtgggaagggcttctgccgggccagcaacttcctggcccaccggggcgtgcacactggagagaagccctaccgctgtgatgtgtgtgggaagcgcttccggcagaggagctacctgcaggcccaccagagggtgcacactggagagcggccctacaagtgtgaggagtgtgggaaggtgttctcctggagcagctacctgcaggcccaccagagggtgcacactggagagaagccctacaagtgtgaggagtgtgggaagggcttctcctggagcagcagcctcatcatccaccagagggtgcatgctgatgatgaaggagacaaggacttccccagcagcgaggacagccacaggaagaccaggtag

SEQ ID NO: 176860 - DNA, 1617 bp, synthetic construct
  misc_feature 1..1617: note = Description of Artificial Sequence: Synthetic coding sequence
  source 1..1617: mol_type = other DNA
atgaccaagagcaaggaggccgtgaccttcaaggatgtggccgtggtgttcagcgaggaggagctgcagctgctggacctggcccagaggaagctgtacagagatgtgatgctggagaacttcagaaatgtggtgtctgtgggccaccagagcaccccagatggcctgccccagctggagcgggaggagaagctgtggatgatgaagatggccacccagagggacaacagcagcggggccaagaacctgaaggagatggagaccctgcaggaggtgggcctgcgctacctgccccatgaggagctgttctgcagccagatctggcagcagatcacccgggagctgatcaagtaccaggacagcgtggtgaacatccagaggacaggctgccagctggagaagagagatgacctgcactacaaggatgagggcttcagcaaccagagcagccacctgcaggtgcaccgggtgcacactggagagaagccctacaagggggagcactgtgtgaagagcttctcctggagcagccacctgcagatcaaccagagggcccatgctggggagaagccctacaagtgtgagaagtgtgacaatgccttccgccgcttcagcagcctgcaggcccaccagagggtgcacagccgggccaagagctacaccaatgatgccagctaccgctccttcagccagaggagccacctgccccaccaccagagggtgcccactggagagaacccctacaagtatgaggagtgtggcagaaatgtgggcaagagcagccactgccaggcccccctcatcgtgcacactggagagaagccctacaagtgtgaggagtgtggggtgggcttcagccagaggagctacctgcaggtgcacctgaaggtgcacacaggcaagaagccctacaagtgtgaggagtgtgggaagagcttctcctggaggagccggctgcaggcccacgagcgcatccacactggagagaagccctacaagtgcaatgcctgtgggaagagcttctcctacagcagccacctgaacatccactgccgcatccacactggagagaagccctacaagtgtgaggagtgtgggaagggcttctctgtgggcagccacctgcaggcccaccagatcagccacactggagagaagccctacaagtgtgaggagtgtgggaagggcttctgccgggccagcaacctgctggaccaccagaggggccacactggagagaagccctaccagtgtgatgcctgtgggaagggcttcagccgcagcagtgacttcaacatccacttccgggtgcacacaggcaagaaccccatcaacgtgcgctctgtggcccgggccagcgcccggccccagatcttctggcccatcaaggaggccaccctggagaggaaccccaccaacgtggtgcacgtgggccgggcctctgtgggcgcccagatcctgatgtacacagtggagagcacccaggagaggaaccccatcaatgcccggggcgtggtgcggcccagcgtgagcagccctgccttccgctgcatccgggagttcaccctggagaggaaccacatctctgtgcagagcgtgggccgggcctctgtgtag

SEQ ID NO: 176861 - DNA, 1689 bp, synthetic construct
  misc_feature 1..1689: note = Description of Artificial Sequence: Synthetic coding sequence
  source 1..1689: mol_type = other DNA
atggctgctgcctggatggccccagcccaggagagcgtgacctttgaagatgtggccgtgaccttcacccaggaggagtggggccagctggatgtgacccagagggccctgtatgtggaggtgatgctggagacctgtggcctgctggtggccctgggggacagcaccaagccagagaccgtggagcccatccccagccacctggccctgcctgaggaggtgtccctgcaggagcagctggcccagggcgtgccccgctacagctacctgggccaggccatggaccaggacggccccagcgagatgcaggagtacttcctgcggcctggaacagacccccagagcgagaagctgcacggcaagatgagcctggagcacgagggcctggccacagcagatggcatctgcagcatgatgatccagaaccaggtgtccccagaagatgccctgtatggctttgacagctatggccctgtgacagacagcctcatccatgaaggagagaacagctacaagtttgaggagatgtttaatgaaaactgcttcctggtgcagcacgagcagatcctgccccgggtgaagccctatgactgcccagaatgtgggaaggccttcggcaagagcaagcacctgctgcagcaccacatcatccacactggagagaagccctacaagtgcctggagtgtgggaaggacttcaacagaagaagccacctgaccaggcaccagaggacccacaatggagacaagccctttgtgtgcagtgaatgtggccgcaccttcaacagaggcagccacctgaccaggcaccagagggtgcacagcggggagaagccctttgtgtgcaatgaatgtgggaaggccttcacctaccgcagcaactttgtgctgcacaacaagagccacaatgagaagaagccctttgcctgcagtgaatgtgggaagggcttctatgagagcacagccctgatccagcacttcatcatccacactggagagcggcccttcaagtgcctggagtgtgggaaggccttcaactgccgcagccacctgaagcagcacgagcgcatccacactggagagaagccctttgtgtgcagccagtgtgggaaggccttcacccactacagcacctacgtgctgcacgagcgggcccacactggagagaagccctttgagtgcaaggaatgtgggaaggccttcagcatcaggaaggacctgatccgccacttcaacatccacactggagagaagccctatgaatgtctgcagtgtgggaaggccttcaccaggatgagcggcctgaccaggcaccagtggatccacactggagagaagccctacgtgtgcatccagtgtgggaaggccttctgcaggaccaccaacctgatccgccacttcagcatccacactggagagaagccctatgaatgtgtggagtgtgggaaggccttcaacagaagaagccccctgaccaggcaccagaggatccacacagctgagaagagccatgagcccatccagagcggaaatgtgtcctgtgagagcacagacctgatccagcacagcatcatccacacagagagcagccctgtgtctgctgtgaacatggagacccccagcattgctgcccacagcagcagcctggacatcaatggcttcatcgtggaggagaccctgcccctgtag

SEQ ID NO: 176862 - DNA, 1566 bp, synthetic construct
  misc_feature 1..1566: note = Description of Artificial Sequence: Synthetic coding sequence
  source 1..1566: mol_type = other DNA
atgctggagacctgtggcctgctggtggccctgggggacagcaccaagccagagaccgtggagcccatccccagccacctggccctgcctgaggaggtgtccctgcaggagcagctggcccagggcgtgccccgctacagctacctgggccaggccatggaccaggacggccccagcgagatgcaggagtacttcctgcggcccggcacagacccccagagcgagaagctgcacggcaagatgagcctggagcacgagggcctggccacagcagatggcatctgcagcatgatgatccagaaccaggtgtccccagaagatgccctgtatggctttgacagctatggccctgtgacagacagcctcatccacgagggagaaaattcctacaagtttgaggagatgtttaatgaaaactgcttcctggtgcagcacgagcagatcctgccccgggtgaagccctatgactgcccagaatgtgggaaggccttcggcaagagcaagcacctgctgcagcaccacatcatccacactggagagaagccctacaagtgcctggagtgtgggaaggacttcaacagaagaagccacctgaccaggcaccagaggacccacaacggggacaagccctttgtgtgcagtgaatgtggccgcaccttcaacagaggcagccacctgaccaggcaccagagggtgcacagcggggagaagccctttgtgtgcaatgaatgtgggaaggccttcacctaccgcagcaactttgtgctgcacaacaagagccacaatgagaagaagccctttgcctgcagtgaatgtgggaagggcttctatgagagcacagccctgatccagcacttcatcatccacactggagagcggcccttcaagtgcctggagtgtgggaaggccttcaactgccgcagccacctgaagcagcacgagcgcatccacactggagagaagccctttgtgtgcagccagtgtgggaaggccttcacccactacagcacctacgtgctgcacgagcgggcccacactggagagaagccctttgagtgcaaggaatgtgggaaggccttcagcatcaggaaggacctgatccgccacttcaacatccacactggagagaagccctatgagtgcctgcagtgtgggaaggccttcaccaggatgagcggcctgaccaggcaccagtggatccacactggagagaagccctacgtgtgcatccagtgtgggaaggccttctgcaggaccaccaacctgatccgccacttcagcatccacactggagagaagccctatgaatgtgtggagtgtgggaaggccttcaacagaagaagccccctgaccaggcaccagaggatccacacagctgagaagagccatgagcccatccagagcggaaatgtgtcctgtgagagcacagacctgatccagcacagcatcatccacacagagagcagccctgtgtctgctgtgaacatggagacccccagcattgctgcccacagcagcagcctggacatcaatggcttcatcgtggaggagaccctgcccctgtag

SEQ ID NO: 176863 - DNA, 1623 bp, synthetic construct
  misc_feature 1..1623: note = Description of Artificial Sequence: Synthetic coding sequence
  source 1..1623: mol_type = other DNA
atggcccacgagctggtgatgttcagagatgtggccattgatgtgtcccaggaggagtgggagtgcctgaacccagcccagaggaacctgtacaaggaggtgatgctggagaactacagcaacctggtgtccctgggcctgtctgtgtccaagccagctgtgatcagcagcctggagcagggcaaggagccctggatggtggtgcgggaggagaccggccgctggtgcccagacctggccagcagagatgagccccagaagctgagccccaagagggacatctatgaaacagagctgagccagtgggtgaacatggaggagttcaagagccacagccctgagaggagcatcttcagcgccatctgggagggcaactgccactttgagcagcaccagggccaggaggagggctacttccggcagctgatgatcaaccacgagaacatgcccatcttcagccagcacaccctgctgacccaggagttctatgaccgggagaagatcagcgagtgcaagaagtgcaggaagatcttctcctaccacctgttcttcagccaccacaagaggacccacagcaaggagctgtctgagtgcaaggagtgcacagagatcgtgaacaccccctgcctcttcaagcagcagaccatccagaatggagacaagtgcaatgaatgcaaggagtgctggaaggcctttgtgcactgcagccagctgaagcacctgcgcatccacaatggagagaagagatatgaatgtaatgaatgtgggaaggccttcaactacggcagcgagctgaccctgcaccagaggatccacactggagagaagccctatgagtgcaaggaatgtgggaaggccttccggcagaggagccagctgacccagcaccagaggctgcacactggagagaagccctatgagtgcaagcagtgtgggaaggccttcatccggggcttccagctgacagagcacctgcggctgcacactggagagaagccctatgagtgcaaggaatgtgggaagaccttccgccacaggagccacctgaccatccaccagaggatccacactggagagaagccctatgaatgtcgggagtgtgggaaggccttctcctaccacagcagcttcagccaccaccagaagatccacagcggcaagaagccctatgaatgtcatgaatgtgggaaggccttctgtgatggcctgcagctgaccctgcaccagaggatccacactggagagaagccctatgagtgcaaggaatgtgggaagaccttccggcagtgcagccacctgaagaggcaccagaggatccacactggagagaagccccatgagtgcatgatctgtgggaaggccttccggctgcacagccacctgatccagcaccagaggatccacactggagagaagccctatgagtgcaaggaatgtgggaaggccttctcctaccacagcagcttcagccaccaccagaggatccacagcggcaagaagccctaccagtgtgggaaggccttcaaccaccggctgcagctgaacctgcaccagaccctgcacactggagagaagcctgtgcgcttccccctgctgcccccccaccccagcctggccagctag

SEQ ID NO: 176864 - DNA, 741 bp, synthetic construct
  misc_feature 1..741: note = Description of Artificial Sequence: Synthetic coding sequence
  source 1..741: mol_type = other DNA
atggtggtgcgggaggagaccggccgctggtgccccggcacctggaagacctggggcttccacaacaacttcctggacaacaatgaggccacagacatcaatgctgacctggccagcagagatgagccccagaagctgagccccaagagggacatctatgaaacagagctgagccagtgggtgaacatggaggagttcaagagccacagccctgagaggagcatcttcagcgccatctgggagggcaactgccactttgagcagcaccagggccaggaggagggctacttccggcagctgatgatcaaccacgagaacatgcccatcttcagccagcacaccctgctgacccaggagttctatgaccgggagaagatcagcgagtgcaagaagtgcaggaagatcttctcctaccacctgttcttcagccaccacaagtgcagccacctgaagaggcaccagaggatccacactggagagaagccccatgagtgcatgatctgtgggaaggccttccggctgcacagccacctgatccagcaccagaggatccacactggagagaagccctatgagtgcaaggaatgtgggaaggccttctcctaccacagcagcttcagccaccaccagaggatccacagcggcaagaagccctaccagtgtgggaaggccttcaaccaccggctgcagctgaacctgcaccagaccctgcacactggagagaagcctgtgcgcttctag

SEQ ID NO: 176865 - DNA, 1692 bp, synthetic construct
  misc_feature 1..1692: note = Description of Artificial Sequence: Synthetic coding sequence
  source 1..1692: mol_type = other DNA
atggcccacgagctggtgatgttcagagatgtggccattgatgtgtcccaggaggagtgggagtgcctgaacccagcccagaggaacctgtacaaggaggtgatgctggagaactacagcaacctggtgtccctgggcctgtctgtgtccaagccagctgtgatcagcagcctggagcagggcaaggagccctggatggtggtgcgggaggagaccggccgctggtgccccggcacctggaagacctggggcttccacaacaacttcctggacaacaatgaggccacagacatcaatgctgacctggccagcagagatgagccccagaagctgagccccaagagggacatctatgaaacagagctgagccagtgggtgaacatggaggagttcaagagccacagccctgagaggagcatcttcagcgccatctgggagggcaactgccactttgagcagcaccagggccaggaggagggctacttccggcagctgatgatcaaccacgagaacatgcccatcttcagccagcacaccctgctgacccaggagttctatgaccgggagaagatcagcgagtgcaagaagtgcaggaagatcttctcctaccacctgttcttcagccaccacaagaggacccacagcaaggagctgtctgagtgcaaggaatgtacagaaattgtgaacaccccctgcctcttcaagcagcagaccatccagaatggagacaagtgcaatgaatgcaaggagtgctggaaggcctttgtgcactgcagccagctgaagcacctgcgcatccacaacggggagaagagatatgagtgcaatgaatgtgggaaggccttcaactacggcagcgagctgaccctgcaccagaggatccacactggagagaagccctatgagtgcaaggaatgtgggaaggccttccggcagaggagccagctgacccagcaccagaggctgcacactggagagaagccctatgagtgcaagcagtgtgggaaggccttcatccggggcttccagctgacagagcacctgcggctgcacactggagagaagccctatgagtgcaaggaatgtgggaagaccttccgccacaggagccacctgaccatccaccagaggatccacactggagagaagccctatgagtgcagagaatgtgggaaggccttctcctaccacagcagcttcagccaccaccagaagatccacagcggcaagaagccctatgagtgccatgaatgtgggaaggccttctgtgatggcctgcagctgaccctgcaccagaggatccacactggagagaagccctatgagtgcaaggaatgtgggaagaccttccggcagtgcagccacctgaagaggcaccagaggatccacactggagagaagccccatgagtgcatgatctgtgggaaggccttccggctgcacagccacctgatccagcaccagaggatccacactggagagaagccctatgagtgcaaggaatgtgggaaggccttctcctaccacagcagcttcagccaccaccagaggatccacagcggcaagaagccctaccagtgtgggaaggccttcaaccaccggctgcagctgaacctgcaccagaccctgcacactggagagaagcctgtgcgcttccccctgctgcccccccaccccagcctggccagctag

SEQ ID NO: 176866 - DNA, 777 bp, synthetic construct
  misc_feature 1..777: note = Description of Artificial Sequence: Synthetic coding sequence
  source 1..777: mol_type = other DNA
gagaagagatatgaatgtaatgaatgtgggaaggccttcaactacggcagcgagctgaccctgcaccagaggatccacactggagagaagccctatgagtgcaaggaatgtgggaaggccttccggcagaggagccagctgacccagcaccagaggctgcacactggagagaagccctatgagtgcaagcagtgtgggaaggccttcatccggggcttccagctgacagagcacctgcggctgcacactggagagaagccctatgagtgcaaggaatgtgggaagaccttccgccacaggagccacctgaccatccaccagaggatccacactggagagaagccctatgaatgtcgggagtgtgggaaggccttctcctaccacagcagcttcagccaccaccagaagatccacagcggcaagaagccctatgaatgtcatgaatgtgggaaggccttctgtgatggcctgcagctgaccctgcaccagaggatccacactggagagaagccctatgagtgcaaggaatgtgggaagaccttccggcagtgcagccacctgaagaggcaccagaggatccacactggagagaagccccatgagtgcatgatctgtgggaaggccttccggctgcacagccacctgatccagcaccagaggatccacactggagagaagccctatgagtgcaaggaatgtgggaaggccttctcctaccacagcagcttcagccaccaccagaggatccacagtgatgccaccacagccatctcctag

SEQ ID NO: 176867 - DNA, 1311 bp, synthetic construct
  misc_feature 1..1311: note = Description of Artificial Sequence: Synthetic coding sequence
  source 1..1311: mol_type = other DNA
atggaggagttcaagagccacagccctgagaggagcatcttcagcgccatctgggagggcaactgccactttgagcagcaccagggccaggaggagggctacttccggcagctgatgatcaaccacgagaacatgcccatcttcagccagcacaccctgctgacccaggagttctatgaccgggagaagatcagcgagtgcaagaagtgcaggaagatcttctcctaccacctgttcttcagccaccacaagaggacccacagcaaggagctgtctgagtgcaaggagtgcacagagatcgtgaacaccccctgcctcttcaagcagcagaccatccagaatggagacaagtgcaatgaatgcaaggagtgctggaaggcctttgtgcactgcagccagctgaagcacctgcgcatccacaatggagagaagagatatgaatgtaatgaatgtgggaaggccttcaactacggcagcgagctgaccctgcaccagaggatccacactggagagaagccctatgagtgcaaggaatgtgggaaggccttccggcagaggagccagctgacccagcaccagaggctgcacactggagagaagccctatgagtgcaagcagtgtgggaaggccttcatccggggcttccagctgacagagcacctgcggctgcacactggagagaagccctatgagtgcaaggaatgtgggaagaccttccgccacaggagccacctgaccatccaccagaggatccacactggagagaagccctatgaatgtcgggagtgtgggaaggccttctcctaccacagcagcttcagccaccaccagaagatccacagcggcaagaagccctatgaatgtcatgaatgtgggaaggccttctgtgatggcctgcagctgaccctgcaccagaggatccacactggagagaagccctatgagtgcaaggaatgtgggaagaccttccggcagtgcagccacctgaagaggcaccagaggatccacactggagagaagccccatgagtgcatgatctgtgggaaggccttccggctgcacagccacctgatccagcaccagaggatccacactggagagaagccctatgagtgcaaggaatgtgggaaggccttctcctaccacagcagcttcagccaccaccagaggatccacagcggcaagaagccctaccagtgtgggaaggccttcaaccaccggctgcagctgaacctgcaccagaccctgcacactggagagaagcctgtgcgcttccccctgctgcccccccaccccagcctggccagctag

SEQ ID NO: 176868 - DNA, 1692 bp, synthetic construct; identical to SEQ ID NO: 176865
  misc_feature 1..1692: note = Description of Artificial Sequence: Synthetic coding sequence
  source 1..1692: mol_type = other DNA

SEQ ID NO: 176869 - DNA, 1788 bp, synthetic construct
  misc_feature 1..1788: note = Description of Artificial Sequence: Synthetic coding sequence
  source 1..1788: mol_type = other DNA
atgagggagaccctggaggccctgagcagcctgggcttctctgtgggccagcctgagatggccccccagagcgagccccgggagggcagccacaatgcccaggagcagatgagcagcagccgggaggagcgggccctgggcgtgtgcagcggccacgaggcccccaccccagaggagggcgcccacacagagcaggccgaggccccctgccggggccaggcctgcagcgcccagaaggcccagcctgtgggcacctgccctggagaggagtggatgatcaggaaggtgaaggtggaggatgaggaccaggaggccgaggaggaggtggagtggccccagcacctgagcctgctgcccagccccttccctgccccagacctgggccacctggccgccgcctacaagctggagcccggggcccctggggccctgagcggcctggccctgagcggctggggccccatgcctgagaagccctacggctgtggggagtgtgaaagacgcttccgggaccagctgaccctgcggctgcaccagaggctgcacagaggagagggcccctgtgcctgcccagactgtggccgctccttcacccagagggcccacatgctgctgcaccagaggagccacagaggagagcggcccttcccctgcagtgaatgtgacaagcgcttcagcaagaaggcccacctgaccaggcacctgcggacccacactggagagcggccctacccctgtgccgagtgtgggaagcgcttcagccagaagatccacctgggcagccaccagaagacccacactggagagcggcccttcccctgcacagaatgtgagaagcgcttcaggaagaagacccacctgatccgccaccagaggatccacactggagagcggccctaccagtgtgcccagtgtgcccggagcttcacccacaagcagcacctggtgcgccaccagagggtgcaccagacagctggccctgcccggcccagcccagacagcagcgccagcccccacagcacagcccccagccccacccccagcttccctggccccaagccctttgcctgcagcgactgtggcctgagctttggctggaagaagaacctggccacccaccagtgcctgcacaggtctgagggccggcccttcggctgtgatgaatgtgccctgggcgccaccgtggatgccccagctgccaagcccctggccagcgcccctgggggccctggctgcggccctggcagtgaccctgtggtgccccagagggcccccagcggggagaggagcttcttctgcccagactgtggccggggcttcagccacggccagcacctggcccggcacccccgggtgcacactggagagcggccctttgcctgcacccagtgtgaccggcgcttcggcagccggcccaacctggtggcccacagccgggcccacagcggggcccggccctttgcctgtgcccagtgtggccgccgcttcagcaggaagagccacctgggccgccaccaggccgtgcacacaggcagccggccccacgcctgtgctgtgtgtgcccgctccttcagcagcaagaccaacctggtgcgccaccaggccatccacacaggcagccggcccttcagctgcccccagtgtgggaagagcttcagcaggaagacccacctggtgcgccaccagctgattcatggagaggccgcccatgctgccccagatgctgccctggccgccccagcctggagcgcccctcctgaggtggcccctcctcctctcttcttctag

SEQ ID NO: 176870 - DNA, 11778 bp, synthetic construct
  misc_feature 1..11778: note = Description of Artificial Sequence: Synthetic coding sequence
  source 1..11778: mol_type = other DNA
atgcctggagagcggcccaggggggcccccccacccaccatgactggagacctgcagccccggcaggtggccagcagccctggccaccccagccagccccccctggaggacaacaccccagccaccaggaccaccaagggggcccgggaggccggcggccaggcccaggccatggagctgcctgaggcccagccccggcaggccagagatggagagctgaagccacccagcctgcggggccaggcccccagcagcaccccaggcaagaggggcagcccccagaccccacctggccgcagccccctgcaggcccccagccggctggccggccgggcagagggcagccccccccagcgctacatcctgggcatcgccagcagcaggaccaagcccaccctggatgagaccccagagaacccccagctggaggccgcccagctgcctgaggtggacaccccccagggccctggcaccggggcccccctgcggcccggcctgcccaggacagaggcccagcctgctgctgaggagctgggcttccaccgctgcttccaggagccccccagcagcttcaccagcaccaactacaccagccccagcgccaccccccggcccccagcccctggccccccccagagccggggcaccagccccctgcagcccggcagctacccagagtaccaggccagcggggctgacagctggcccccagctgctgagaacagcttccctggggccaactttggagtgcccccagctgagcctgagcccatccccaagggcagcaggcctgggggcagcccccggggcgtgtccttccagttccccttccctgccctgcatggagccagcaccaagcccttcccagcagatgtggccggccacgccttcaccaacggccccctggtgtttgccttccaccagccccagggcgcctggccagaggaggccgtgggcaccggccctgcctaccccctgcccacccagcctgcccccagccccctgccctgctaccagggccagcccggcggcctgaacagacacagcgacctgagcggggccctgagcagccctggggccgcccacagcgccccccggcccttcagtgacagcctgcacaagagcctgaccaagatcctgcctgagcggccccccagcgcccaggacggcctgggcagcacccggggcccccccagcagcctgccccagaggcacttccctggccaggcctaccgggccagcggcgtggacaccagccctggccccccagacacagagctggccgcccctggccccccaccagcccggctgccccagctgtgggaccccacagctgccccctaccccaccccacctgggggccccctggccgccaccaggtccatgttcttcaacggccagcccagccctggccagaggctgtgcctgccccagagcgcccccctgccctggccccaggtgctgcccacagcccggcccagcccccacggcatggagatgctgagccggctgcccttccctgctgggggccctgagtggcagggcggcagccagggcgccctgggcacagctgggaagaccccaggcccccgggagaagctgcctgctgtgcgcagcagccagggcggcagccctgccctcttcacctacaacggcatgacagaccccggggcccagcccctcttctttggagtggcccagccccaggtgagcccccacggcacccccagcctgcccccaccccgggtggtgggcgccagccccagcgagagccccctgcccagccctgccaccaacacagctggcagcacctgcagcagcctgagccccatgagcagcagccctgccaaccccagcagcgaggagagccagctgcccggccccctgggccccagcgccttcttccacccccccacccacccccaggagaccggcagccccttccccagccctgagcccccccacagcctgcccacccactaccagcctgagcccgccaaggccttccccttcccagcagatggcctgggcgctgagggcgccttccagtgcctggaggagacccccttcccccatgagggccctgaggtgggccggggcggcctgcagggcttcccccgggcccccccaccctaccccacccaccacttcagcctgagcagcgccagcctggaccagctggatgtgctgctgacctgccggcagtgtgacaggaactacagcagcctggccgccttcctggcccaccggcagttctgtggcctgctgctggcccgggccaaggatggccaccagaggagccctggccccccaggcctgcccagccccccagctgccccccgggtgcctgcagatgcccacgccggcctgctgagccacgccaagaccttcctgctggccggagatgcccaggccgagggcaaggatgaccccctgaggacaggcttcctgcccagcctggccgccacccccttccccctgcctgccagtgacctggacatggaggatgatgccaagctggacagcctcatcacagaggccctgaatggcatggagtaccagagcgacaaccctgagattgacagcagcttcattgatgtgtttgctgatgaggagcccagcggcccccggggccccagcagcggccaccccctgaagagcaaggccggcgtgaccccagagagcaaggcccccccacccctgcctgctgccaccccagacccccagacccccaggcctggggaccggggctgcccagcccggggccggcccaagaccaggagcctgggcctggcccccacagaagcagatgcccccagccagggccggcagcagaggcggggcaagcagctgaagctgttcaggaaggacctggacagcggcggcgctgctgagggcagcggcagcggcggcggcggccgggccagcggcctgcggcccaggagaaatgatggcctgggggagcggcccccaccccggccccggcggcccaggacccaggcccctggcagcagagctgaccctgccccccgggtgcccagggctgctgccctgcctgaggagaccaggagcagcagaagaagaaggctgccccccaggaaggaccccaggaagaggaaggcccggggcggggcctggggcaaggagctgatcctgaagatcgtgcagcagaagaaccggctgcgggagtatgactttgccagcgagagcgaggaggatgagcagcccccaccccggggccctggcttccggggccggcggggccgcggggagaagaggaaggaggtggagctgacccagggcccccgggaggatgagccccagaagcccaggaaggccgcccggcaggaggccggaggagatggagccccagccaaccctgaggagcccggcggcagcaggcctggccctggccgcagcccccaggcccggggccccagccgcagcctggagaccggggctgctgcccgggagggcggccccaagtgtgccgaccggcccagcgtggcccccaaggaccccctgcaggtgcccaccaacacagagaccagcgaggagacccggcccagcctggacttcccccaggaggccaaggagcctgagacagctgaggagagcgccccagacagcacagagttcacagaggccctgcggagccccccagctgcctgtgccggggagatgggcgccagccctggcctgctgatccctgagcagcccccacccagcagacatgacaccggcacccccaagcccagcggcagcctggccaacacagccccccacggcagcagccccaccccaggagtgggcagcctgctgggcggccctgggggcacccaggcccctgtgagccacaacagcaaggaccccccagcccggcagcccggggagttcctggcccctgtggccaaccccagcagcacagcctgccccaagcccagcgtgctgagcagcaagatcagcagctttggctgtgaccctgctggcttcaacagagaccccctgggcgtgcctgtggccaagaagggcccccagccctacagcagcccccacagcgagctgttcctgggccccaaggacctggccggctgcttcctggaggagctgcaccccaagcccagcgccagagatgcccccccagccagcagcagctgcctgtgccaggatggagaagatgctggcagcctggagccccagctgcccaggagccccccaggcacagctgagacagagcccggccgggccgccagcccccccaccctggagagcagcagcctcttcccagacctgcctgtggacagatttgacccccccctgtatggcagcctgagcgccaacagagacagcggcctgccctttgcctgtgccgaccccccccagaagacagtgcccagcgaccccccctaccccagcttcctgctgctggaggaggtgagccccatgctgcccagccacttcccagacctgagcggcggcaaggtgctgagcaagacctgccccccagagaggacagtggtgcctggggccgcccccagcctgcctggaaaaggaagtggctgcagcgtggccctgatgagccacctgtctgaagatgagctggagatccagaagctggtgacagagctggagagccagctgcagaggagcaaggacaccaggggggccccccgggagctggccgaggccgagagcgtgggccgggtggagctgggcactggaacagagccccccagccagaggaggacctgccaggccaccgtgccccatgaggacaccttctctgctgctgacctgaccagggtgggggagagcacagcccaccgggagggcgctgagagcgctgtggccaccgtggaggccgtgcagggccggcctgggggcacctggccctgcccagccagcttccaccctggccatgctgccctgctgccctgtgcccaggaggacctggtgtctggggcccccttcagccccaggggggccaacttccacttccagcctgtgcagaaggccggggccagcaagacaggcctgtgccaggccgagggggacagccggcccccccaggatgtgtgcctgcctgagcccagcaagcagcccggcccccagctggatgctggcagcctggccaagtgcagcccagaccaggagctgtccttccccaagaacaaggaggccgccagcagccaggagagcgaggacagcctgcggctgctgccctgtgagcagaggggcggcttcctgcctgagcccggcacagctgaccagccccacagaggagccccagcccctgaggccttcggcagccctgctgtgcacctggccccagacctggccttccagggagatggagccccacccctggatgccacctggccctttggagccagccccagccacgccgcccagggccacagcgctggccgggccggcggccacctgcaccccacagctggccggcccggctttgagggcaatgaatttgccccagctggggccagcagcctgacagccccccggggccgggaggcctggctggtgcctgtgcccagccctgcctgtgtgagcaacacccaccccagcagaagaagccaggaccctgccctgagcccccccatccggcagctgcagctgcccggccctggggtggccaagagcaaggatggcatcctgggcctgcaggagctgaccccagctgcccagagccccccccgggtgaaccccagcggcctggagggcggcaccgtggagggcggcaaggtggcctgtggccctgcccagggcagccctggaggagtgcaggtgaccaccctgcctgctgtggccggccaccagctgggcctggaggctgatggccactggggcctgctgggccaggccgagaagacccagggccagggcacagccaaccagctgcagccagaaaatggagtgtccccaggcggcacagacaaccacgcctctgtgaatgccagccccaagacagccctgaccggccccacagagggcgctgtgctgctggagaagtgcaagggcagccgggccgccatgagcctgcaggaggaggccgagcccacccccagcccccccagccccaaccgggagagcctggccctggccctgacagctgcccacagccgcagcggcagcgagggccgcaccccagagcgggccagcagccctggcctgaacaagcccctgctggccactggagacagccctgcccccagcgtgggggacctggccgcctgtgcccccagccccaccagcgctgcccacatgccctgcagcctgggccccctgccccgggaggaccccctgaccagccccagccgggcccagggcggcctgggcggccagctgcctgccagccccagctgccgggaccccccaggcccccagcagctgctggcctgcagccctgcctgggcccccctggaggaggctgatggagtgcaggccaccacagacacaggagctgaggacagccctgtggccccacccagcctgaccaccagcccctgtgaccccaaggaggccctggccggctgcctgctgcagggcgagggcagccccctggaggaccccagctcctggcccccaggctctgtgtctgctgtgacctgcacccacagcggggacacccccaaggacagcaccctgcgcatccctgaggacagcaggaaggagaagctgtgggagagccctggccgggccaccagcccccccctggccggggctgtgagccccagcgtggccgtgcgggccaccggcctgagcagcacccccactggagatgaggcccaggccggccggggcctgcccggccctgacccccagagcagaggagccccaccccacaccaacccagacaggatgccccggggccacagcagctacagccccagcaacacagcccggctgggccaccgggagggccaggccgtgacagctgtgcccacagagccccccaccctgcagggcgccggccctgacagccctgcctgcctggagggggagatgggcaccagcagcaaggagcctgaggaccccggcaccccagagaccggccgcagcggggccaccaagatgccccgggtgacctgccccagcacaggcctgggcctgggccgcaccacagcccccagcagcacagccagtgacttccagagcgacagcccccagagccacagaaatgccagccaccagaccccccagggcgaccccctgggcccccaggacctgaagcagaggagccggggctacaagaagaagccagccagcacagaaaatggccagtggaagggccaggcccctcatggccctgtgacctgtgaggtgtgtgccgccagcttccgcagcggccctggcctgagccgccacaaggccaggaagcaccggccccaccctggggccccagctgagcccagccctgctgccctgcctgcccagcagcccctggagcccctggcccagaagtgccagccccccaggaagaagagccaccgggtgtctgggaaggagcggcccaaccacagcagaggagaccccagccacgtgacccagcccccaccagcccagggcagcaaggaggtgctgcgggcccctggcagcccccacagccagcagctgcacccccccagccccacagaacatgaggtggatgtgaagaccccagccagcaagcccaggccagaccaggccagagaagatgagctgcaccccaagcaggccgagaagcgggagggccgccgctggaggcgggagcccaccgtggacagccccagccacagcgagggcaagagcaacaagaagaggggcaagctgcggggccgccgcctgcgggaggagagcatcctgcctgtgtctgcagatgtgatcagtgatggccggggcagccggcccagccctgccatggccagctatgctgccagccccagccactgcctgtctgtggagggcggccctgaggctgatggagagcagcccccccggctggccaccctgggccctggggtgatggagggcgctgctgagacagaccaggaggccctgtgtgccggggagactggagcccagaagcccccaggggacaggatgctgtgccccggccgcatggatggagctgccctgggggagcagcccaccggccagaagggggccagcgcccggggcttctggggcccccgggagaccaaggccctgggcgtgtgcaaggagagcggcagcgagcctgctgaggacagcagccgggcccacagccgctctgaggagggcgtgtgggaggagaacaccccacccctgggccccctgggcttccctgagaccagcagcagccctgctgacagcaccaccagcagctgcctgcagggcctgcctgacaacccagacacccagggcggcgtgcagggccctgagggccccaccccagatgccagcggcagcagcgccaaggacccccccagcctgtttgatgatgaggtgtccttcagccagctgttccccccaggcggccgcctgaccaggaagaggaacccccacgtgtatggcaagagatgtgagaagcctgtgctgcccctgcccacccagcccagctttgaggagggcggggaccccaccctgggccctgcccggctgcccacagacctgagtgacagcagcagcctgtgcctgtgccacgaggacccctgggaggatgaagatcctgctggcctgcctgagagcttcctgctggatggcttcctgaacagccgggtgcccggcatcgacccctgggcccctggcctgagcctgtgggccctggagcccagccgggaggccggggctgagaagctgcccagccactgcccagaagatgacaggcctgaggccatccctgagctgcacatggtgcctgctgcctggaggggcctggagatgcctgccccagcagatgacagcagcagcagcctgggagatgtgtccccagagccccccagcctggagcgggagcgctgtgatggcggcctgcccggcaacacccacctgctgcccctgcgggccacagactttgaggtgctgagcaccaagtttgagatgcaggacctgtgcttcctgggcccctttgaagatcctgtgggcctgcccggccccagcttcctggactttgagggcacagccagcagccagggcccccagagcagaagaacagaggaggccgccggggccggccgggcccagggccggggccgcccagccaagggcagaagagccagctacaagtgcaaggtgtgcttccagcgcttccgcagcctgggggagctggacctgcacaagctggcccacaccccagcccccccacccacctgctacatgtgtgtggagaggagatttggcagccgggagctgctgcggggccacctgcaggagagacatgcccagagcaaggccggcccctgggcctgtggcatgtgcctgaaggaggtggctgatgtgtggatgtacaatgagcacctgcgggagcacgctgtgcgctttgcccggcggggccaggcccggcgcagcctgggggacctgcccggcggcctggagggcagcagcgctgtggcccacctgctgaacagcatcacagagcccgcccccaagcaccaccggggcaagaggtctgctgggaaggctgctggcagccctggggacccctggggccaggagggggaggccaagaaggacagccctggagagcgggccaagccccgggcccggagcacccccagcaacccagatggagctgccaccccagacagcgccagcgccacagccctggctgatgctggcagccctggcccccccaggaccacccccagccccagcccagacccctgggccggcggggagcccctgctgcaggccacccctgtgcatgaggcctgcaaggaccccagccgggactgccaccactgtgggaagcgcttccccaagcccttcaagctgcagaggcacctggccgtgcacagcccccagagggtgtacctgtgcccccgctgcccccgggtgtacccagagcacggggagctgctggcccacctgggcggggcccacggcctgctggagaggcctgagctgcagcacacccccctgtatgcctgtgagctgtgtgccaccgtgatgaggatcatcaagaagagctttgcctgcagcagctgcaactacacctttgccaagaaggagcagtttgacagacacatgaacaagcacctgcggggcggccggcagccctttgccttccggggcgtgcggcggcctggggcccctggccagaaggcccgggccctggagggcaccctgcccagcaagagaagaagagtggccatgcctggcagcgcccctggccctggagaggaccggcccccaccccggggcagcagccccatcctgtctgagggcagcctgcctgccctgctgcacctgtgcagcgaggtggcccccagcaccaccaagggctggccagagaccctggagaggcctgtggaccctgtgacccaccccatccggggctgtgagctgcccagcaaccaccaggagtgccccccacccagcctgagccccttccctgctgccctggctgatggccgcggggactgtgccctggatggagccctggagaggccagaaaatgaggccagccctggcagccctggccccctgctgcagcaggccctgcccctgggcgccagcctgcccaggcctggggcccggggccaggatgctgagggcaagagggcccccctggtgttttctgggaagaggcgggcccctggggcccggggccgctgtgccccagaccacttccaggaggaccacctgctgcagaaggagaaggaggtgagcagcagccacatggtgtctgagggcggcccccggggcaccttccacaagggcagcgccaccaagccagctggctgccagagcagcagcaaggacagatctgctgccagcacccccagcaaggccctgaagtttcctgtgcaccccaggaaggctgtgggcagcctggcccctggagagctggcccggggcacagaaaatggcatgaagccagccacccccaaggccaagccaggccccagcagccagggcagcggcagcccccggcccggcaccaagacaggaggcggcagccagccccagcctgccagcggccagctgcagagcgagacagccaccaccccagccaagcccagcttccccagccgcagccctgcccctgagcggctgcctgcccgggcccaggccaagagctgcaccaagggcccccgggaggccggggagcagggcccccacggcagcctgggccccaaggagaagggggagagcagcaccaagaggaagaagggccaggtgcccggccctgcccggtctgagagcgtgggcagctttggccgggcccccagcgccccagacaagccacccaggacccccaggaagcaggccacccccagccgggtgctgcccaccaagcccaagcccaacagccagaacaagccccggcccccaccttctgagcagaggaaggccgagcccggccacacccagaggaaggaccggctgggcaaggccttcccccagggccggcccctgctgcggccccccaagaggggcacagctgtgcacggggctgagcctgctgagccccacacccacaggacagctgaggcccagagcgacctgctgagccagctgtttggccagaggctgaccggcttcaagatccccctgaagaaggatgccagcgagtag

SEQ ID NO: 176871 - DNA, 1479 bp, synthetic construct
  misc_feature 1..1479: note = Description of Artificial Sequence: Synthetic coding sequence
  source 1..1479: mol_type = other DNA
atgctgtgtgatgagaaggcccagaagaggaggaagaggaaggccaaggagagcggcatggccctgccccagggccacctgaccttcagagatgtggccatcgagttcagccaggccgagtggaagtgcctggaccctgcccagagggccctgtacaaggatgtgatgctggagaactacagaaacctggtgtccctgggcagcagctatgccctgggcagcaatgctgaggacaagcccatcaagaagcagctgggcgtgtccttccacctgcacctgtctgagctggagctgttcccagatgagagggtcatcaatggctgcaaccaggtggagaacttcatcaaccacagcagctctgtgtcctgcctgcaggagatgagcagctctgtgaagacccccatcttcaacagaaatgactttgatgacagcagcttcctgccccaggagcagaaggtgcacctgcgggagaagccctatgaatgtaatgagcacagcaaggtgttccgggtgagcagcagcctgaccaagcaccaggtgatccacacagtggagaagccctacaagtgcaacagctgtgggaaggtgttcagcaggaacagccacctggccgagcactgccgcatccacactggagagaagccctacaagtgcaatgtgtgtgggaaggtgttctcctacaacagcaactttgcccggcaccagaggatccacacccgggagaagccctatgaatgtaatgaatgtgggaaggtgttcagcaacaacagctacctggcccggcaccagagaattcatgctgaggagaagccctacaagtgcaatgaatgtgggaagggcttcagccacaagagcagcctggccaaccactggaggatctacacaggagagaagccctacaagtgtgatgaatgtgggaaggccttctaccgcatcgccctgctggtgcgccaccagaagatccacactggagagaagccctacaagtgcaatgaatgtgggaaggtgttcatccagaacagccacctggcccagcactggaggatccacactggagagaagccctacaagtgcaatgaatgtgggaaggtgttcaaccagctgagcaacctggcccggcaccggcgcatccacactggagagaagccctacaagtgcaatgaatgtgggaaggccttcagcgagtacagcggcctgagcgcccacctggtgatccacactggagagaagccctacaagtgcagtgaatgtgggaaggccttccgccacaagctgagcctgaccaaccaccagaggatccacactggagagcggccctacaagtgcaatgaatgtgggaaggtgttcaaccgcatcgcccacctggcccggcacaggaagatccacactggagagaagccctacaagtgcaatgaatgtgggaaggccttcagccgcatctcctacctggcccagcactggaccatccacatgggctag

SEQ ID NO: 176872 - DNA, 1377 bp, synthetic construct
  misc_feature 1..1377: note = Description of Artificial Sequence: Synthetic coding sequence
  source 1..1377: mol_type = other DNA
atgctggagcagaggcgggagccctggagcggggagagcgaggtgaagatcgccaagaacagtgatggaagagagtgcatcaagggcgtgaacacaggcagcagctatgccctgggcagcaatgctgaggacaagcccatcaagaagcagctgggcgtgtccttccacctgcacctgtctgagctggagctgttcccagatgagagggtcatcaatggctgcaaccaggtggagaacttcatcaaccacagcagctctgtgtcctgcctgcaggagatgagcagctctgtgaagacccccatcttcaacagaaatgactttgatgacagcagcttcctgccccaggagcagaaggtgcacctgcgggagaagccctatgaatgtaatgagcacagcaaggtgttccgggtgagcagcagcctgaccaagcaccaggtgatccacacagtggagaagccctacaagtgcaacagctgtgggaaggtgttcagcaggaacagccacctggccgagcactgccgcatccacactggagagaagccctacaagtgcaatgtgtgtgggaaggtgttctcctacaacagcaactttgcccggcaccagaggatccacacccgggagaagccctatgaatgtaatgaatgtgggaaggtgttcagcaacaacagctacctggcccggcaccagagaattcatgctgaggagaagccctacaagtgcaatgaatgtgggaagggcttcagccacaagagcagcctggccaaccactggaggatctacacaggagagaagccctacaagtgtgatgaatgtgggaaggccttctaccgcatcgccctgctggtgcgccaccagaagatccacactggagagaagccctacaagtgcaatgaatgtgggaaggtgttcatccagaacagccacctggcccagcactggaggatccacactggagagaagccctacaagtgcaatgaatgtgggaaggtgttcaaccagctgagcaacctggcccggcaccggcgcatccacactggagagaagccctacaagtgcaatgaatgtgggaaggccttcagcgagtacagcggcctgagcgcccacctggtgatccacactggagagaagccctacaagtgcagtgaatgtgggaaggccttccgccacaagctgagcctgaccaaccaccagaggatccacactggagagcggccctacaagtgcaatgaatgtgggaaggtgttcaaccgcatcgcccacctggcccggcacaggaagatccacactggagagaagccctacaagtgcaatgaatgtgggaaggccttcagccgcatctcctacctggcccagcactggaccatccacatgggctag

SEQ ID NO: 176873 - DNA, 537 bp, synthetic construct
  misc_feature 1..537: note = Description of Artificial Sequence: Synthetic coding sequence
  source 1..537: mol_type = other DNA
ttcccccagaccaggaagagaattgcctggagcgagggccatgctgctgcccggctgaccagcaaggagagctgctgtgagaaggcccagaagaggaggaagaggaaggccaaggagagcggcatggccctgccccagggccacctgaccttcagagatgtggccatcgagttcagccaggccgagtggaagtgcctggaccctgcccagagggccctgtacaaggatgtgatgctggagaactacagaaacctggtgtccctgggcatcagcctgcctgacctgaacatcaacagcatgctggagcagaggcgggagccctggagcggggagagcgaggtgaagatcgccaagaacagtgatggccgggagtgcatcaagggcgtgaacacaggcagcagctatgccctgggcagcaatgctgaggacaagcccatcaagaagcagctgggcgtgtccttccacctgcacctgtctgagctggagctgttcccagatgagagggtcatcaatggctgcaaccaggtggagaactag

SEQ ID NO: 176874 - DNA, 1608 bp, synthetic construct
  misc_feature 1..1608: note = Description of Artificial Sequence: Synthetic coding sequence
  source 1..1608: mol_type = other DNA
atgctgtgtgatgagaaggcccagaagaggaggaagaggaaggccaaggagagcggcatggccctgccccagggccacctgaccttcagagatgtggccatcgagttcagccaggccgagtggaagtgcctggaccctgcccagagggccctgtacaaggatgtgatgctggagaactacagaaacctggtgtccctgggcatcagcctgcctgacctgaacatcaacagcatgctggagcagaggcgggagccctggagcggggagagcgaggtgaagatcgccaagaacagtgatggccgggagtgcatcaagggcgtgaacacaggcagcagctatgccctgggcagcaatgctgaggacaagcccatcaagaagcagctgggcgtgtccttccacctgcacctgtctgagctggagctgttcccagatgagagggtcatcaatggctgcaaccaggtggagaacttcatcaaccacagcagctctgtgtcctgcctgcaggagatgagcagctctgtgaagacccccatcttcaacagaaatgactttgatgacagcagcttcctgccccaggagcagaaggtgcacctgcgggagaagccctatgagtgcaatgagcacagcaaggtgttccgggtgagcagcagcctgaccaagcaccaggtgatccacacagtggagaagccctacaagtgcaacagctgtgggaaggtgttcagcaggaacagccacctggccgagcactgccgcatccacactggagagaagccctacaagtgcaatgtgtgtgggaaggtgttctcctacaacagcaactttgcccggcaccagaggatccacacccgggagaagccctatgagtgcaatgaatgtgggaaggtgttcagcaacaacagctacctggcccggcaccagagaattcatgctgaggagaagccctacaagtgcaatgaatgtgggaagggcttcagccacaagagcagcctggccaaccactggaggatctacaccggggagaagccctacaagtgtgatgaatgtgggaaggccttctacagaattgccctgctggtgcgccaccagaagatccacactggagagaagccctacaagtgcaatgaatgtgggaaggtgttcatccagaacagccacctggcccagcactggaggatccacactggagagaagccctacaagtgcaatgaatgtgggaaggtgttcaaccagctgagcaacctggcccggcaccggcgcatccacactggagagaagccctacaagtgcaatgaatgtgggaaggccttcagcgagtacagcggcctgagcgcccacctggtgatccacactggagagaagccctacaagtgcagtgaatgtgggaaggccttccgccacaagctgagcctgaccaaccaccagaggatccacactggagagcggccctacaagtgcaatgaatgtgggaaggtgttcaacagaattgcccacctggcccggcacaggaagatccacactggagagaagccctacaagtgcaatgaatgtgggaaggccttcagccgcatctcctacctggcccagcactggaccatccacatgggctag

SEQ ID NO: 176875 - DNA, 1608 bp, synthetic construct; identical to SEQ ID NO: 176874
  misc_feature 1..1608: note = Description of Artificial Sequence: Synthetic coding sequence
  source 1..1608: mol_type = other DNA

SEQ ID NO: 176876 - DNA, 1764 bp, synthetic construct
  misc_feature 1..1764: note = Description of Artificial Sequence: Synthetic coding sequence
  source 1..1764: mol_type = other DNA
atgcccacagccctgtgcccccgggtgctggcccccaaggagagcgaggagcccaggaagatgaggagccccccaggagagaaccccagcccccagggcgagctgcccagccctgagagcagccggcggctcttccgccgcttccgctaccaggaggccgccggcccccgggaggccctgcagaggctgtgggacctgtgtggcggctggctgcggcctgagcggcacaccaaggagcagatcctggagctgctggtgctggagcagttcctggccatcctgccccgggagatccagagctgggtgcgggcccaggagcctgagagcggggagcaggccgtggccgctgtggaggccctggagcgggagcccggccggccctggcagtggctgaagcactgtgaagatcctgtggtgattgatgatggagacagccccctggaccaggagcaggagcagctgcctgtggagccccacagcgacctggccaagaaccaggatgcccagcccatcaccctggcccagtgcctgggcctgcccagcaggcctcccagccagctgagcggggaccctgtgctgcaggatgccttcctgctgcaggaggagaatgtgcgggacacccagcaggtgaccaccctgcagctgccccccagccgggtgagccccttcaaggacatgatcctgtgcttcagcgaggaggactggagcctgctggaccctgcccagacaggcttctacggggagttcatcattggagaagattatggagtgtccatgcccccaaatgacctggccgcccagcctgacctgagccagggcgaggagaatgagccccgggtgcctgagctgcaggacctgcagggcaaggaggtgccccaggtgtcctacctggacagccccagcctgcagcccttccaggtggaggagaggaggaagcgggaggagctgcaggtgcctgagttccaggcctgcccccagacagtggtgccccagaacacctacccagctgggggcaaccccaggagcctggagaacagcctggatgaggaggtgaccattgaaattgtgctgagcagcagtggagatgaggacagccagcacggcccctactgcacagaggagctgggcagccccacagagaagcagaggagcctgcctgccagccacaggagcagcacagaagctggaggagaggtgcagaccagcaagaagagctatgtgtgccccaactgtgggaagatcttccgctggagggtgaacttcatccgccacctgcggagccggcgggagcaggagaagccccatgagtgcagcgtgtgtggggagctgttcagtgacagcgaggacctggatggccacctggagagccatgaggcccagaagccctaccgctgtggggcctgtgggaagagcttccggctgaacagccacctgctgagccaccggcgcatccacctgcagcctgaccggctgcagcctgtggagaagcgggagcaggccgcctctgaagatgctgacaagggccccaaggagcccctggagaatggcaaggccaagctgtccttccagtgctgtgaatgtgggaaggccttccagagacatgaccacctggcccggcacaggagccacttccacctgaaggacaaggcccggcccttccagtgccgctactgtgtgaagagcttcacccagaactatgacctgctgcggcatgagcggctgcacatgaagaggaggagcaagcaggccctgaacagctactag

SEQ ID NO: 176877 - DNA, 1872 bp, synthetic construct
  misc_feature 1..1872: note = Description of Artificial Sequence: Synthetic coding sequence
  source 1..1872: mol_type = other DNA
atgcccacagccctgtgcccccgggtgctggcccccaaggagagcgaggagcccaggaagatgaggagccccccaggagagaaccccagcccccagggcgagctgcccagccctgagagcagccggcggctcttccgccgcttccgctaccaggaggccgccggcccccgggaggccctgcagaggctgtgggacctgtgtggcggctggctgcggcctgagcggcacaccaaggagcagatcctggagctgctggtgctggagcagttcctggccatcctgccccgggagatccagagctgggtgcgggcccaggagcctgagagcggggagcaggccgtggccgctgtggaggccctggagcgggagcccggccggccctggcagtggctgaagcactgtgaagatcctgtggtgattgatgatggagacagccccctggaccaggagcaggagcagctgcctgtggagccccacagcgacctggccaagaaccaggatgcccagcccatcaccctggcccagtgcctgggcctgcccagcaggcctcccagccagctgagcggggaccctgtgctgcaggatgccttcctgctgcaggaggagaatgtgcgggacacccagcaggtgaccaccctgcagctgcccccacgcatcttccagttcaacaaccacaggagcaatggctacatcctggagatgctgggcagcggcggcaagaaggcccagatcatctctgtgctgagccagatctacgtgtcccgggtgagccccttcaaggacatgatcctgtgcttcagcgaggaggactggagcctgctggaccctgcccagacaggcttctacggggagttcatcattggagaagattatggagtgtccatgcccccaaatgacctggccgcccagcctgacctgagccagggcgaggagaatgagccccgggtgcctgagctgcaggacctgcagggcaaggaggtgccccaggtgtcctacctggacagccccagcctgcagcccttccaggtggaggagaggaggaagcgggaggagctgcaggtgcctgagttccaggcctgcccccagacagtggtgccccagaacacctacccagctgggggcaaccccaggagcctggagaacagcctggatgaggaggtgaccattgaaattgtgctgagcagcagtggagatgaggacagccagcacggcccctactgcacagaggagctgggcagccccacagagaagcagaggagcctgcctgccagccacaggagcagcacagaagctggaggagaggtgcagaccagcaagaagagctatgtgtgccccaactgtgggaagatcttccgctggagggtgaacttcatccgccacctgcggagccggcgggagcaggagaagccccatgagtgcagcgtgtgtggggagctgttcagtgacagcgaggacctggatggccacctggagagccatgaggcccagaagccctaccgctgtggggcctgtgggaagagcttccggctgaacagccacctgctgagccaccggcgcatccacctgcagcctgaccggctgcagcctgtggagaagcgggagcaggccgcctctgaagatgctgacaagggccccaaggagcccctggagaatggcaaggccaagctgtccttccagtgctgtgaatgtgggaaggccttccagagacatgaccacctggcccggcacaggagccacttccacctgaaggacaaggcccggcccttccagtgccgctactgtgtgaagagcttcacccagaactatgacctgctgcggcatgagcggctgcacatgaagaggaggagcaagcaggccctgaacagctactag

SEQ ID NO: 176878 - DNA, 1830 bp, synthetic construct
  misc_feature 1..1830: note = Description of Artificial Sequence: Synthetic coding sequence
  source 1..1830: mol_type = other DNA
atgagcacagcccccagcctgagcgccctgcggagcagcaagcacagcggcggcggcggcggcggcggcggcggcggcggcgctgaccctgcctggaccagcgccctgagcggcaacagcagcggccctggccctggcagcagccctgctggcagcaccaagccctttgtgcatgctgtgcccccaagtgaccccctgcggcaggccaaccggctgcccatcaaggtgctgaagatgctgacagccaggacaggccacatcctgcaccctgagtacctgcagcccctgcccagcacccctgtgagccccatcgagctggatgccaagaagagccccctggccctgctggcccagacctgcagccagatcggcaagccagaccccagccccagcagcaagctgagctctgtggccagcaatggaggaggagctgggggcgccggcggcggggccgccggggacaaggacaccaagagcggccccctgaagctgagtgacattggagtggaggacaagagcagcttcaagccctacagcaagccaggcagtgacaagaaggagcccggcggcggcggcggcggcggcggcggcggcggcggcggcggcggcggcgtgtcctctgagaagagcggcttccgggtgcccagcgccacctgccagcccttcacccccaggacaggcagccccagcagcagcgccagcgctgagggcggccccaccggcctggcccacggccgcatcagctgtggcggcggcatcaacgtggatgtgaaccagcacccagatggcggccctgggggcaaggccctgggcagtgactgtggcggcagcagcggcagcagcagcggcagcggccccagcgcccccaccagcagctctgtgctgggcagcggcctggtggcccctgtgagcccctacaagccaggccagacagtgttccccctgcccccagctggcatgacctacccaggcagcctggccggggcctatgccggctacccaccccagttcctgccccacggcgtggccctggaccccaccaagccaggcagcctggtgggcgcccagctggccgctgctgctgctggcagcctgggctgcagcaagccagctggcagcagccccctggccggggccagccccccatctgtgatgacagccagcctgtgccgggacccctactgcctgagctaccactgtgccagccacctggccggggctgctgctgccagcgccagctgtgcccatgaccctgctgctgctgctgctgccctgaagagcggctaccccctggtgtaccccacccaccccctgcatggagtgcacagcagcctgacagctgctgctgctgctggggccaccccacccagcctggccggccaccccctgtacccctacggcttcatgctgcccaatgaccccctgccccacatctgcaactgggtgtctgccaacggcccctgtgacaagagatttgccaccagcgaggagctgctgagccacctgcggacccacacagccttccctggaacagacaagctgctgagcggctaccccagcagcagcagcctggccagcgctgctgctgctgccatggcctgccacatgcacatccccaccagcggggcccctggcagccctggcaccctggccctgcggagcccccaccacgccctgggcctgagcagccgctaccacccctacagcaagagccccctgcccacccctggggcccctgtgcctgtgcctgctgccaccggcccctactacagcccctatgccctgtatggccagaggctgaccacagccagcgccctgggctaccagtag

SEQ ID NO: 176879 - DNA, 1941 bp, synthetic construct
  misc_feature 1..1941: note = Description of Artificial Sequence: Synthetic coding sequence
  source 1..1941: mol_type = other DNA
atgagcacagcccccagcctgagcgccctgcggagcagcaagcacagcggcggcggcggcggcggcggcggcggcggcggcgctgaccctgcctggaccagcgccctgagcggcaacagcagcggccctggccctggcagcagccctgctggcagcaccaagccctttgtgcatgctgtgcccccaagtgaccccctgcggcaggccaaccggctgcccatcaaggtgctgaagatgctgacagccaggacaggccacatcctgcaccctgagtacctgcagcccctgcccagcacccctgtgagccccatcgagctggatgccaagaagagccccctggccctgctggcccagacctgcagccagatcggcaagccagaccccagccccagcagcaagctgagctctgtggccagcaatggaggaggagctgggggcgccggcggcggggccgccggggacaaggacaccaagagcggccccctgaagctgagtgacattggagtggaggacaagagcagcttcaagccctacagcaagccaggcagtgacaagaaggagcccggcggcggcggcggcggcggcggcggcggcggcggcggcggcggcggcgtgtcctctgagaagagcggcttccgggtgcccagcgccacctgccagcccttcacccccaggacaggcagccccagcagcagcgccagcgcctgcagccctgggggcatgctgagcagcgctggaggagcccctgagggcaaggatgacaagaaggacacagatgtgggcggcggcggcaaaggaactggaggagccagcgctgagggcggccccaccggcctggcccacggccgcatcagctgtggcggcggcatcaacgtggatgtgaaccagcacccagatggcggccctgggggcaaggccctgggcagtgactgtggcggcagcagcggcagcagcagcggcagcggccccagcgcccccaccagcagctctgtgctgggcagcggcctggtggcccctgtgagcccctacaagccaggccagaccgtcttccccctgcccccagctggcatgacctacccaggcagcctggccggggcctatgccggctacccaccccagttcctgccccatggagtggccctggaccccaccaagccaggcagcctggtgggcgcccagctggccgctgctgctgctggcagcctgggctgcagcaagccagctggcagcagccccctggccggggccagcccccccagcgtgatgacagccagcctgtgccgggacccctactgcctgagctaccactgtgccagccacctggccggggctgctgctgccagcgccagctgtgcccatgaccctgctgctgctgctgctgccctgaagagcggctaccccctggtgtaccccacccaccccctgcacggcgtgcacagcagcctgacagctgctgctgctgctggggccaccccacccagcctggccggccaccccctgtacccctacggcttcatgctgcccaatgaccccctgccccacatctgcaactgggtgtctgccaacggcccctgtgacaagagatttgccaccagcgaggagctgctgagccacctgcggacccacacagccttccctggaacagacaagctgctgagcggctaccccagcagcagcagcctggccagcgctgctgctgctgccatggcctgccacatgcacatccccaccagcggggcccctggcagccctggcaccctggccctgcggagcccccaccacgccctgggcctgagcagccgctaccacccctacagcaagagccccctgcccacccctggggcccctgtgcctgtgcctgctgccaccggcccctactacagcccctatgccctgtatggccagaggctgaccacagccagcgccctgggctaccagtag

SEQ ID NO: 176880 - DNA, 1941 bp, synthetic construct; identical to SEQ ID NO: 176879
  misc_feature 1..1941: note = Description of Artificial Sequence: Synthetic coding sequence
  source 1..1941: mol_type = other DNA

SEQ ID NO: 176881 - DNA, 1626 bp, synthetic construct
  misc_feature 1..1626: note = Description of Artificial Sequence: Synthetic coding sequence
  source 1..1626: mol_type = other DNA
atgcccaggaggaagcagagccacccccagcctgtgaagtgtgagggcgtgaaggtggacacagaggacagcctggatgagggccctggggccctggtgctggagagtgacctgctgctgggccaggacctggagtttgaggaggaggaggaggaggaggagggagatggcaacagcgaccagctgatgggctttgagcgggacagcgagggggacagcctgggcgcccggcccggcctgccctacggcctgagtgatgatgaaagtggcggcggccgggccctgtctgctgagagcgaggtggaggagcccgcccggggccctggagaggcccggggggagcggcccggccctgcctgccagctgtgtggcggccccactggagagggcccctgctgcggggccggcggccctgggggcggccccctgctgcccccccggctgctgtacagctgccgcctgtgcacctttgtgagccactacagcagccacctgaagaggcacatgcagacccacagcggggagaagcccttccgctgtggccgctgcccctatgccagcgcccagctggtgaacctgaccaggcacaccaggacccacactggagagaagccctaccgctgcccccactgcccctttgcctgcagcagcctgggcaacctgcggcggcaccagaggacccatgctggcccccccaccccaccctgccccacctgtggcttccgctgctgcacccccaggcctgcccggccccccagccccacagagcaggagggcgctgtgcccaggaggccagaagatgccctgctgctgcctgacctgagcctgcacgtgcccccaggaggagccagcttcctgcctgactgtggccagctgcggggggagggggagggcctgtgtggcaccggcagcgagcccctgcctgagctgctcttcccctggacctgccggggctgcggccaggagctggaggagggggagggcagccggctgggcgccgccatgtgtggccgctgcatgagaggagaggccggcggcggggccagcggcggcccccagggccccagcgacaagggctttgcctgcagcctgtgcccctttgccacccactaccccaaccacctggcccggcacatgaagacccacagcggggagaagcccttccgctgtgcccgctgcccctatgccagcgcccacctggacaacctgaagaggcaccagagggtgcacactggagagaagccctacaagtgccccctgtgcccctatgcctgtggcaacctggccaacctgaagagacatggccgcatccacagcggggacaagcccttccgctgcagcctgtgcaactacagctgcaaccagagcatgaacctgaagaggcacatgctgcggcacactggagagaagcccttccgctgtgccacctgtgcctacaccaccggccactgggacaactacaagaggcaccagaaggtgcacggccacggcggggccggcggccctggcctgagcgccagcgagggctgggccccaccccacagcccccccagcgtgctgagcagccggggccccccagccctgggcacagctggcagcagagctgtgcacacagacagcagctag

SEQ ID NO: 176882 - DNA, 1440 bp, synthetic construct
  misc_feature 1..1440: note = Description of Artificial Sequence: Synthetic coding sequence
  source 1..1440: mol_type = other DNA
atgggctttgagcgggacagcgagggggacagcctgggcgcccggcccggcctgccctacggcctgagtgatgatgaaagtggcggcggccgggccctgtctgctgagagcgaggtggaggagcccgcccggggccctggagaggcccggggggagcggcccggccctgcctgccagctgtgtggcggccccactggagagggcccctgctgcggggccggcggccctgggggcggccccctgctgcccccccggctgctgtacagctgccgcctgtgcacctttgtgagccactacagcagccacctgaagaggcacatgcagacccacagcggggagaagcccttccgctgtggccgctgcccctatgccagcgcccagctggtgaacctgaccaggcacaccaggacccacactggagagaagccctaccgctgcccccactgcccctttgcctgcagcagcctgggcaacctgcggcggcaccagaggacccatgctggcccccccaccccaccctgccccacctgtggcttccgctgctgcacccccaggcctgcccggccccccagccccacagagcaggagggcgctgtgcccaggaggccagaagatgccctgctgctgcctgacctgagcctgcacgtgcccccaggaggagccagcttcctgcctgactgtggccagctgcggggggagggggagggcctgtgtggcaccggcagcgagcccctgcctgagctgctcttcccctggacctgccggggctgcggccaggagctggaggagggggagggcagccggctgggcgccgccatgtgtggccgctgcatgagaggagaggccggcggcggggccagcggcggcccccagggccccagcgacaagggctttgcctgcagcctgtgcccctttgccacccactaccccaaccacctggcccggcacatgaagacccacagcggggagaagcccttccgctgtgcccgctgcccctatgccagcgcccacctggacaacctgaagaggcaccagagggtgcacactggagagaagccctacaagtgccccctgtgcccctatgcctgtggcaacctggccaacctgaagagacatggccgcatccacagcggggacaagcccttccgctgcagcctgtgcaactacagctgcaaccagagcatgaacctgaagaggcacatgctgcggcacactggagagaagcccttccgctgtgccacctgtgcctacaccaccggccactgggacaactacaagaggcaccagaaggtgcacggccacggcggggccggcggccctggcctgagcgccagcgagggctgggccccaccccacagcccccccagcgtgctgagcagccggggccccccagccctgggcacagctggcagcagagctgtgcacacagacagcagctag

SEQ ID NO: 176883 - DNA, 3936 bp, synthetic construct
  misc_feature 1..3936: note = Description of Artificial Sequence: Synthetic coding sequence
  source 1..3936: mol_type = other DNA
atgagcaggaggaagcaggccaagcccaggagcctgaaggaccccaactgcaagctggaggacaagacagaagatggagaggccctggactgcaagaagaggccagaagatggagaggagctggaggatgaagctgtgcacagctgtgacagctgcctgcaggtgtttgagagcctgagtgacatcacagagcacaagatcaaccagtgccagctgacagatggagtggatgtggaggatgaccccacctgctcctggccagccagcagccccagcagcaaggaccagaccagccccagccatggagagggctgtgactttggagaggaggagggcggccctggcctgccctacccctgccagttctgtgacaagagcttcagccggctgagctacctgaagcaccacgagcagagccacagcgacaagctgcccttcaagtgcacctactgcagccgcctcttcaagcacaagaggagccgggacagacacatcaagctgcacactggagacaagaagtaccactgcagtgaatgtgatgctgccttcagcagaagtgaccacctgaagatccacctgaagacccacaccagcaacaagccctacaagtgtgccatctgccggcggggcttcctgagcagcagcagcctgcacggccacatgcaggtgcatgagaggaacaaggatggcagccagagcggcagcaggatggaggactggaagatgaaggacacccagaagtgcagccagtgtgaggagggctttgacttccctgaggacctgcagaagcacatcgccgagtgccacccagaatgtagccccaatgaagatagagctgccctgcagtgtgtgtactgccacgagctgtttgtggaggagaccagcctgatgaaccacatggagcaggtgcacagcggggagaagaagaacagctgcagcatctgcagcgagagcttccacacagtggaggagctgtacagccacatggacagccaccagcagcctgagagctgcaaccacagcaacagccccagcctggtgacagtgggctacacctctgtgagcagcaccaccccagacagcaacctgtctgtggacagcagcaccatggtggaggccgccccacccatccccaagagccggggcaggaagagagctgcccagcagaccccagacatgacaggccccagcagcaagcaggccaaggtgacctacagctgcatctactgcaacaagcagctgttcagcagcctggccgtgctgcagatccacctgaagaccatgcacctggacaagccagagcaggcccacatctgccagtactgcctggaggtgctgcccagcctgtacaacctgaatgagcacctgaagcaggtgcatgaggcccaggaccccggcctcatcgtgtctgccatgcctgccatcgtgtaccagtgcaacttctgcagcgaggtggtgaatgacctgaacaccctgcaggagcacatccgctgcagccacggctttgccaacccagctgccaaggacagcaatgccttcttctgcccccactgctacatgggcttcctgacagacagcagcctggaggagcacatccggcaggtgcactgtgacctgagcggcagccgcttcggcagccctgtgctgggcacccccaaggagcctgtggtggaggtgtacagctgcagctactgcaccaacagccccatcttcaacagcgtgctgaagctgaacaagcacatcaaggagaaccacaagaacatccccctggccctgaactacatccacaacgggaagaagagccgggccctgagccccctgagccctgtggccatcgagcagaccagcctgaagatgatgcaggccgtgggcggggccccagcccggcccactggagagtacatctgcaaccagtgtggggccaagtacaccagcctggacagcttccagacccacctgaagacccacctggacacagtgctgcccaagctgacctgcccccagtgcaacaaggagttccccaaccaggagagcctgctgaagcacgtgaccatccacttcatgatcaccagcacctactacatctgtgagagctgtgacaagcagttcacctctgtggatgacctgcagaagcacctgctggacatgcacacctttgtgttcttccgctgcaccctgtgccaggaggtgtttgacagcaaggtgtccatccagctgcacctggccgtgaagcacagcaatgagaagaaggtgtaccgctgcaccagctgcaactgggacttcagaaatgaaacagacctgcagctgcacgtgaagcacaaccacctggagaaccagggcaaggtgcacaagtgcatcttctgtggggagagctttggaacagaggtggagctgcagtgccacatcaccacccacagcaagaagtacaactgcaagttctgcagcaaggccttccacgccatcatcctgctggagaagcacctgcgggagaagcactgtgtgtttgagaccaagacccccaactgtggcaccaatggagccagcgagcaggtgcagaaggaggaggtggagctgcagaccctgctgaccaacagccaggagagccacaacagccatgatggctctgaagaagatgtggacaccagcgagcccatgtatggctgtgacatctgtggggccgcctacaccatggagaccctgctgcagaaccaccagctgcgggaccacaacatccggcctggagagagcgccatcgtgaagaagaaggccgagctgatcaagggcaactacaagtgcaatgtgtgcagcaggaccttcttctctgaaaatggcctgcgggagcacatgcagacccacctgggccctgtgaagcactacatgtgccccatctgtggggagcgcttccccagcctgctgaccctgacagagcacaaggtgacccacagcaagagcctggacaccggcaactgccgcatctgcaagatgcccctgcagagcgaggaggagttcctggagcactgccagatgcacccagacctgaggaacagcctgaccggcttccgctgtgtggtgtgcatgcagacagtgaccagcaccctggagctgaagatccacggcaccttccacatgcagaagacaggaaatggcagcgctgtgcagaccaccggccggggccagcacgtgcagaagctgtacaagtgtgccagctgcctgaaggagttccgcagcaagcaggacctggtgaagctggacatcaatggcctgccctacggcctgtgtgccggctgtgtgaacctgagcaagagcgccagccctggcatcaacgtgcccccaggcaccaaccggcccggcctgggccagaatgaaaacctgagcgccatcgagggcaagggcaaggtgggcggcctgaagacccgctgcagcagctgcaatgtgaagtttgaaagtgaaagtgagctgcagaaccacatccagaccatccaccgggagctggtgcctgacagcaacagcacccagctgaagaccccccaggtgagccccatgccccgcatcagccccagccagagtgatgagaagaagacctaccagtgcatcaagtgccagatggtgttctacaatgagtgggacatccaggtgcacgtggccaaccacatgattgatgagggcctgaaccacgagtgcaagctgtgcagccagacctttgacagccctgccaagctgcagtgccacctgattgagcacagctttgagggcatgggcggcaccttcaagtgccctgtgtgcttcaccgtgtttgtgcaggccaacaagctgcagcagcacatcttcagcgcccacggccaggaggacaagatctatgactgcacccagtgcccccagaagttcttcttccagacagagctgcagaaccacaccatgacccagcacagcagctag

SEQ ID NO: 176884 - DNA, 3936 bp, synthetic construct
  misc_feature 1..3936: note = Description of Artificial Sequence: Synthetic coding sequence
  source 1..3936: mol_type = other DNA
atcagccgggcccagaaggcccagacccggcggctgaatgaccccaactgcaagctggaggacaagacagaagatggagaggccctggactgcaagaagaggccagaagatggagaggagctggaggatgaagctgtgcacagctgtgacagctgcctgcaggtgtttgagagcctgagtgacatcacagagcacaagatcaaccagtgccagctgacagatggagtggatgtggaggatgaccccacctgctcctggccagccagcagccccagcagcaaggaccagaccagccccagccatggagagggctgtgactttggagaggaggagggcggccctggcctgccctacccctgccagttctgtgacaagagcttcagccggctgagctacctgaagcaccacgagcagagccacagcgacaagctgcccttcaagtgcacctactgcagccgcctcttcaagcacaagaggagccgggacagacacatcaagctgcacactggagacaagaagtaccactgcagtgaatgtgatgctgccttcagcagaagtgaccacctgaagatccacctgaagacccacaccagcaacaagccctacaagtgtgccatctgccggcggggcttcctgagcagcagcagcctgcacggccacatgcaggtgcatgagaggaacaaggatggcagccagagcggcagcaggatggaggactggaagatgaaggacacccagaagtgcagccagtgtgaggagggctttgacttccctgaggacctgcagaagcacatcgccgagtgccacccagaatgtagccccaatgaagatagagctgccctgcagtgtgtgtactgccacgagctgtttgtggaggagaccagcctgatgaaccacatggagcaggtgcacagcggggagaagaagaacagctgcagcatctgcagcgagagcttccacacagtggaggagctgtacagccacatggacagccaccagcagcctgagagctgcaaccacagcaacagccccagcctggtgacagtgggctacacctctgtgagcagcaccaccccagacagcaacctgtctgtggacagcagcaccatggtggaggccgccccacccatccccaagagccggggcaggaagagagctgcccagcagaccccagacatgacaggccccagcagcaagcaggccaaggtgacctacagctgcatctactgcaacaagcagctgttcagcagcctggccgtgctgcagatccacctgaagaccatgcacctggacaagccagagcaggcccacatctgccagtactgcctggaggtgctgcccagcctgtacaacctgaatgagcacctgaagcaggtgcatgaggcccaggaccccggcctcatcgtgtctgccatgcctgccatcgtgtaccagtgcaacttctgcagcgaggtggtgaatgacctgaacaccctgcaggagcacatccgctgcagccacggctttgccaacccagctgccaaggacagcaatgccttcttctgcccccactgctacatgggcttcctgacagacagcagcctggaggagcacatccggcaggtgcactgtgacctgagcggcagccgcttcggcagccctgtgctgggcacccccaaggagcctgtggtggaggtgtacagctgcagctactgcaccaacagccccatcttcaacagcgtgctgaagctgaacaagcacatcaaggagaaccacaagaacatccccctggccctgaactacatccacaacgggaagaagagccgggccctgagccccctgagccctgtggccatcgagcagaccagcctgaagatgatgcaggccgtgggcggggccccagcccggcccactggagagtacatctgcaaccagtgtggggccaagtacaccagcctggacagcttccagacccacctgaagacccacctggacacagtgctgcccaagctgacctgcccccagtgcaacaaggagttccccaaccaggagagcctgctgaagcacgtgaccatccacttcatgatcaccagcacctactacatctgtgagagctgtgacaagcagttcacctctgtggatgacctgcagaagcacctgctggacatgcacacctttgtgttcttccgctgcaccctgtgccaggaggtgtttgacagcaaggtgtccatccagctgcacctggccgtgaagcacagcaatgagaagaaggtgtaccgctgcaccagctgcaactgggacttcagaaatgaaacagacctgcagctgcacgtgaagcacaaccacctggagaaccagggcaaggtgcacaagtgcatcttctgtggggagagctttggaacagaggtggagctgcagtgccacatcaccacccacagcaagaagtacaactgcaagttctgcagcaaggccttccacgccatcatcctgctggagaagcacctgcgggagaagcactgtgtgtttgagaccaagacccccaactgtggcaccaatggagccagcgagcaggtgcagaaggaggaggtggagctgcagaccctgctgaccaacagccaggagagccacaacagccatgatggctctgaagaagatgtggacaccagcgagcccatgtatggctgtgacatctgtggggccgcctacaccatggagaccctgctgcagaaccaccagctgcgggaccacaacatccggcctggagagagcgccatcgtgaagaagaaggccgagctgatcaagggcaactacaagtgcaatgtgtgcagcaggaccttcttctctgaaaatggcctgcgggagcacatgcagacccacctgggccctgtgaagcactacatgtgccccatctgtggggagcgcttccccagcctgctgaccctgacagagcacaaggtgacccacagcaagagcctggacaccggcaactgccgcatctgcaagatgcccctgcagagcgaggaggagttcctggagcactgccagatgcacccagacctgaggaacagcctgaccggcttccgctgtgtggtgtgcatgcagacagtgaccagcaccctggagctgaagatccacggcaccttccacatgcagaagacaggaaatggcagcgctgtgcagaccaccggccggggccagcacgtgcagaagctgtacaagtgtgccagctgcctgaaggagttccgcagcaagcaggacctggtgaagctggacatcaatggcctgccctacggcctgtgtgccggctgtgtgaacctgagcaagagcgccagccctggcatcaacgtgcccccaggcaccaaccggcccggcctgggccagaatgaaaacctgagcgccatcgagggcaagggcaaggtgggcggcctgaagacccgctgcagcagctgcaatgtgaagtttgaaagtgaaagtgagctgcagaaccacatccagaccatccaccgggagctggtgcctgacagcaacagcacccagctgaagaccccccaggtgagccccatgccccgcatcagccccagccagagtgatgagaagaagacctaccagtgcatcaagtgccagatggtgttctacaatgagtgggacatccaggtgcacgtggccaaccacatgattgatgagggcctgaaccacgagtgcaagctgtgcagccagacctttgacagccctgccaagctgcagtgccacctgattgagcacagctttgagggcatgggcggcaccttcaagtgccctgtgtgcttcaccgtgtttgtgcaggccaacaagctgcagcagcacatcttcagcgcccacggccaggaggacaagatctatgactgcacccagtgcccccagaagttcttcttccagacagagctgcaggtgcacacagccaccccccggcagagctag

SEQ ID NO: 176885 - DNA, 4038 bp, synthetic construct
  misc_feature 1..4038: note = Description of Artificial Sequence: Synthetic coding sequence
  source 1..4038: mol_type = other DNA
ttcctgagtgactatgtgcagagcgagagcctgcgggtgcggggccccctgtggagccacccagatggctttggaggcctggccagcatcttccactactacgtggactacagaagtgacagcgctgtgcaggacctggccgaccccaactgcaagctggaggacaagacagaagatggagaggccctggactgcaagaagaggccagaagatggagaggagctggaggatgaagctgtgcacagctgtgacagctgcctgcaggtgtttgagagcctgagtgacatcacagagcacaagatcaaccagtgccagctgacagatggagtggatgtggaggatgaccccacctgctcctggccagccagcagccccagcagcaaggaccagaccagccccagccatggagagggctgtgactttggagaggaggagggcggccctggcctgccctacccctgccagttctgtgacaagagcttcagccggctgagctacctgaagcaccacgagcagagccacagcgacaagctgcccttcaagtgcacctactgcagccgcctcttcaagcacaagaggagccgggacagacacatcaagctgcacactggagacaagaagtaccactgcagtgaatgtgatgctgccttcagcagaagtgaccacctgaagatccacctgaagacccacaccagcaacaagccctacaagtgtgccatctgccggcggggcttcctgagcagcagcagcctgcacggccacatgcaggtgcatgagaggaacaaggatggcagccagagcggcagcaggatggaggactggaagatgaaggacacccagaagtgcagccagtgtgaggagggctttgacttccctgaggacctgcagaagcacatcgccgagtgccacccagaatgtagccccaatgaagatagagctgccctgcagtgtgtgtactgccacgagctgtttgtggaggagaccagcctgatgaaccacatggagcaggtgcacagcggggagaagaagaacagctgcagcatctgcagcgagagcttccacacagtggaggagctgtacagccacatggacagccaccagcagcctgagagctgcaaccacagcaacagccccagcctggtgacagtgggctacacctctgtgagcagcaccaccccagacagcaacctgtctgtggacagcagcaccatggtggaggccgccccacccatccccaagagccggggcaggaagagagctgcccagcagaccccagacatgacaggccccagcagcaagcaggccaaggtgacctacagctgcatctactgcaacaagcagctgttcagcagcctggccgtgctgcagatccacctgaagaccatgcacctggacaagccagagcaggcccacatctgccagtactgcctggaggtgctgcccagcctgtacaacctgaatgagcacctgaagcaggtgcatgaggcccaggaccccggcctcatcgtgtctgccatgcctgccatcgtgtaccagtgcaacttctgcagcgaggtggtgaatgacctgaacaccctgcaggagcacatccgctgcagccacggctttgccaacccagctgccaaggacagcaatgccttcttctgcccccactgctacatgggcttcctgacagacagcagcctggaggagcacatccggcaggtgcactgtgacctgagcggcagccgcttcggcagccctgtgctgggcacccccaaggagcctgtggtggaggtgtacagctgcagctactgcaccaacagccccatcttcaacagcgtgctgaagctgaacaagcacatcaaggagaaccacaagaacatccccctggccctgaactacatccacaacgggaagaagagccgggccctgagccccctgagccctgtggccatcgagcagaccagcctgaagatgatgcaggccgtgggcggggccccagcccggcccactggagagtacatctgcaaccagtgtggggccaagtacaccagcctggacagcttccagacccacctgaagacccacctggacacagtgctgcccaagctgacctgcccccagtgcaacaaggagttccccaaccaggagagcctgctgaagcacgtgaccatccacttcatgatcaccagcacctactacatctgtgagagctgtgacaagcagttcacctctgtggatgacctgcagaagcacctgctggacatgcacacctttgtgttcttccgctgcaccctgtgccaggaggtgtttgacagcaaggtgtccatccagctgcacctggccgtgaagcacagcaatgagaagaaggtgtaccgctgcaccagctgcaactgggacttcagaaatgaaacagacctgcagctgcacgtgaagcacaaccacctggagaaccagggcaaggtgcacaagtgcatcttctgtggggagagctttggaacagaggtggagctgcagtgccacatcaccacccacagcaagaagtacaactgcaagttctgcagcaaggccttccacgccatcatcctgctggagaagcacctgcgggagaagcactgtgtgtttgagaccaagacccccaactgtggcaccaatggagccagcgagcaggtgcagaaggaggaggtggagctgcagaccctgctgaccaacagccaggagagccacaacagccatgatggctctgaagaagatgtggacaccagcgagcccatgtatggctgtgacatctgtggggccgcctacaccatggagaccctgctgcagaaccaccagctgcgggaccacaacatccggcctggagagagcgccatcgtgaagaagaaggccgagctgatcaagggcaactacaagtgcaatgtgtgcagcaggaccttcttctctgaaaatggcctgcgggagcacatgcagacccacctgggccctgtgaagcactacatgtgccccatctgtggggagcgcttccccagcctgctgaccctgacagagcacaaggtgacccacagcaagagcctggacaccggcaactgccgcatctgcaagatgcccctgcagagcgaggaggagttcctggagcactgccagatgcacccagacctgaggaacagcctgaccggcttccgctgtgtggtgtgcatgcagacagtgaccagcaccctggagctgaagatccacggcaccttccacatgcagaagacaggaaatggcagcgctgtgcagaccaccggccggggccagcacgtgcagaagctgtacaagtgtgccagctgcctgaaggagttccgcagcaagcaggacctggtgaagctggacatcaatggcctgccctacggcctgtgtgccggctgtgtgaacctgagcaagagcgccagccctggcatcaacgtgcccccaggcaccaaccggcccggcctgggccagaatgaaaacctgagcgccatcgagggcaagggcaaggtgggcggcctgaagacccgctgcagcagctgcaatgtgaagtttgaaagtgaaagtgagctgcagaaccacatccagaccatccaccgggagctggtgcctgacagcaacagcacccagctgaagaccccccaggtgagccccatgccccgcatcagccccagccagagtgatgagaagaagacctaccagtgcatcaagtgccagatggtgttctacaatgagtgggacatccaggtgcacgtggccaaccacatgattgatgagggcctgaaccacgagtgcaagctgtgcagccagacctttgacagccctgccaagctgcagtgccacctgattgagcacagctttgagggcatgggcggcaccttcaagtgccctgtgtgcttcaccgtgtttgtgcaggccaacaagctgcagcagcacatcttcagcgcccacggccaggaggacaagatctatgactgcacccagtgcccccagaagttcttcttccagacagagctgcaggtgcacacagccaccccccggcagagctag

SEQ ID NO: 176886 - DNA, 2013 bp, synthetic construct
  misc_feature 1..2013: note = Description of Artificial Sequence: Synthetic coding sequence
  source 1..2013: mol_type = other DNA
atggccgaggtggtggccgaggtggccgagatgcccacccagatgagccctggagctgtggagatgagcacccccatgtctgctgagatgatggagatgagcacagaggtgacagagatgaccccaggagaggccctggccagcagcctcttcttccagcaccaccagttcatgtgcagtgaatgtggcagcctgtacaacaccctggaggaggtgctgagccaccaggagcagcacatgctggccgtgtctgaggaggaggccctgaccacccagaatgtgggcctggagcctgagctggtgcctggagctgagggccccttccagtgtggggagtgcagccagctgatcctgagccctggagagctgctggcccaccaggatgcccacctgcgggagagcgccaaccagatccagtaccagtgctgggactgccaggagctgttccccagccctgagctgtgggtggcccacaggaaggcccagcacctgagcgccaccgtggccgagccccctgtgcccccacccctgcccccacccacccccctgcccccacccagcccccccagcgaggtgaagatggagccctatgagtgcccagaatgttccaccctgtgtgccaccccagaggagttcctggagcaccagggcacccactttgacagcctggagaaggaggagagaaatggcctggaggaggaggaggaggatgatgaggaggatgaagaagatgatgaggagatggaggatgaggaggccatggccgaggtgggagatgatgctgtgggcggagatgagagcacagctggctgggcccagggctgtggggactgcccccagcaccagcccagcgctggggcccggcggcagcacagaagaacagcccacagccctgccagcgccacccaccccttccactgcagccagtgccagaggagcttcagcagcgccaaccggctgcaggcccacggccgggcccacgtgggcggcacccatgaatgtaccacctgcagcaaggtgttcaagaaggccgccagcctggagcagcacctgcggctgcacagaggagaggcccgctacctgtgtgtggactgtggccggggctttggaacagagctgaccctggtggcccacagaagagcccacacagccaaccccctgcaccgctgccgctgtgggaagaccttcagcaacatgaccaagttcctgtaccacaggaggacccacgccggcaagagcggggccccacccaccggggccacagcccccccagccccagctgagcccaccccacctcctcctcctccagcccccccagcccagctgccctgcccccagtgcagcaagagctttgccagcgccagccggctgagccgccacagaagagctgtgcacggccccccagagcggcggcaccgctgtggggtgtgtgggaagggcttcaagaagctgatccacgtgaggaaccacctgcggacccacactggagagcggcccttccagtgccacagctgtgggaagacctttgccagcctggccaacctgagccgccaccagctgacccacactggagcccggccctaccagtgcctggactgtgggaagcgcttcacccagagcagcaacctgcagcagcaccggcggctgcacctgcggcctgtggcctttgcccgggccccccggctgcccatcaccggcctgtacaacaagagcccctactactgcggcacctgtggccgctggttccgggccatggccggcctgcggctgcaccagagggtgcacgcccgggcccggaccctgaccctgcagcccccaagaagccccagccctgcccctcctcctcctcctgagccccagcagaccatcatgtgcacagagctgggggagaccatcgccatcatcgagaccagccagcccctggccctggaggacaccctgcagctgtgccaggccgccctgggcgccagcgaggccggcggcctgctgcagctggacacagcctttgtgtag

SEQ ID NO: 176887 - DNA, 1581 bp, synthetic construct
  misc_feature 1..1581: note = Description of Artificial Sequence: Synthetic coding sequence
  source 1..1581: mol_type = other DNA
atggccgaggtggtggccgaggtggccgagatgcccacccagatgagccctggagctgtggagatgagcacccccatgtctgctgagatgatggagatgagcacagaggtgacagagatgacccccagcccccccagcgaggtgaagatggagccctatgagtgcccagaatgttccaccctgtgtgccaccccagaggagttcctggagcaccagggcacccactttgacagcctggagaaggaggagagaaatggcctggaggaggaggaggaggatgatgaggaggatgaagaagatgatgaggagatggaggatgaggaggccatggccgaggtgggagatgatgctgtgggcggagatgagagcacagctggctgggcccagggctgtggggactgcccccagcaccagcccagcgctggggcccggcggcagcacagaagaacagcccacagccctgccagcgccacccaccccttccactgcagccagtgccagaggagcttcagcagcgccaaccggctgcaggcccacggccgggcccacgtgggcggcacccatgaatgtaccacctgcagcaaggtgttcaagaaggccgccagcctggagcagcacctgcggctgcacagaggagaggcccgctacctgtgtgtggactgtggccggggctttggaacagagctgaccctggtggcccacagaagagcccacacagccaaccccctgcaccgctgccgctgtgggaagaccttcagcaacatgaccaagttcctgtaccacaggaggacccacgccggcaagagcggggccccacccaccggggccacagcccccccagccccagctgagcccaccccacctcctcctcctccagcccccccagcccagctgccctgcccccagtgcagcaagagctttgccagcgccagccggctgagccgccacagaagagctgtgcacggccccccagagcggcggcaccgctgtggggtgtgtgggaagggcttcaagaagctgatccacgtgaggaaccacctgcggacccacactggagagcggcccttccagtgccacagctgtgggaagacctttgccagcctggccaacctgagccgccaccagctgacccacactggagcccggccctaccagtgcctggactgtgggaagcgcttcacccagagcagcaacctgcagcagcaccggcggctgcacctgcggcctgtggcctttgcccgggccccccggctgcccatcaccggcctgtacaacaagagcccctactactgcggcacctgtggccgctggttccgggccatggccggcctgcggctgcaccagagggtgcacgcccgggcccggaccctgaccctgcagcccccaagaagccccagccctgcccctcctcctcctcctgagccccagcagaccatcatgtgcacagagctgggggagaccatcgccatcatcgagaccagccagcccctggccctggaggacaccctgcagctgtgccaggccgccctgggcgccagcgaggccggcggcctgctgcagctggacacagcctttgtgtag

SEQ ID NO: 176888 - DNA, 1983 bp, synthetic construct
  misc_feature 1..1983: note = Description of Artificial Sequence: Synthetic coding sequence
  source 1..1983: mol_type = other DNA
atggcccacgccctggtgaccttcagagatgtggccatcgacttcagccagaaggagtgggagtgcctggacaccacccagaggaagctgtacagagatgtgatgctggagaactacaacaacctggtgtccctgggctacagcggcagcaagccagatgtgatcaccctgctggagcagggcaaggagccctgtgtggtggccagagatgtgacaggccggcagtgccccggcctgctgagccgccacaagaccaagaagctgagcagcgagaaggacatccacgagatcagcctgagcaaggagagcatcatcgagaagagcaagaccctgcggctgaagggcagcatcttcagaaatgagtggcagaacaagtcagaatttgagggccagcagggcctgaaggagaggagcatcagccagaagaagatcgtgtccaagaagatgagcacagacaggaagaggcccagcttcaccctgaaccagaggatccacaacagcgagaagagctgtgacagccacctggtgcagcacggcaagattgacagtgatgtgaagcatgactgcaaggaatgtggcagcaccttcaacaacgtgtaccagctgaccctgcaccagaagatccacactggagagaagagctgcaagtgtgagaagtgtgggaaggtgttcagccacagctaccagctgaccctgcaccagcgcttccacactggagagaagccctatgagtgccaggagtgtgggaagaccttcaccctgtacccccagctgaacagacaccagaagatccacacaggcaagaagccctacatgtgcaagaagtgtgacaagggcttcttcagccggctggagctgacccagcacaagaggatccacacaggcaagaagagctatgagtgcaaggaatgtgggaaggtgttccagctgatcttctacttcaaggagcacgagcgcatccacacaggcaagaagccctatgagtgcaaggaatgtgggaaggccttctctgtgtgtggccagctgaccaggcaccagaagatccacactggagtgaagccctatgagtgcaaggaatgtgggaagaccttccggctgtccttctacctgacagagcacaggaggacccacgccggcaagaagccctatgagtgcaaggaatgtgggaagagcttcaacgtgcggggccagctgaacagacacaagaccatccacacaggcatcaagccctttgcctgcaaggtgtgtgagaaggccttctcctacagcggggacctgcgggtgcacagccgcatccacactggagagaagccctatgagtgcaaggaatgtgggaaggccttcatgctgcggtctgtgctgacagagcaccagaggctgcacactggagtgaagccctatgagtgcaaggaatgtgggaagaccttccgggtgcgcagccagatcagcctgcacaagaagatccacacagatgtgaagccctacaagtgtgtgcgctgtgggaagaccttccgcttcggcttctacctgacagagcaccagaggatccacactggagagaagccctacaagtgcaaggaatgtgggaaggccttcatccggcggggcaacctgaaggagcacctgaagatccacagcggcctgaagccctatgactgcaaggaatgtgggaagagcttcagccggcggggccagttcacagagcaccagaagatccacactggagtgaagccctacaagtgcaaggaatgtgggaaggccttcagccgctctgtggacctgcgcatccaccagaggatccacactggagagaagccctatgagtgcaagcagtgtgggaaggccttccggctgaacagccacctgacagagcaccagaggatccacactggagagaagccctatgagtgcaaggtgtgcaggaaggccttccggcagtacagccacctgtaccagcaccagaagacccacaacgtcatctag

SEQ ID NO: 176889 - DNA, 1887 bp, synthetic construct
  misc_feature 1..1887: note = Description of Artificial Sequence: Synthetic coding sequence
  source 1..1887: mol_type = other DNA
atggcccacgccctggtgaccttcagagatgtggccatcgacttcagccagaaggagtgggagtgcctggacaccacccagaggaagctgtacagagatgtgatgctggagaactacaacaacctggtgtccctgggcctgctgagccgccacaagaccaagaagctgagcagcgagaaggacatccacgagatcagcctgagcaaggagagcatcatcgagaagagcaagaccctgcggctgaagggcagcatcttcagaaatgagtggcagaacaagtcagaatttgagggccagcagggcctgaaggagaggagcatcagccagaagaagatcgtgtccaagaagatgagcacagacaggaagaggcccagcttcaccctgaaccagaggatccacaacagcgagaagagctgtgacagccacctggtgcagcacggcaagattgacagtgatgtgaagcatgactgcaaggaatgtggcagcaccttcaacaacgtgtaccagctgaccctgcaccagaagatccacactggagagaagagctgcaagtgtgagaagtgtgggaaggtgttcagccacagctaccagctgaccctgcaccagcgcttccacactggagagaagccctatgagtgccaggagtgtgggaagaccttcaccctgtacccccagctgaacagacaccagaagatccacacaggcaagaagccctacatgtgcaagaagtgtgacaagggcttcttcagccggctggagctgacccagcacaagaggatccacacaggcaagaagagctatgagtgcaaggaatgtgggaaggtgttccagctgatcttctacttcaaggagcacgagcgcatccacacaggcaagaagccctatgagtgcaaggaatgtgggaaggccttctctgtgtgtggccagctgaccaggcaccagaagatccacactggagtgaagccctatgagtgcaaggaatgtgggaagaccttccggctgtccttctacctgacagagcacaggaggacccacgccggcaagaagccctatgagtgcaaggaatgtgggaagagcttcaacgtgcggggccagctgaacagacacaagaccatccacacaggcatcaagccctttgcctgcaaggtgtgtgagaaggccttctcctacagcggggacctgcgggtgcacagccgcatccacactggagagaagccctatgagtgcaaggaatgtgggaaggccttcatgctgcggtctgtgctgacagagcaccagaggctgcacactggagtgaagccctatgagtgcaaggaatgtgggaagaccttccgggtgcgcagccagatcagcctgcacaagaagatccacacagatgtgaagccctacaagtgtgtgcgctgtgggaagaccttccgcttcggcttctacctgacagagcaccagaggatccacactggagagaagccctacaagtgcaaggaatgtgggaaggccttcatccggcggggcaacctgaaggagcacctgaagatccacagcggcctgaagccctatgactgcaaggaatgtgggaagagcttcagccggcggggccagttcacagagcaccagaagatccacactggagtgaagccctacaagtgcaaggaatgtgggaaggccttcagccgctctgtggacctgcgcatccaccagaggatccacactggagagaagccctatgagtgcaagcagtgtgggaaggccttccggctgaacagccacctgacagagcaccagaggatccacactggagagaagccctatgagtgcaaggtgtgcaggaaggccttccggcagtacagccacctgtaccagcaccagaagacccacaacgtcatctag

SEQ ID NO: 176890 - DNA, 1887 bp, synthetic construct; identical to SEQ ID NO: 176889
  misc_feature 1..1887: note = Description of Artificial Sequence: Synthetic coding sequence
  source 1..1887: mol_type = other DNA

SEQ ID NO: 176891 - DNA, 1983 bp, synthetic construct; identical to SEQ ID NO: 176888
  misc_feature 1..1983: note = Description of Artificial Sequence: Synthetic coding sequence
  source 1..1983: mol_type = other DNA

SEQ ID NO: 176892 - DNA, 1500 bp, synthetic construct
  misc_feature 1..1500: note = Description of Artificial Sequence: Synthetic coding sequence
  source 1..1500: mol_type = other DNA
atggcccagggcctggtgaccttcagagatgtggccatcgagttcagcctggaggagtggaagtgcctggagcccgcccagagggacctgtaccgggaggtgaccctggagaactttggccacctggccagcctgggcctgagcatcagcaagccagatgtggtgtccctgctggagcagggcaaggagccctggatgattgccaatgatgtgacaggcccctggtgcccagacctggagagccgctgtgagaagttcctgcagaaggacatctttgagatcggggccttcaactgggagatcatggagagcctgaagtgcagcgacctggagggcagtgacttccgggctgactgggagtgtgagggccagtttgagcggcaggtgaatgaggagtgctacttcaagcaggtgaatgtgacctacggccacatgcctgtgttccagcaccacaccagccacacagtgcggcagagccgggagaccggggagaagctgatggagtgccatgaatgtgggaaggccttcagccggggcagccacctgatccagcaccagaagatccacactggagagaagcccttcggctgcaaggaatgtgggaaggccttcagccgggccagccacctggtgcagcaccagaggatccacactggagagaagccctatgactgcaaggactgtgggaaggccttcggccgcaccagcgagctgatcctgcaccagaggctgcacactggagtgaagccctatgagtgcaaggaatgtgggaagaccttccggcagcacagccagctgatcctgcaccagaggacccacactggagagaagccctacgtgtgcaaggactgtgggaaggccttcatccggggcagccagctgactgtgcaccggcgcatccacactggagcccggccctatgagtgcaaggaatgtgggaaggccttccggcagcacagccagctgactgtgcaccagaggatccacactggagagaagccctatgagtgcaaggaatgtgggaagggcttcatccacagcagcgaggtgaccaggcaccagaggatccacagcggggagaagccctatgagtgcaaggaatgtgggaaggccttccggcagcacgcccagctgaccaggcaccagagggtgcacactggagaccggccctatgagtgcaaggactgtgggaaggccttcagccgcagcagctacctgatccagcaccagaggatccacactggagacaagccctatgagtgcaaggaatgtgggaaggccttcatccgggtgtcccagctgacccaccaccagaggatccacacctgtgagaagccctatgagtgcagagaatgtggcatggccttcatccgcagcagccagctgacagagcaccagaggatccaccctggcatcaagccctatgagtgcagagaatgtggccaggccttcatcctgggcagccagctgattgagcactaccgcatccacactggatag

SEQ ID NO: 176893 - DNA, 1620 bp, synthetic construct
  misc_feature 1..1620: note = Description of Artificial Sequence: Synthetic coding sequence
  source 1..1620: mol_type = other DNA
atgaggcggggcccctgggagcgctggagcctggccagccaccggctggatgctggcctgtgcacctgcccccgggaggagagccgggagatccgggccggccagatcgtgctgaaggccatggcccagggcctggtgaccttcagagatgtggccatcgagttcagcctggaggagtggaagtgcctggagcccgcccagagggacctgtaccgggaggtgaccctggagaactttggccacctggccagcctgggcctgagcatcagcaagccagatgtggtgtccctgctggagcagggcaaggagccctggatgattgccaatgatgtgacaggcccctggtgcccagacctggagagccgctgtgagaagttcctgcagaaggacatctttgagatcggggccttcaactgggagatcatggagagcctgaagtgcagcgacctggagggcagtgacttccgggctgactgggagtgtgagggccagtttgagcggcaggtgaatgaggagtgctacttcaagcaggtgaatgtgacctacggccacatgcctgtgttccagcaccacaccagccacacagtgcggcagagccgggagaccggggagaagctgatggagtgccatgaatgtgggaaggccttcagccggggcagccacctgatccagcaccagaagatccacactggagagaagcccttcggctgcaaggaatgtgggaaggccttcagccgggccagccacctggtgcagcaccagaggatccacactggagagaagccctatgactgcaaggactgtgggaaggccttcggccgcaccagcgagctgatcctgcaccagaggctgcacactggagtgaagccctatgagtgcaaggaatgtgggaagaccttccggcagcacagccagctgatcctgcaccagaggacccacactggagagaagccctacgtgtgcaaggactgtgggaaggccttcatccggggcagccagctgactgtgcaccggcgcatccacactggagcccggccctatgagtgcaaggaatgtgggaaggccttccggcagcacagccagctgactgtgcaccagaggatccacactggagagaagccctatgagtgcaaggaatgtgggaagggcttcatccacagcagcgaggtgaccaggcaccagaggatccacagcggggagaagccctatgagtgcaaggaatgtgggaaggccttccggcagcacgcccagctgaccaggcaccagagggtgcacactggagaccggccctatgagtgcaaggactgtgggaaggccttcagccgcagcagctacctgatccagcaccagaggatccacactggagacaagccctatgagtgcaaggaatgtgggaaggccttcatccgggtgtcccagctgacccaccaccagaggatccacacctgtgagaagccctatgagtgcagagaatgtggcatggccttcatccgcagcagccagctgacagagcaccagaggatccaccctggcatcaagccctatgagtgcagagaatgtggccaggccttcatcctgggcagccagctgattgagcactaccgcatccacactggatag

SEQ ID NO: 176894 - DNA, 1500 bp, synthetic construct; identical to SEQ ID NO: 176892
  misc_feature 1..1500: note = Description of Artificial Sequence: Synthetic coding sequence
  source 1..1500: mol_type = other DNA

SEQ ID NO: 176895 - DNA, 2061 bp, synthetic construct
  misc_feature 1..2061: note = Description of Artificial Sequence: Synthetic coding sequence
  source 1..2061: mol_type = other DNA
atgacagagagccagggcaccgtgaccttcaaggatgtggccatcgacttcacccaggaggagtggaagaggctggaccctgcccagaggaagctgtacagaaatgtgatgctggagaactacaacaacctgatcaccgtgggctaccccttcaccaagccagatgtgatcttcaagctggagcaggaggaggagccctgggtgatggaggaggaggtgctgcggcggcactggcagggcgagatctggggcgtggatgagcaccagaagaaccaggaccggctgctgcggcaggtggaggtgaagttccagaagaccctgacagaggagaagggaaatgaatgccagaagaagtttgccaacgtgttccccctgaacagcgacttcttccccagccgccacaacctgtatgaatatgacctgtttgggaagtgcctggagcacaactttgactgccacaacaacgtgaagtgcctgatgaggaaggagcactgtgagtacaatgaacctgtgaagagctatggcaacagcagcagccactttgtgatcacccccttcaagtgcaaccactgtgggaagggcttcaaccagaccctggacctgatccgccacctgcgcatccacactggagagaagccctatgaatgtagcaactgcaggaaggccttcagccacaaggagaagctgatcaagcactacaagatccacagccgggagcagagctacaagtgcaatgaatgtgggaaggccttcatcaagatgagcaacctgatccgccaccagaggatccacactggagagaagccctatgcctgcaaggaatgtgagaagagcttcagccagaagagcaacctgattgaccacgagaagatccacactggagagaagccctatgaatgtaatgaatgtgggaaggccttcagccagaagcagagcctcatcgcccaccagaaggtgcacactggagagaagccctatgcctgcaatgaatgtgggaaggccttcccccgcatcgccagcctggccctgcacatgaggagccacactggagagaagccctacaagtgtgacaagtgtgggaaggccttcagccagttctccatgctgatcatccacgtgcgcatccacactggagagaagccctatgaatgtaatgaatgtgggaaggccttcagccagagcagcgccctgactgtgcacatgaggagccacactggagagaagccctatgagtgcaaggagtgcaggaaggccttcagccacaagaagaacttcatcacccaccagaagatccacacccgggagaagccctatgaatgtaatgaatgtgggaaggccttcatccagatgagcaacctggtgcgccaccagaggatccacactggagagaagccctacatctgcaaggaatgtgggaaggccttcagccagaagagcaacctgattgcccacgagaagatccacagcggggagaagccctatgaatgtaatgaatgtgggaaggccttcagccagaagcagaacttcatcacccaccagaaggtgcacactggagagaagccctatgactgcaatgaatgtgggaaggccttcagccagatcgccagcctgaccctgcacctgcggagccacactggagagaagccctatgaatgtgacaagtgtgggaaggccttcagccagtgcagcctgctgaacctgcacatgaggagccacactggagagaagccctacgtgtgcaatgaatgtgggaaggccttcagccagaggaccagcctcatcgtgcacatgaggggccacactggagagaagccctatgagtgcaacaagtgtgggaaggccttcagccagagcagcagcctgaccatccacatccggggccacactggagagaagccctttgactgcagcaaatgtgggaaggccttcagccagatcagcagcctgaccctgcacatgaggaagcacactggagagaagccctaccactgcattgaatgtgggaaggccttcagccagaagagccacctggtgcgccaccagaggatccacacccactag

SEQ ID NO: 176896 - DNA, 1029 bp, synthetic construct
  misc_feature 1..1029: note = Description of Artificial Sequence: Synthetic coding sequence
  source 1..1029: mol_type = other DNA
atgaggagccacactggagagaagccctacaagtgtgacaagtgtgggaaggccttcagccagttctccatgctgatcatccacgtgcgcatccacactggagagaagccctatgaatgtaatgaatgtgggaaggccttcagccagagcagcgccctgactgtgcacatgaggagccacactggagagaagccctatgagtgcaaggagtgcaggaaggccttcagccacaagaagaacttcatcacccaccagaagatccacacccgggagaagccctatgaatgtaatgaatgtgggaaggccttcatccagatgagcaacctggtgcgccaccagaggatccacactggagagaagccctacatctgcaaggaatgtgggaaggccttcagccagaagagcaacctgattgcccacgagaagatccacagcggggagaagccctatgaatgtaatgaatgtgggaaggccttcagccagaagcagaacttcatcacccaccagaaggtgcacactggagagaagccctatgactgcaatgaatgtgggaaggccttcagccagatcgccagcctgaccctgcacctgcggagccacactggagagaagccctatgaatgtgacaagtgtgggaaggccttcagccagtgcagcctgctgaacctgcacatgaggagccacactggagagaagccctacgtgtgcaatgaatgtgggaaggccttcagccagaggaccagcctcatcgtgcacatgaggggccacactggagagaagccctatgagtgcaacaagtgtgggaaggccttcagccagagcagcagcctgaccatccacatccggggccacactggagagaagccctttgactgcagcaaatgtgggaaggccttcagccagatcagcagcctgaccctgcacatgaggaagcacactggagagaagccctaccactgcattgaatgtgggaaggccttcagccagaagagccacctggtgcgccaccagaggatccacacccactag

SEQ ID NO: 176897 - DNA, 1584 bp, synthetic construct
  misc_feature 1..1584: note = Description of Artificial Sequence: Synthetic coding sequence
  source 1..1584: mol_type = other DNA
atgaggaaggagcactgtgagtacaatgaacctgtgaagagctatggcaacagcagcagccacttcgtcatcacccccttcaagtgcaaccactgtgggaagggcttcaaccagaccctggacctgatccgccacctgcgcatccacactggagagaagccctatgagtgcagcaactgcaggaaggccttcagccacaaggagaagctgatcaagcactacaagatccacagccgggagcagagctacaagtgcaatgaatgtgggaaggccttcatcaagatgagcaacctgatccgccaccagaggatccacactggagagaagccctatgcctgcaaggaatgtgagaagagcttcagccagaagagcaacctgattgaccacgagaagatccacactggagagaagccctatgagtgcaatgaatgtgggaaggccttcagccagaagcagagcctgattgcccaccagaaggtgcacactggagagaagccctatgcctgcaatgaatgtgggaaggccttccccagaattgccagcctggccctgcacatgaggagccacactggagagaagccctacaagtgtgacaagtgtgggaaggccttcagccagttctccatgctgatcatccacgtgcgcatccacactggagagaagccctatgagtgcaatgaatgtgggaaggccttcagccagagcagcgccctgactgtgcacatgaggagccacactggagagaagccctatgagtgcaaggaatgtaggaaggccttcagccacaagaagaacttcatcacccaccagaagatccacacccgggagaagccctatgagtgcaatgaatgtgggaaggccttcatccagatgagcaacctggtgcgccaccagaggatccacactggagagaagccctacatctgcaaggaatgtgggaaggccttcagccagaagagcaacctgattgcccacgagaagatccacagcggggagaagccctatgagtgcaatgaatgtgggaaggccttcagccagaagcagaacttcatcacccaccagaaggtgcacactggagagaagccctatgactgcaatgaatgtgggaaggccttcagccagatcgccagcctgaccctgcacctgcggagccacactggagagaagccctatgaatgtgacaagtgtgggaaggccttcagccagtgcagcctgctgaacctgcacatgaggagccacactggagagaagccctacgtgtgcaatgaatgtgggaaggccttcagccagaggaccagcctgattgtgcacatgaggggccacactggagagaagccctatgagtgcaacaagtgtgggaaggccttcagccagagcagcagcctgaccatccacatccggggccacactggagagaagccctttgactgcagcaaatgtgggaaggccttcagccagatcagcagcctgaccctgcacatgaggaagcacactggagagaagccctaccactgcattgaatgtgggaaggccttcagccagaagagccacctggtgcgccaccagaggatccacacccactag

SEQ ID NO: 176898 - DNA, 1551 bp, synthetic construct
  misc_feature 1..1551: note = Description of Artificial Sequence: Synthetic coding sequence
  source 1..1551: mol_type = other DNA
atgtttgagcagctgaagcccatcgagccccgggactgctggagggaggcccgggtgaagaagaagcctgtgacctttgaagatgtggccgtgaacttcacccaggaggagtgggactgcctggatgccagccagagggtgctgtaccaggatgtgatgtctgagaccttcaagaacctgacctctgtggcccgcatcttcctgcacaagccagagctgatcaccaagctggagcaggaggaggagcagtggagggagtttgtgcacctgcccaacacagagggcctgtctgagggcaagaagaaggagctgcgggagcagcaccccagcctgagagatgagggcaccagtgatgacaaggtgttcctggcctgccgcggggccggccagtgccccctgagcgccccagctggcaccatggacaggaccagggtgctgcaggccagccaggccggcccccccttcttctgctacacctgtgggaagtgcttcagccgccgcagctacctgtacagccaccagtttgtgcacaaccccaagctgaccaacagctgcagccagtgtgggaagctgttccgcagccccaagagcctgagctaccacaggaggatgcacctgggggagcggcccttctgctgcaccctgtgtgacaagacctactgtgatgccagcggcctgagccgccaccggcgggtgcacctgggctaccggccccacagctgcagcgtgtgtgggaagagcttccgggaccagagcgagctgaagaggcaccagaagatccaccagaaccaggagcctgtggatggcaaccaggagtgcaccctgcgcatccctggcacccaggccgagttccagacccccatcgcccggagccagaggagcatccagggcctgctggatgtgaaccacgcccctgtggcccggagccaggagcccatcttcagaacagagggccccatggcccagaaccaggcctctgtgctgaagaaccaggcccctgtgaccaggacccaggcccccatcaccggcaccctgtgccaggatgcccggagcaacagccaccctgtgaagcccagccggctgaatgtgttctgctgcccccactgcagcctgaccttcagcaagaagagctacctgagccgccaccagaaggcccacctgacagagccccccaactactgcttccactgcagcaagagcttcagcagcttcagccggctggtgcgccaccagcagacccactggaagcagaagagctacctgtgccccatctgtgacctgagctttggagagaaggagggcctgatggaccactggaggggctacaagggcaaggacctgtgccagagcagccaccacaagtgcagggtcatcctgggccagtggctgggcttcagccatgatgtgcccaccatggccggggaggagtggaagcatggaggagaccagagccccccacgcatccacacccccaggagaagaggcctgcgggagaaggcctgcaagggggacaagaccaaggaggccgtgtccatcctgaagcacaagtag

SEQ ID NO: 176899 - DNA, 1551 bp, synthetic construct; identical to SEQ ID NO: 176898
  misc_feature 1..1551: note = Description of Artificial Sequence: Synthetic coding sequence
  source 1..1551: mol_type = other DNA

SEQ ID NO: 176900 - DNA, 1551 bp, synthetic construct; identical to SEQ ID NO: 176898
  misc_feature 1..1551: note = Description of Artificial Sequence: Synthetic coding sequence
  source 1..1551: mol_type = other DNA

SEQ ID NO: 176901 - DNA, 1551 bp, synthetic construct; identical to SEQ ID NO: 176898
  misc_feature 1..1551: note = Description of Artificial Sequence: Synthetic coding sequence
  source 1..1551: mol_type = other DNA

SEQ ID NO: 176902 - DNA, 636 bp, synthetic construct
  misc_feature 1..636: note = Description of Artificial Sequence: Synthetic coding sequence
  source 1..636: mol_type = other DNA
tgagcccggagccaggagcccatcttcagaacagagggccccatggcccagaaccaggcctctgtgctgaagaaccaggcccctgtgaccaggacccaggcccccatcaccggcaccctgtgccaggatgcccggagcaacagccaccctgtgaagcccagccggctgaatgtgttctgctgcccccactgcagcctgaccttcagcaagaagagctacctgagccgccaccagaaggcccacctgacagagccccccaactactgcttccactgcagcaagagcttcagcagcttcagccggctggtgcgccaccagcagacccactggaagcagaagagctacctgtgccccatctgtgacctgagctttggagagaaggagggcctgatggaccactggaggggctacaagggcaaggacctgtgccagagcagccaccacaagtgcagggtcatcctgggccagtggctgggcttcagccatgatgtgcccaccatggccggggaggagtggaagcacggcggggaccagagccccccacgcatccacaccccaagaagaagaggcctgcgggagaaggcctgcaagggggacaagaccaaggaggccgtgtccatcctgaagcacaagtag

SEQ ID NO: 176903 - DNA, 1551 bp, synthetic construct; identical to SEQ ID NO: 176898
  misc_feature 1..1551: note = Description of Artificial Sequence: Synthetic coding sequence
  source 1..1551: mol_type = other DNA

SEQ ID NO: 176904 - DNA, 1551 bp, synthetic construct; identical to SEQ ID NO: 176898
  misc_feature 1..1551: note = Description of Artificial Sequence: Synthetic coding sequence
  source 1..1551: mol_type = other DNA

SEQ ID NO: 176905 - DNA, 1551 bp, synthetic construct; identical to SEQ ID NO: 176898
  misc_feature 1..1551: note = Description of Artificial Sequence: Synthetic coding sequence
  source 1..1551: mol_type = other DNA

SEQ ID NO: 176906 - DNA, 1551 bp, synthetic construct; identical to SEQ ID NO: 176898
  misc_feature 1..1551: note = Description of Artificial Sequence: Synthetic coding sequence
  source 1..1551: mol_type = other DNA

SEQ ID NO: 176907 - DNA, 1611 bp, synthetic construct
  misc_feature 1..1611: note = Description of Artificial Sequence: Synthetic coding sequence
  source 1..1611: mol_type = other DNA
atgtttgagcagctgaagcccatcgagcctgtgcagaagaccctgccctgggtgggggaggtggccgccaccctgcaggaggccatgaagagggactgctggagggaggcccgggtgaagaagaagcctgtgacctttgaagatgtggccgtgaacttcacccaggaggagtgggactgcctggatgccagccagagggtgctgtaccaggatgtgatgtctgagaccttcaagaacctgacctctgtggcccgcatcttcctgcacaagccagagctgatcaccaagctggagcaggaggaggagcagtggagggagtttgtgcacctgcccaacacagagggcctgtctgagggcaagaagaaggagctgcgggagcagcaccccagcctgagagatgagggcaccagtgatgacaaggtgttcctggcctgccgcggggccggccagtgccccctgagcgccccagctggcaccatggacaggaccagggtgctgcaggccagccaggccggcccccccttcttctgctacacctgtgggaagtgcttcagccgccgcagctacctgtacagccaccagtttgtgcacaaccccaagctgaccaacagctgcagccagtgtgggaagctgttccgcagccccaagagcctgagctaccacaggaggatgcacctgggggagcggcccttctgctgcaccctgtgtgacaagacctactgtgatgccagcggcctgagccgccaccggcgggtgcacctgggctaccggccccacagctgcagcgtgtgtgggaagagcttccgggaccagagcgagctgaagaggcaccagaagatccaccagaaccaggagcctgtggatggcaaccaggagtgcaccctgcgcatccctggcacccaggccgagttccagacccccatcgcccggagccagaggagcatccagggcctgctggatgtgaaccacgcccctgtggcccggagccaggagcccatcttcagaacagagggccccatggcccagaaccaggcctctgtgctgaagaaccaggcccctgtgaccaggacccaggcccccatcaccggcaccctgtgccaggatgcccggagcaacagccaccctgtgaagcccagccggctgaatgtgttctgctgcccccactgcagcctgaccttcagcaagaagagctacctgagccgccaccagaaggcccacctgacagagccccccaactactgcttccactgcagcaagagcttcagcagcttcagccggctggtgcgccaccagcagacccactggaagcagaagagctacctgtgccccatctgtgacctgagctttggagagaaggagggcctgatggaccactggaggggctacaagggcaaggacctgtgccagagcagccaccacaagtgcagggtcatcctgggccagtggctgggcttcagccatgatgtgcccaccatggccggggaggagtggaagcatggaggagaccagagccccccacgcatccacacccccaggagaagaggcctgcgggagaaggcctgcaagggggacaagaccaaggaggccgtgtccatcctgaagcacaagtag

SEQ ID NO: 176908 - DNA, 1551 bp, synthetic construct; identical to SEQ ID NO: 176898
  misc_feature 1..1551: note = Description of Artificial Sequence: Synthetic coding sequence
  source 1..1551: mol_type = other DNA

SEQ ID NO: 176909 - DNA, 1356 bp, synthetic construct
  misc_feature 1..1356: note = Description of Artificial Sequence: Synthetic coding sequence
  source 1..1356: mol_type = other DNA
gctgggggcagccctgagagcctgctcttcttccagaagcctgtgacctttgaagatgtggccgtgaacttcacccaggaggagtgggactgcctggatgccagccagagggtgctgtaccaggatgtgatgtctgagaccttcaagaacctgacctctgtggcccgcatcttcctgcacaagccagagctgatcaccaagctggagcaggaggaggagcagtggagggagaccagggtgctgcaggccagccaggccggcccccccttcttctgctacacctgtgggaagtgcttcagcagaagaagctacctgtacagccaccagtttgtgcacaaccccaagctgaccaacagctgcagccagtgtgggaagctgttccgcagccccaagagcctgagctaccacaggaggatgcacctgggggagcggcccttctgctgcaccctgtgtgacaagacctactgtgatgccagcggcctgagccgccacagaagagtgcacctgggctaccggccccacagctgcagcgtgtgtgggaagagcttccgggaccagagcgagctgaagaggcaccagaagatccaccagaaccaggagcctgtggatggcaaccaggagtgcaccctgcgcatccctggcacccaggccgagttccagacccccatcgcccggagccagaggagcatccagggcctgctggatgtgaaccacgcccctgtggcccggagccaggagcccatcttcagaacagagggccccatggcccagaaccaggcctctgtgctgaagaaccaggcccctgtgaccaggacccaggcccccatcaccggcaccctgtgccaggatgcccggagcaacagccaccctgtgaagcccagccggctgaatgtgttctgctgcccccactgcagcctgaccttcagcaagaagagctacctgagccgccaccagaaggcccacctgacagagccccccaactactgcttccactgcagcaagagcttcagcagcttcagccggctggtgcgccaccagcagacccactggaagcagaagagctacctgtgccccatctgtgacctgagctttggagagaaggagggcctgatggaccactggaggggctacaagggcaaggacctgtgccagagcagccaccacaagtgcagggtcatcctgggccagtggctgggcttcagccatgatgtgcccaccatggccggggaggagtggaagcacggcggggaccagagccccccacgcatccacaccccaagaagaagaggcctgcgggagaaggcctgcaagggggacaagaccaaggaggccgtgtccatcctgaagcacaagtag

SEQ ID NO: 176910 - DNA, 1551 bp, synthetic construct; identical to SEQ ID NO: 176898
  misc_feature 1..1551: note = Description of Artificial Sequence: Synthetic coding sequence
  source 1..1551: mol_type = other DNA

SEQ ID NO: 176911 - DNA, 1611 bp, synthetic construct; identical to SEQ ID NO: 176907
  misc_feature 1..1611: note = Description of Artificial Sequence: Synthetic coding sequence
  source 1..1611: mol_type = other DNA

SEQ ID NO: 176912 - DNA, 1611 bp, synthetic construct; identical to SEQ ID NO: 176907
  misc_feature 1..1611: note = Description of Artificial Sequence: Synthetic coding sequence
  source 1..1611: mol_type = other DNA

SEQ ID NO: 176913 - DNA, 1611 bp, synthetic construct; identical to SEQ ID NO: 176907
  misc_feature 1..1611: note = Description of Artificial Sequence: Synthetic coding sequence
  source 1..1611: mol_type = other DNA

SEQ ID NO: 176914 - DNA, 1611 bp, synthetic construct; identical to SEQ ID NO: 176907
  misc_feature 1..1611: note = Description of Artificial Sequence: Synthetic coding sequence
  source 1..1611: mol_type = other DNA

SEQ ID NO: 176915 - DNA, 1551 bp, synthetic construct; identical to SEQ ID NO: 176898
  misc_feature 1..1551: note = Description of Artificial Sequence: Synthetic coding sequence
  source 1..1551: mol_type = other DNA

SEQ ID NO: 176916 - DNA, 1551 bp, synthetic construct; identical to SEQ ID NO: 176898
  misc_feature 1..1551: note = Description of Artificial Sequence: Synthetic coding sequence
  source 1..1551: mol_type = other DNA

SEQ ID NO: 176917 - DNA, 1611 bp, synthetic construct; identical to SEQ ID NO: 176907
  misc_feature 1..1611: note = Description of Artificial Sequence: Synthetic coding sequence
  source 1..1611: mol_type = other DNA

SEQ ID NO: 176918 - DNA, 1551 bp, synthetic construct; identical to SEQ ID NO: 176898
  misc_feature 1..1551: note = Description of Artificial Sequence: Synthetic coding sequence
  source 1..1551: mol_type = other DNA

SEQ ID NO: 176919 - DNA, 1551 bp, synthetic construct; identical to SEQ ID NO: 176898
  misc_feature 1..1551: note = Description of Artificial Sequence: Synthetic coding sequence
  source 1..1551: mol_type = other DNA

SEQ ID NO: 176920 - DNA, 1611 bp, synthetic construct; identical to SEQ ID NO: 176907
  misc_feature 1..1611: note = Description of Artificial Sequence: Synthetic coding sequence
  source 1..1611: mol_type = other DNA

SEQ ID NO: 176921 - DNA, 1725 bp, synthetic construct
  misc_feature 1..1725: note = Description of Artificial Sequence: Synthetic coding sequence
  source 1..1725: mol_type = other DNA
atggctgctgctgtgccccggcggcccacccagggcaccgtgacctttgaagatgtggccgtgaacttcagccaggaggagtggtgcctgctgtctgaggcccagcgctgcctgtacagagatgtgatgctggagaacctggccctgatcagcagcctgggctgctggtgtggcagcaaggatgaggaggccccctgcaagcagaggatctctgtgcagcgggagagccagagcaggacccccagggctggggtgagccccaagaaggcccacccctgtgagatgtgtggcctcatcctggaggatgtgttccactttgctgaccaccaggagacccaccacaagcagaagctgaacagaagtggggcctgtgggaagaacctggatgacacagcctacctgcaccagcaccagaagcagcacatcggggagaagttctacaggaagtctgtgcgggaggccagctttgtgaagaagaggaagctgcgggtgtcccaggagccctttgtgttccgggagtttgggaaggatgtgctgcccagcagcggcctgtgccaggaggaggccgctgtggagaagacagacagcgagaccatgcacggcccccccttccaggagggcaagaccaactacagctgtgggaagaggaccaaggccttcagcaccaagcacagcgtcatcccccaccagaagctgttcaccagagatggctgctacgtgtgcagcgactgtgggaagagcttcagccgctacgtgtccttcagcaaccaccagagggaccacacagccaagggcccctatgactgtggagaatgtgggaagagctacagcaggaagagcagcctcatccagcaccagagggtgcacacaggccagacagcctacccctgtgaagaatgtgggaagagcttcagccagaagggcagcctcatcagccaccagctggtgcacactggagagggcccctatgagtgcagagaatgtgggaagagctttggccagaagggcaacctgatccagcaccagcagggccacactggagagcgggcctaccactgtggagaatgtgggaagagcttccggcagaagttctgcttcatcaaccaccagagggtgcacactggagagcggccctacaagtgtggagaatgtgggaagagctttggccagaagggcaacctggtgcaccaccagaggggccacactggagagcggccctatgagtgcaaggaatgtgggaagagcttccgctaccgcagccacctgacagagcaccagaggctgcacactggagagcggccctacaactgcagagaatgtgggaagctgttcaacaggaagtaccacctgctggtgcatgagcgggtgcacactggagagcggccctatgcctgtgaggtgtgtgggaagctgtttggaaacaagcacagcgtgaccatccaccagaggatccacactggagagcggccctatgagtgcagtgaatgtgggaagagcttcctgagcagcagcgccctgcacgtgcacaagagggtgcacagcggccagaagccctacaagtgcagtgaatgtgggaagagcttcagcgagtgcagcagcctcatcaagcaccggcgcatccacactggagagcggccctatgagtgcaccaagtgtgggaagaccttccagaggagcagcaccctgctgcaccaccagagcagccacaggaggaaggccctgtag

SEQ ID NO: 176922 - DNA, 3804 bp, synthetic construct
  misc_feature 1..3804: note = Description of Artificial Sequence: Synthetic coding sequence
  source 1..3804: mol_type = other DNA
atgggagacatgaagaccccagactttgatgacctgctggccgcctttgacatcccagaccccaccagcctggatgccaaggaggccatccagacccccagcgaggagaatgaaagccccctgaagcccccaggcatctgcatggatgaatctgtgtccctgagccacagcggcagcgccccagatgtgcctgctgtgtctgtgattgtgaagaacaccagccggcaggagagctttgaagctgagaaggaccacatcacccccagcctgctgcacaacggcttccggggcagtgacctgcccccagacccccacaactgtgggaagtttgacagcaccttcatgaatggagacagcgcccggagcttccctgggaagctggagccccccaagtctgagcccctgcccaccttcaaccagttcagccccatcagcagccctgagcctgaggaccccatcaaggacaatggcttcggcatcaagcccaagcacagcgacagctacttccccccacccctgggctgtggggctgtgggcggccctgtgctggaggccctggccaagtttcctgtgcctgagctgcacatgtttgaccacttctgcaagaaggagcccaagccagagcccctgcccctgggcagccagcaggagcacgagcagagcggccagaacacagtggagccccacaaggaccctgatgccacccgcttcttcggggaggccctggagttcaacagccaccccagcaacagcatcggggagagcaagggcctggcccgggagctgggcacctgcagctctgtgcccccccggcagaggctgaagccagcccacagcaagctgagcagctgtgtggccgccctggtggccctgcaggccaagagggtggcctctgtgaccaaggaggaccagcccggccacaccaaggacctgagcggccccaccaaggagagcagcaagggcagccccaagatgcccaagagccccaagagccccaggagccccctggaggccaccaggaagagcatcaagcccagcgacagccccaggagcatctgcagcgacagcagcagcaagggcagccccagcgtggccgccagcagccccccagccatccccaaggtgcgcatcaagaccatcaagaccagcagcggggagatcaagaggacagtgacccgcatcctgcctgaccctgatgaccccagcaagagccctgtgggcagccccctgggcagcgccatcgccgaggcccccagcgagatgcctggagatgaggtgcctgtggaggagcacttccctgaggccggcaccaacagcggcagcccccagggcgccaggaaaggagatgagagcatgaccaaggccagtgacagcagcagccccagctgcagcagcggcccccgggtgcccaagggagctgcccctggcagccagacaggcaagaagcagcagagcacagccctgcaggccagcaccctggccccagccaacctgctgcccaaggctgtgcacctggccaacctgaacctggtgccccacagcgtggccgcctctgtgacagccaagagctctgtgcagaggaggagccagccccagctgacccagatgtctgtgcccctggtgcaccaggtgaagaaggccgcccccctgattgtggaggtgttcaacaaggtgctgcacagcagcaaccctgtgcccctgtatgcccccaacctgagccccccagctgacagccgcatccacgtgcctgccagcggctactgctgcctggagtgtggagatgcctttgccctggagaagagcctgagccagcactacggccgccgctctgtgcacatcgaggtgctgtgcaccctgtgcagcaagaccctgctcttcttcaacaagtgcagcctgctgcggcatgcccgggaccacaagagcaagggcctggtgatgcagtgcagccagctgctggtgaagcccatctctgctgaccagatgtttgtgtctgcccctgtgaacagcacagccccagctgccccagcccccagcagcagccccaagcacggcctgaccagcggcagcgccagccccccacctccagccctgcccctgtacccagaccctgtgcggctcatccgctacagcatcaagtgcctggagtgccacaagcagatgagggactacatggtgctggccgcccacttccagaggaccacagaggagacagagggcctgacctgccaggtgtgccagatgctgctgcccaaccagtgcagcttctgtgcccaccagaggatccacgcccacaagagcccctactgctgcccagaatgtggggtgctgtgccgcagcgcctacttccagacccacgtgaaggagaactgcctgcactacgccaggaaggtgggctaccgctgcatccactgcggcgtggtgcacctgaccctggccctgctgaagagccacatccaggagcggcactgccaggtgttccacaagtgtgccttctgccccatggccttcaagacagccagcagcacagctgaccacagcgccacccagcaccccacccagccccaccggcccagccagctgatctacaagtgcagctgtgagatggtgttcaacaagaagaggcacatccagcagcacttctaccagaatgtgtccaagacccaggtgggcgtcttcaagtgcccagagtgccccctgctgtttgtgcagaagccagagctgatgcagcacgtgaagagcacccatggagtgcccagaaatgtggatgagctgagcagcctgcagagcagcgctgacaccagcagcagccggcccggcagccgggtgcccacagagcccccagccacctctgtggccgcccggagcagcagcctgcccagcggccgctggggccggcctgaggcccaccggcgggtggaggcccggccccggctgaggaacacaggctggacctgccaggagtgccaggagtgggtgcctgaccgggagagctatgtgagccacatgaagaagagccacggccgcaccctgaagcgctacccctgccggcagtgtgagcagagcttccacacccccaacagcctgaggaagcacatccggaacaaccacgacacagtgaagaagttctacacctgtggctactgcacagaggacagccccagcttcccccggcccagcctgctggagagccacatcagcctgatgcacggcatccggaacccagacctgagccagaccagcaaggtgaagcccccaggcggccacagcccccaggtgaaccacctgaagaggcctgtgtctggagtgggagatgcccctggcaccagcaatggagccaccgtgagcagcaccaagaggcacaagagcctcttccagtgtgccaagtgcagctttgccacagattctggcctggagttccagagccacatcccccagcaccaggtggacagcagcacagcccagtgcctgctgtgtggcctgtgctacaccagcgccagcagcctgagccgccacctgttcatcgtgcacaaggtgcgggaccaggaggaggaggaggaggaggaggccgctgctgctgagatggctgtggaggtggccgagcctgaggagggcagcggggaggaggtgcccatggagaccagagaaaatggcctggaggagtgtgccggggagcccctgtctgctgaccctgaggcccggcggctgctgggccctgccccagaagatgatggcggccacaatgaccacagccagccccaggccagccaggaccaggacagccacaccctgagcccccaggtgtag

SEQ ID NO: 176923 - DNA, 3804 bp, synthetic construct; identical to SEQ ID NO: 176922
  misc_feature 1..3804: note = Description of Artificial Sequence: Synthetic coding sequence
  source 1..3804: mol_type = other DNA

SEQ ID NO: 176924 - DNA, 2379 bp, synthetic construct
  misc_feature 1..2379: note = Description of Artificial Sequence: Synthetic coding sequence
  source 1..2379: mol_type = other DNA
atggccgccatcaacccctgggcctcctggggcgccctgacagaccagagctggggcatgacagctgtggacccctgggcctcctgggccctgtgcccccagtacccagcctggcacgtggagggcagcctggaggagggccggcgggccaccggcctgcctgctgcccaggtgcaggagcctgtgaccttcaaggatgtggccgtggacttcacccaggaggagtggggccagctggacctggtgcagaggaccctgtacagagatgtgatgctggagacctacggccacctgctgtctgtgggcaaccagatcgccaagccagaggtgatcagcctgctggagcagggcgaggagccctggagcgtggagcaggcctgcccccagaggacctgcccagagtgggtgaggaacctggagagcaaggccctgatcccagcccagagcatctttgaggaggagcagagccacggcatgaagctggagcgctacatctgggatgacccctggttcagccggctggaggtgctgggctgcaaggaccagctggagatgtaccacatgaaccagagcacagccatgaggcagatggtgttcatgcagaagcaggtgctgagccagaggagcagcgagttctgtggcctgggcgctgagttcagccagaacctgaactttgtgcccagccagagggtgtcccagatcgagcacttctacaagccagacacccacgcccagagctggaggtgtgacagcgccatcatgtatgctgacaaggtgacctgtgagaacaatgactatgacaagacagtgtaccagagcatccagcccatctacccagcccgcatccagacaggagacaacctcttcaagtgcacagatgctgtgaagagcttcaaccacatcatccactttggagaccacaagggcatccacactggagagaagctgtatgagtacaaggagtgccaccagatcttcaaccagagccccagcttcaatgagcacccccggctgcacgtgggggagaaccagtacaactacaaggagtatgagaacatcttctacttcagcagcttcatggagcaccagaagattggaacagtggagaaggcctacaagtacaatgagtgggagaaggtgtttggctatgacagcttcctgacccagcacaccagcacctacacagctgagaagccctatgactacaatgaatgtggcaccagcttcatctggagcagctacctgatccagcacaagaagacccacactggagagaagccctatgaatgtgacaagtgtgggaaggtgttcaggaacagaagtgccctgaccaagcatgagaggacccacacaggcatcaagccctatgagtgcaacaagtgtgggaaggccttctcctggaacagccacctgattgtgcacaagaggatccacactggagagaagccctacgtgtgcaatgaatgtgggaagagcttcaactggaacagccacctgattggccaccagaggacccacactggagagaagccctttgaatgtacagaatgtgggaagagcttctcctggagcagccacctgattgcccacatgaggatgcacactggagagaagcccttcaagtgtgatgaatgtgagaaggccttccgggactacagcgccctgagcaagcatgagaggacccacagcggggccaagccctacaagtgcacagaatgtgggaagagcttctcctggagcagccacctgattgcccaccagaggacccacactggagagaagccctacaactgccaggagtgtgggaaggccttccgggagaggtctgccctgaccaagcatgagatcatccacagcggcatcaagccctatgagtgcaacaagtgtgggaagagctgcagccagatggcccacctggtgcgccaccagaggacccacactggagagaagccctatgagtgcaacaagtgtgggaagagcttcagccagagctgccacctggtggcccaccggcgcatccacactggagagaagccctacaagtgcaaccagtgtgagaggagcttcaactgcagcagccacctgattgcccacaggaggacccacactggagagaagccctaccgctgcaatgaatgtgggaaggccttcaatgaaagcagcagcctcatcgtgcacctgaggaaccacactggagagaagccctacaagtgcaaccactgtgagaaggccttctgcaagaacagcagcctcatcatccaccagaggatgcacagcggggagaagcgcttcatctgcagtgaatgtgggaaggccttcagcggccacagcgccctgctgcagcaccagaggaaccacagcgaggagaagctgaactag

SEQ ID NO: 176925 - DNA, 2109 bp, synthetic construct
  misc_feature 1..2109: note = Description of Artificial Sequence: Synthetic coding sequence
  source 1..2109: mol_type = other DNA
atgctggagacctacggccacctgctgtctgtgggcaaccagatcgccaagccagaggtgatcagcctgctggagcagggcgaggagccctggagcgtggagcaggcctgcccccagaggacctgcccagagtgggtgaggaacctggagagcaaggccctgatcccagcccagagcatctttgaggaggagcagagccacggcatgaagctggagcgctacatctgggatgacccctggttcagccggctggaggtgctgggctgcaaggaccagctggagatgtaccacatgaaccagagcacagccatgaggcagatggtgttcatgcagaagcaggtgctgagccagaggagcagcgagttctgtggcctgggcgctgagttcagccagaacctgaactttgtgcccagccagagggtgtcccagatcgagcacttctacaagccagacacccacgcccagagctggaggtgtgacagcgccatcatgtatgctgacaaggtgacctgtgagaacaatgactatgacaagacagtgtaccagagcatccagcccatctacccagcccgcatccagacaggagacaacctcttcaagtgcacagatgctgtgaagagcttcaaccacatcatccactttggagaccacaagggcatccacactggagagaagctgtatgagtacaaggagtgccaccagatcttcaaccagagccccagcttcaatgagcacccccggctgcacgtgggggagaaccagtacaactacaaggagtatgagaacatcttctacttcagcagcttcatggagcaccagaagattggaacagtggagaaggcctacaagtacaatgagtgggagaaggtgtttggctatgacagcttcctgacccagcacaccagcacctacacagctgagaagccctatgactacaatgaatgtggcaccagcttcatctggagcagctacctgatccagcacaagaagacccacactggagagaagccctatgaatgtgacaagtgtgggaaggtgttcaggaacagaagtgccctgaccaagcatgagaggacccacacaggcatcaagccctatgagtgcaacaagtgtgggaaggccttctcctggaacagccacctgattgtgcacaagaggatccacactggagagaagccctacgtgtgcaatgaatgtgggaagagcttcaactggaacagccacctgattggccaccagaggacccacactggagagaagccctttgaatgtacagaatgtgggaagagcttctcctggagcagccacctgattgcccacatgaggatgcacactggagagaagcccttcaagtgtgatgaatgtgagaaggccttccgggactacagcgccctgagcaagcatgagaggacccacagcggggccaagccctacaagtgcacagaatgtgggaagagcttctcctggagcagccacctgattgcccaccagaggacccacactggagagaagccctacaactgccaggagtgtgggaaggccttccgggagaggtctgccctgaccaagcatgagatcatccacagcggcatcaagccctatgagtgcaacaagtgtgggaagagctgcagccagatggcccacctggtgcgccaccagaggacccacactggagagaagccctatgagtgcaacaagtgtgggaagagcttcagccagagctgccacctggtggcccaccggcgcatccacactggagagaagccctacaagtgcaaccagtgtgagaggagcttcaactgcagcagccacctgattgcccacaggaggacccacactggagagaagccctaccgctgcaatgaatgtgggaaggccttcaatgaaagcagcagcctcatcgtgcacctgaggaaccacactggagagaagccctacaagtgcaaccactgtgagaaggccttctgcaagaacagcagcctcatcatccaccagaggatgcacagcggggagaagcgcttcatctgcagtgaatgtgggaaggccttcagcggccacagcgccctgctgcagcaccagaggaaccacagcgaggagaagctgaactag

SEQ ID NO: 176926 - DNA, 1527 bp, synthetic construct
  misc_feature 1..1527: note = Description of Artificial Sequence: Synthetic coding sequence
  source 1..1527: mol_type = other DNA
atggccgccatcaacccctgggcctcctggggcgccctgacagaccagagctggggcatgacagctgtggacccctgggcctcctgggccctgtgcccccagtacccagcctggcacgtggagggcagcctggaggagggccggcgggccaccggcctgcctgctgcccaggtgcaggagcctgtgaccttcaaggatgtggccgtggacttcacccaggaggagtggggccagctggacctggtgcagaggaccctgtacagagatgtgatgctggagacctacggccacctgctgtctgtgggcaaccagatcgccaagccagaggtgatcagcctgctggagcagggcgaggagccctggagcgtggagcaggcctgcccccagaggacctgcccagagtgggtgaggaacctggagagcaaggccctgatcccagcccagagcatctttgaggaggagcagagccacggcatgaagctggagcgctacatctgggatgacccctggttcagccggctggaggtgctgggctgcaaggaccagctggagatgtaccacatgaaccagagcacagccatgaggcagatggtgttcatgcagaagcaggtgctgagccagaggagcagcgagttctgtggcctgggcgctgagttcagccagaacctgaactttgtgcccagccagagggtgtcccagatcgagcacttctacaagccagacacccacgcccagagctggaggtgtgacagcgccatcatgtatgctgacaaggtgacctgtgagaacaatgactatgacaagacagtgtaccagagcatccagcccatctacccagcccgcatccagacaggagacaacctcttcaagtgcacagatgctgtgaagagcttcaaccacatcatccactttggagaccacaagggcatccacactggagagaagctgtatgagtacaaggagtgccaccagatcttcaaccagagccccagcttcaatgagcacccccggctgcacgtgggggagaaccagtacaactacaaggagtatgagaacatcttctacttcagcagcttcatggagcaccagaagattggaacagtggagaaggcctacaagtacaatgagtgggagaaggtgtttggctatgacagcttcctgacccagcacaccagcacctacacagctgagaagccctatgactacaatgaatgtggcaccagcttcatctggagcagctacctgatccagcacaagaagacccacactggagagaagccctatgaatgtgacaagtgtgggaaggtgttcaggaacagaagtgccctgaccaagcatgagaggacccacacaggcatcaagccctatgagtgcaacaagtgtgggaaggccttctcctggaacagccacctgattgtgcacaagaggatccacactggagagaagccctacgtgtgcaatgaatgtgggaagagcttcaactggaacagccacctgattggccaccagaggacccacactggatag

SEQ ID NO: 176927 - DNA, 2523 bp, synthetic construct
  misc_feature 1..2523: note = Description of Artificial Sequence: Synthetic coding sequence
  source 1..2523: mol_type = other DNA
atgaaggaggacaagagcagcatccgggaggccatcagcaaggccaagagcacagccaacatcaagacagagcaggagggggaggccagcgagaagagcctgcacctgagcccccagcacatcacccaccagaccatgcccatcggccagaggggcagcgagcagggcaagagggtggagaacatcaatggcaccagctaccccagcctgcagcagaagaccaatgctgtgaagaagctgcacaagtgtgatgaatgtgggaagagcttcaagtacaacagccggctggtgcagcacaagatcatgcacactggagagaagagatatgaatgtgatgactgtggcggcaccttccgcagcagcagcagcctgcgggtgcacaagaggatccacactggagagaagccctacaagtgtgaagaatgtgggaaggcctacatgagctacagcagcctcatcaaccacaagagcacccacagcggggagaagaactgcaagtgtgatgaatgtgggaagagcttcaactacagctctgtgctggaccagcacaagaggatccacactggagagaagccctatgaatgtggagaatgtgggaaggccttcaggaacagcagcggcctgcgggtgcacaagaggatccacactggagagaagccctatgaatgtgacatctgtgggaagaccttcagcaacagcagcggcctgcgggtgcacaagaggatccacactggagagaagccctatgaatgtgatgaatgtgggaaggccttcatcacctgcaggaccctgctgaaccacaagagcatccactttggagacaagccctacaagtgtgatgaatgtgagaagagcttcaactacagcagcctgctgatccagcacaaggtgatccacactggagagaagccctatgaatgtgatgaatgtgggaaggccttcaggaacagcagcggcctgattgtgcacaagaggatccacactggagagaagccctacaagtgtgatgtgtgtgggaaggccttctcctacagcagcggcctggccgtgcacaagagcatccaccctgggaagaaggcccacgagtgcaaggaatgtgggaagagcttctcctacaacagcctgctgctgcagcacaggaccatccacactggagagcggccctacgtgtgtgatgtgtgtgggaagaccttcagaaataatgccggcctgaaggtgcaccggcggctgcacactggagagaagccctacaagtgtgatgtgtgtgggaaggcctacatcagccgcagcagcctgaagaaccacaagggcatccacctgggggagaagccctacaagtgcagctactgtgagaagagcttcaactacagcagcgccctggagcagcacaagaggatccacacccgggagaagcccttcggctgtgatgaatgtgggaaggccttcaggaacaacagcggcctgaaggtgcacaagaggatccacactggagagcggccctacaagtgtgaagaatgtgggaaggcctacatcagcctgagcagcctcatcaaccacaagtctgtgcaccctggagagaagcccttcaagtgtgatgaatgtgagaaggccttcatcacctaccgcaccctgaccaaccacaagaaggtgcacctgggggagaagccctacaagtgtgatgtgtgtgagaagagcttcaactacaccagcctgctgagccagcaccggcgggtgcacacccgggagaagccctatgaatgtgacagatgtgagaaggtgttcaggaacaacagcagcctgaaggtgcacaagaggatccacactggagagcggccctatgaatgtgatgtgtgtgggaaggcctacatcagccacagcagcctcatcaaccacaagagcacccaccctggccgcaccccccacacctgtgatgaatgtgggaaggccttcttcagcagcaggaccctcatcagccacaagagggtgcacctgggggagaagcccttcaagtgtgtggagtgtgggaagagcttctcctacagcagcctgctgagccagcacaagaggatccacactggagagaagccctacgtgtgtgacagatgtgggaaggccttcaggaacagcagcggcctgactgtgcacaagaggatccacactggagagaagccctatgaatgtgatgaatgtgggaaggcctacatcagccacagcagcctcatcaaccacaagtctgtgcaccagggcaagcagccctacaactgtgaatgtgggaagagcttcaactacagatctgtgctggaccagcacaagaggatccacacaggcaagaagccctaccgctgcaatgaatgtgggaaggccttcaacatccgcagcaacctgaccaagcacaagaggacccacactggagaggagagcctgaatgtcatctacgtgggcagctacagcggcaccagccagaagaggacctatgaaggaggaaatgccctggatggcggccgcatgaggatgcccctgtag

SEQ ID NO: 176928 - DNA, 1497 bp, synthetic construct
  misc_feature 1..1497: note = Description of Artificial Sequence: Synthetic coding sequence
  source 1..1497: mol_type = other DNA
atgagctacagcagcctcatcaaccacaagagcacccacagcggggagaagaactgcaagtgtgatgaatgtgggaagagcttcaactacagctctgtgctggaccagcacaagaggatccacactggagagaagccctatgaatgtggagaatgtgggaaggccttcaggaacagcagcggcctgcgggtgcacaagaggatccacactggagagaagccctatgaatgtgacatctgtgggaagaccttcagcaacagcagcggcctgcgggtgcacaagaggatccacactggagagaagccctatgaatgtgatgaatgtgggaaggccttcatcacctgcaggaccctgctgaaccacaagagcatccactttggagacaagccctacaagtgtgatgaatgtgggaaggccttcaggaacaacagcggcctgaaggtgcacaagaggatccacactggagagcggccctacaagtgtgaagaatgtgggaaggcctacatcagcctgagcagcctcatcaaccacaagtctgtgcaccctggagagaagcccttcaagtgtgatgaatgtgagaaggccttcatcacctaccgcaccctgaccaaccacaagaaggtgcacctgggggagaagccctacaagtgtgatgtgtgtgagaagagcttcaactacaccagcctgctgagccagcaccggcgggtgcacacccgggagaagccctatgaatgtgacagatgtgagaaggtgttcaggaacaacagcagcctgaaggtgcacaagaggatccacactggagagcggccctatgaatgtgatgtgtgtgggaaggcctacatcagccacagcagcctcatcaaccacaagagcacccaccctggccgcaccccccacacctgtgatgaatgtgggaaggccttcttcagcagcaggaccctcatcagccacaagagggtgcacctgggggagaagcccttcaagtgtgtggagtgtgggaagagcttctcctacagcagcctgctgagccagcacaagaggatccacactggagagaagccctacgtgtgtgacagatgtgggaaggccttcaggaacagcagcggcctgactgtgcacaagaggatccacactggagagaagccctatgaatgtgatgaatgtgggaaggcctacatcagccacagcagcctcatcaaccacaagtctgtgcaccagggcaagcagccctacaactgtgaatgtgggaagagcttcaactacagatctgtgctggaccagcacaagaggatccacacaggcaagaagccctaccgctgcaatgaatgtgggaaggccttcaacatccgcagcaacctgaccaagcacaagaggacccacactggagaggagagcctgaatgtcatctacgtgggcagctacagcggcaccagccagaagaggacctatgaaggaggaaatgccctggatggcggccgcatgaggatgcccctgtag

SEQ ID NO: 176929 - DNA, 2703 bp, synthetic construct
  misc_feature 1..2703: note = Description of Artificial Sequence: Synthetic coding sequence
  source 1..2703: mol_type = other DNA
atgagccacctgaagaccagcacagaagatgaggagcccacagaggagtatgaaaatgtgggcaatgctgccagcaagtggcccaaggtggaggaccccatgcctgagagcaaggtgggggacacctgtgtgtgggacagcaaggtggagaaccagcagaagaagcctgtggagaacaggatgaaggaggacaagagcagcatccgggaggccatcagcaaggccaagagcacagccaacatcaagacagagcaggagggggaggccagcgagaagagcctgcacctgagcccccagcacatcacccaccagaccatgcccatcggccagaggggcagcgagcagggcaagagggtggagaacatcaatggcaccagctaccccagcctgcagcagaagaccaatgctgtgaagaagctgcacaagtgtgatgaatgtgggaagagcttcaagtacaacagccggctggtgcagcacaagatcatgcacactggagagaagagatatgaatgtgatgactgtggcggcaccttccgcagcagcagcagcctgcgggtgcacaagaggatccacactggagagaagccctacaagtgtgaagaatgtgggaaggcctacatgagctacagcagcctcatcaaccacaagagcacccacagcggggagaagaactgcaagtgtgatgaatgtgggaagagcttcaactacagctctgtgctggaccagcacaagaggatccacactggagagaagccctatgaatgtggagaatgtgggaaggccttcaggaacagcagcggcctgcgggtgcacaagaggatccacactggagagaagccctatgaatgtgacatctgtgggaagaccttcagcaacagcagcggcctgcgggtgcacaagaggatccacactggagagaagccctatgaatgtgatgaatgtgggaaggccttcatcacctgcaggaccctgctgaaccacaagagcatccactttggagacaagccctacaagtgtgatgaatgtgagaagagcttcaactacagcagcctgctgatccagcacaaggtgatccacactggagagaagccctatgaatgtgatgaatgtgggaaggccttcaggaacagcagcggcctgattgtgcacaagaggatccacactggagagaagccctacaagtgtgatgtgtgtgggaaggccttctcctacagcagcggcctggccgtgcacaagagcatccaccctgggaagaaggcccacgagtgcaaggaatgtgggaagagcttctcctacaacagcctgctgctgcagcacaggaccatccacactggagagcggccctacgtgtgtgatgtgtgtgggaagaccttcagaaataatgccggcctgaaggtgcaccggcggctgcacactggagagaagccctacaagtgtgatgtgtgtgggaaggcctacatcagccgcagcagcctgaagaaccacaagggcatccacctgggggagaagccctacaagtgcagctactgtgagaagagcttcaactacagcagcgccctggagcagcacaagaggatccacacccgggagaagcccttcggctgtgatgaatgtgggaaggccttcaggaacaacagcggcctgaaggtgcacaagaggatccacactggagagcggccctacaagtgtgaagaatgtgggaaggcctacatcagcctgagcagcctcatcaaccacaagtctgtgcaccctggagagaagcccttcaagtgtgatgaatgtgagaaggccttcatcacctaccgcaccctgaccaaccacaagaaggtgcacctgggggagaagccctacaagtgtgatgtgtgtgagaagagcttcaactacaccagcctgctgagccagcaccggcgggtgcacacccgggagaagccctatgaatgtgacagatgtgagaaggtgttcaggaacaacagcagcctgaaggtgcacaagaggatccacactggagagcggccctatgaatgtgatgtgtgtgggaaggcctacatcagccacagcagcctcatcaaccacaagagcacccaccctggccgcaccccccacacctgtgatgaatgtgggaaggccttcttcagcagcaggaccctcatcagccacaagagggtgcacctgggggagaagcccttcaagtgtgtggagtgtgggaagagcttctcctacagcagcctgctgagccagcacaagaggatccacactggagagaagccctacgtgtgtgacagatgtgggaaggccttcaggaacagcagcggcctgactgtgcacaagaggatccacactggagagaagccctatgaatgtgatgaatgtgggaaggcctacatcagccacagcagcctcatcaaccacaagtctgtgcaccagggcaagcagccctacaactgtgaatgtgggaagagcttcaactacagatctgtgctggaccagcacaagaggatccacacaggcaagaagccctaccgctgcaatgaatgtgggaaggccttcaacatccgcagcaacctgaccaagcacaagaggacccacactggagaggagagcctgaatgtcatctacgtgggcagctacagcggcaccagccagaagaggacctatgaaggaggaaatgccctggatggcggccgcatgaggatgcccctgtag

SEQ ID NO: 176930 - DNA, 483 bp, synthetic construct
  misc_feature 1..483: note = Description of Artificial Sequence: Synthetic coding sequence
  source 1..483: mol_type = other DNA
atgcctgagagcaaggtgggggacacctgtgtgtgggacagcaaggtggagaaccagcagaagaagcctgtggagaacaggatgaaggaggacaagagcagcatccgggaggccatcagcaaggccaagagcacagccaacatcaagacagagcaggagggggaggccagcgagaagagcctgcacctgagcccccagcacatcacccaccagaccatgcccatcggccagaggggcagcgagcagggcaagagggtggagaacatcaatggcaccagctaccccagcctgcagcagaagaccaatgctgtgaagaagctgcacaagtgtgatgaatgtgggaagagcttcaagtacaacagccggctggtgcagcacaagatcatgcacactggagagaagagatatgaatgtgatgactgtggcggcaccttccgcagcagcagcagcctgcgggtgcacaagaggatccacactggatag

SEQ ID NO: 176931 - DNA, 315 bp, synthetic construct
  misc_feature 1..315: note = Description of Artificial Sequence: Synthetic coding sequence
  source 1..315: mol_type = other DNA
atgcctgagagcaaggtgggggacacctgtgtgtgggacagcaaggtggagaaccagcagaagaagcctgtggagaacaggatgaaggaggacaagagcagcatccgggaggccatcagcaaggccaagagcacagccaacatcaagacagagcaggagggggaggccagcgagaagagcctgcacctgagcccccagcacatcacccaccagaccatgcccatcggccagaggggcagcgagcagggcaagagggtggagaacatcaatggcaccagctaccccagcctgcagcagaagaccaatgctgtgtag

SEQ ID NO: 176932 - DNA, 237 bp, synthetic construct
  misc_feature 1..237: note = Description of Artificial Sequence: Synthetic coding sequence
  source 1..237: mol_type = other DNA
atgcctgagagcaaggtgggggacacctgtgtgtgggacagcaaggtggagaaccagcagaagaagcctgtggagaacaggatgaaggaggacaagagcagcatccgggaggccatcagcaaggccaagagcacagccaacatcaagacagagcaggagggggaggccagcgagaagagcctgcacctgagcccccagcacatcacccaccagaccatgcccatcggccagaggtag

SEQ ID NO: 176933 - DNA, 2604 bp, synthetic construct
  misc_feature 1..2604: note = Description of Artificial Sequence: Synthetic coding sequence
  source 1..2604: mol_type = other DNA
atgcctgagagcaaggtgggggacacctgtgtgtgggacagcaaggtggagaaccagcagaagaagcctgtggagaacaggatgaaggaggacaagagcagcatccgggaggccatcagcaaggccaagagcacagccaacatcaagacagagcaggagggggaggccagcgagaagagcctgcacctgagcccccagcacatcacccaccagaccatgcccatcggccagaggggcagcgagcagggcaagagggtggagaacatcaatggcaccagctaccccagcctgcagcagaagaccaatgctgtgaagaagctgcacaagtgtgatgaatgtgggaagagcttcaagtacaacagccggctggtgcagcacaagatcatgcacactggagagaagagatatgaatgtgatgactgtggcggcaccttccgcagcagcagcagcctgcgggtgcacaagaggatccacactggagagaagccctacaagtgtgaggagtgtgggaaggcctacatgagctacagcagcctcatcaaccacaagagcacccacagcggggagaagaactgcaagtgtgatgaatgtgggaagagcttcaactacagctctgtgctggaccagcacaagaggatccacactggagagaagccctatgaatgtggggagtgtgggaaggccttcaggaacagcagcggcctgcgggtgcacaagaggatccacactggagagaagccctatgaatgtgacatctgtgggaagaccttcagcaacagcagcggcctgcgggtgcacaagaggatccacactggagagaagccctatgaatgtgatgaatgtgggaaggccttcatcacctgcaggaccctgctgaaccacaagagcatccactttggagacaagccctacaagtgtgatgaatgtgagaagagcttcaactacagcagcctgctgatccagcacaaggtgatccacactggagagaagccctatgaatgtgatgaatgtgggaaggccttcaggaacagcagcggcctcatcgtgcacaagaggatccacactggagagaagccctacaagtgtgatgtgtgtgggaaggccttctcctacagcagcggcctggccgtgcacaagagcatccaccctgggaagaaggcccacgagtgcaaggaatgtgggaagagcttctcctacaacagcctgctgctgcagcacaggaccatccacactggagagcggccctacgtgtgtgatgtgtgtgggaagaccttcaggaacaatgccggcctgaaggtgcaccggcggctgcacactggagagaagccctacaagtgtgatgtgtgtgggaaggcctacatcagccgcagcagcctgaagaaccacaagggcatccacctgggggagaagccctacaagtgcagctactgtgagaagagcttcaactacagcagcgccctggagcagcacaagaggatccacacccgggagaagcccttcggctgtgatgaatgtgggaaggccttcaggaacaacagcggcctgaaggtgcacaagaggatccacactggagagcggccctacaagtgtgaggagtgtgggaaggcctacatcagcctgagcagcctcatcaaccacaagtctgtgcaccctggagagaagcccttcaagtgtgatgaatgtgagaaggccttcatcacctaccgcaccctgaccaaccacaagaaggtgcacctgggggagaagccctacaagtgtgatgtgtgtgagaagagcttcaactacaccagcctgctgagccagcacagaagagtgcacacccgggagaagccctatgaatgtgacagatgtgagaaggtgttcaggaacaacagcagcctgaaggtgcacaagaggatccacactggagagcggccctatgaatgtgatgtgtgtgggaaggcctacatcagccacagcagcctcatcaaccacaagagcacccaccctggccgcaccccccacacctgtgatgaatgtgggaaggccttcttcagcagcaggaccctcatcagccacaagagggtgcacctgggggagaagcccttcaagtgtgtggagtgtgggaagagcttctcctacagcagcctgctgagccagcacaagaggatccacactggagagaagccctacgtgtgtgacagatgtgggaaggccttcaggaacagcagcggcctgactgtgcacaagaggatccacactggagagaagccctatgaatgtgatgaatgtgggaaggcctacatcagccacagcagcctcatcaaccacaagtctgtgcaccagggcaagcagccctacaactgtgaatgtgggaagagcttcaactacagatctgtgctggaccagcacaagaggatccacacaggcaagaagccctaccgctgcaatgaatgtgggaaggccttcaacatccgcagcaacctgaccaagcacaagaggacccacactggagaggagagcctgaatgtcatctacgtgggcagctacagcggcaccagccagaagaggacctatgagggcggcaatgccctggatggcggccgcatgaggatgcccctgtag

SEQ ID NO: 176934 - DNA, 1386 bp, synthetic construct
  misc_feature 1..1386: note = Description of Artificial Sequence: Synthetic coding sequence
  source 1..1386: mol_type = other DNA
atggattctgtggcctttgaagatgtggccgtgaacttcaccctggaggagtgggccctgctggaccccagccagaagaacctgtacagagatgtgatgagggagaccttcaggaacctggcctctgtgggcaagcagtgggaggaccagaacatcgaggaccccttcaagatccccaggaggaacatcagccacatccctgagcggctgtgtgagagcaaggagggcggccagggcgaggagaccttcagccagatcccagatggcatcctgaacaagaagaccccaggagtgaagccctgtgagagctctgtgtgtggggaggtgggcatgggccccagcagcctgaacagacacatccgggaccacacaggccgggagcccaatgagtaccaggagtatggcaagaagagctacaccaggaaccagtgtggccgggccctgagctaccaccgctccttccctgtgcgggagaggacccaccctgggggcaagccctatgactgcaaggaatgtggggagaccttcatcagcctggtgtccatcagaagacacatgctgacccacagaggaggagtgccctacaagtgcaaggtgtgtgggaaggcctttgactaccccagcctcttccgcatccacgagaggagccacactggagagaagccctatgagtgcaagcagtgtgggaaggccttcagctgcagcagctacatccgcatccacgagaggacccacactggagacaagccctatgagtgcaagcagtgtgggaaggccttcagctgcagcaagtacatccgcatccacgagaggacccacactggagagaagccctatgagtgcaagcagtgtgggaaggccttccgctgtgccagctctgtgcgcagccatgagaggacccacactggagagaagctgtttgagtgcaaggaatgtgggaaggccctgacctgcctggcctctgtgagaagacacatgatcaagcacactggaaatggcccctacaagtgcaaggtgtgtgggaaggcctttgacttccccagcagcttccgcatccacgagaggacccacactggagagaagccctatgactgcaagcagtgtgggaaggccttcagctgcagcagcagcttcaggaagcatgagcgcatccacactggagagaagccctacaagtgcaccaagtgtgggaaggccttcagccgcagcagctacttccgcatccacgagaggacccacactggagagaagccctatgagtgcaagcagtgtgggaaggccttcagccgcagcacctacttccgggtgcatgagaagatccacactggagagaagccctatgagaaccccaaccccaatgcctctgtggtgcctgtgctgtcctag

SEQ ID NO: 176935 - DNA, 3168 bp, synthetic construct
  misc_feature 1..3168: note = Description of Artificial Sequence: Synthetic coding sequence
  source 1..3168: mol_type = other DNA
atggtgggcagccacgccgacatggccccagccagcacagctgagggcgctggggagaagccaggccctgctgccccagccccagctgcccagtatgaatgtggggagtgtgggaagagcttccgctggagcagccggctgctgcaccaccagaggacccacactggagagcggccctacaagtgcccagactgccccaaggccttcaagggcagcagcgccctgctgtaccaccagaggggccacactggagagcggccctaccagtgcccagactgccccaaggccttcaagaggagcagcctgctgcagatccacaggtctgtgcacacaggcctgcgggccttcatctgtggccagtgtggcctggccttcaagtggagcagccactaccagtaccacctgcggcagcacactggagagcggccctacccctgcccagactgccccaaggccttcaagaacagcagcagcctgcggcggcaccgccacgtgcacactggagagcggccctacacctgtggggtgtgtgggaagagcttcacccagagcaccaacctgcggcagcaccagagggtgcacactggagagcggcccttccgctgccccctgtgccccaagaccttcacccacagcagcaacctgctgctgcaccagaggacccacggggccgccccagcccctggaacagccagcgctgcccccccaccccagagccgggagcccgggaaggtgtttgtgtgtgatgcctacctgcagaggcacctgcagccccacagccccccagcccccccagcccctcctcctcctcctcctcctgtggtgcctgagctgttcctggccgctgctgagaccaccgtggagctggtgtaccgctgtgatggctgtgagcagggcttcagcagcgaggagctgctgctggagcaccagccctgccccggcccagatgctgccccccagccccaggaggccccagctgaggcccccaaggctgaccagccccccagccccctgccccagcccccacctcctgctgctgccccagcccctggctttgcctgcctgccctgtgggaagagcttcagaacagtggccggcctgagccgccaccagcacagccacggggctgctgggggccaggccttccgctgtggcagctgtgatggcagcttcccccagctggccagcctgctggcccaccagcagtgccacgtggaggaggccgccgccggccggcccccaccccaggccgaggccgctgaggtgacctgcccccaggagcccctggccccagctgcccctgtgcccccacctcctccttctgccccagccagcgctgagcggccctacaagtgtgccgagtgtgggaagagcttcaagggcagcagcggcctgcgctaccacctgcgggaccacactggagagcggccctaccagtgtggggagtgtgggaaggccttcaagaggagcagcctgctggccatccaccagagggtgcacacaggcctgcgggccttcacctgtggccagtgtggcctgaccttcaagtggagcagccactaccagtaccacctgcggctgcacagcggggagcggccctatgcctgtggggagtgtgggaaggccttcaggaacaccagctgcctgcggcggcaccgccacgtgcacactggagagcggccccacgcctgtggggtgtgtgggaagagctttgcccagaccagcaacctgcggcagcaccagagggtgcacactggagagcggcccttccgctgccccctgtgccccaagaccttcacccacagcagcaacctgctgctgcaccagaggacccacagcgctgagcggcccttcacctgccccatctgtggccggggctttgtgatggccgcctacctgcagaggcacctgcggacccacgccccagccaacaccccacccagcaccacagccccagctgctggcccccagcccccagcccccctggccgccgcccgggcccccccagccacccaggatgtgcacgtgctgccccacctgcaggccaccctgagcctggaggtggccggcggcacagcccaggcccccagcctgggccctgctgcccccaacagccagaccttcctgctggtgcagacagcccagggcctgcagctgatccccagctctgtgcagccccccaccccacctcctcctccagccccacccaagctgatcctgctgcccagcagcagcgctggggccggcggcggccgggcccggcagggccccagggctgtgggcaaggccggccagggcgccggcgtggtgtggctgcccggccctgggggcctgggcgtgcagggcgccgccagcgctggggccagcggcaccggccagagcctcatcgtgctgcagaatgtgggcggcggggaggccggcccccaggagatgtctggagtgcagctgcagcccctgcggcctgcccctgaggtgaccaccgtgcagctgcagcctgcccaggaggtgaccaccgtgcagctgcagcctgcccaggaggtgaccaccgtgcagctgcagcctgcccaggaggtgaccaccgtgcagctgcagcctgtggccggccagctgagcaacagcagcggcggcgctgtggccacagaggcccccaacctgctggtggtgcagagcggggctgctgaggagctgctgaccggccctggccctggagaggccggagatggagaggccagcactggagtggtgcaggatgtgctgtttgagaccctgcagacagatgagggcctgcagagcgtgctggtgctgagcggggctgatggagagcagacccggctgtgtgtgcaggaggtggagaccctgcccccaggcctgacagagcccccagccactggacctcctggccagaagctgctgatcatccgcagcgccccagccacagagctgctggacagcagcaacacaggaggcggcacagccaccctgcagctgctggcccccccacccagcggccctgccagcggccctgctggcctgcccggggccccagccagccagatggtgcaggtggtgcctgctggagctggccctggggtgatgaccccccagggcctgcccagcatccagatcgtgcagaccctgcctgctgtgcagctggtgcacaccttctag

SEQ ID NO: 176936 - DNA, 1602 bp, synthetic construct
  misc_feature 1..1602: note = Description of Artificial Sequence: Synthetic coding sequence
  source 1..1602: mol_type = other DNA
atggaccgctaccagggcaaccaggacagagtgctgcggcaggtgaccgtcatcagccgggagaccctgacagatgagatgggcagcaagtacagcgccttcggcaagatgttcaaccgctgcacagacctggcccccctgagccagaagttccacaagtttgacagctgtgagaacagcctgaagagcaacagcgacctgctgaactacaacagaagctatgccaggaagaaccccaccaagcgcttccgctgtggccggccccccaagtacaatgccagctgcagcgtgcctgagaaggagggcttcatccacacaggcatggagccctatggagacagccagtgtgagaaggtgctgagccacaagcaggcccacgtgcagtacaagaagttccaggcccgggagaagcccaacgtgtgcagcatgtgtgggaaggccttcatcaagaagagccagctgatcatccaccagaggatccacactggagagaagccctacgtgtgtggggactgcaggaaggccttcagcgagaagagccacctgattgtgcaccagaggatccacactggagagaagccctatgagtgcaccaagtatggccgggccttcagcaggaagagccccttcaccgtgcaccagagggtgcacactggagagaagccctatgagtgctttgaatgtcccaaggccttcagccagaagagccacctgatcatccaccagagggtgcacacccgggagaagccctttgagtgcagtgaatgtaggaaggccttctgtgagatgagccacctgttcatccaccagatcacccacacaggcaagaagccctatgagtgcacagaatgtgggaagaccttccccaggaagacccagctgatcatccaccagaggacccacactggagagaagccctacaagtgtggagaatgtgggaagaccttctgccagcagagccacctgattggccaccagaggatccacactggagagaagccctacgtgtgcacagactgtgggaaggccttcagccagaagagccacctgaccggccaccagaggctgcacactggagagaagccctacatgtgcacagaatgtgggaagagcttcagccagaagagccccctcatcatccaccagaggatccacactggagagaagccctaccagtgtggagaatgtgggaagaccttcagccagaagagcctgctgatcatccacctgcgggtgcacactggagagaagccctatgagtgcacagaatgtggccgggccttcagcctgaagagccacctgatcctgcaccagaggggccacactggagagaagccctatgagtgcagtgaatgtgggaaggccttctgtgggaagagccccctcatcatccaccagaagacccacccccgggagaagaccccagaatgtgccgagagcggcatgaccttcttctggaagagccagatgatcacctaccagaggaggcacactggagagaagcccagccgctgcagcgactgtgggaaggccttctgccagcacgtgtacttcaccggccaccagaacccctacaggaaggacaccctgtacatctgctag

SEQ ID NO: 176937 - DNA, 1974 bp, synthetic construct
  misc_feature 1..1974: note = Description of Artificial Sequence: Synthetic coding sequence
  source 1..1974: mol_type = other DNA
atgattgagagccaggagcctgtgacctttgaagatgtggccgtggacttcacccaggaggagtggcagcagctgaacccagcccagaagaccctgcacagagatgtgatgctggagacctacaaccacctggtgtctgtgggctgcagcggcatcaagccagatgtgatcttcaagctggagcacggcaaggacccctggatcattgaaagtgagctgagccgctggatctacccagacagagtgaagggcctggagagcagccagcagatcatctctggagagctgctcttccagcgggagatcctggagcgggcccccaaggacaacagcctgtacagcgtgctgaagatctggcacatcgacaaccagatggaccgctaccagggcaaccaggacagagtgctgcggcaggtgaccgtcatcagccgggagaccctgacagatgagatgggcagcaagtacagcgccttcggcaagatgttcaaccgctgcacagacctggcccccctgagccagaagttccacaagtttgacagctgtgagaacagcctgaagagcaacagcgacctgctgaactacaacagaagctatgccaggaagaaccccaccaagcgcttccgctgtggccggccccccaagtacaatgccagctgcagcgtgcctgagaaggagggcttcatccacacaggcatggagccctatggagacagccagtgtgagaaggtgctgagccacaagcaggcccacgtgcagtacaagaagttccaggcccgggagaagcccaacgtgtgcagcatgtgtgggaaggccttcatcaagaagagccagctgatcatccaccagaggatccacactggagagaagccctacgtgtgtggggactgcaggaaggccttcagcgagaagagccacctgattgtgcaccagaggatccacactggagagaagccctatgagtgcaccaagtatggccgggccttcagcaggaagagccccttcaccgtgcaccagagggtgcacactggagagaagccctatgagtgctttgaatgtcccaaggccttcagccagaagagccacctgatcatccaccagagggtgcacacccgggagaagccctttgagtgcagtgaatgtaggaaggccttctgtgagatgagccacctgttcatccaccagatcacccacacaggcaagaagccctatgagtgcacagaatgtgggaagaccttccccaggaagacccagctgatcatccaccagaggacccacactggagagaagccctacaagtgtggagaatgtgggaagaccttctgccagcagagccacctgattggccaccagaggatccacactggagagaagccctacgtgtgcacagactgtgggaaggccttcagccagaagagccacctgaccggccaccagaggctgcacactggagagaagccctacatgtgcacagaatgtgggaagagcttcagccagaagagccccctcatcatccaccagaggatccacactggagagaagccctaccagtgtggagaatgtgggaagaccttcagccagaagagcctgctgatcatccacctgcgggtgcacactggagagaagccctatgagtgcacagaatgtggccgggccttcagcctgaagagccacctgatcctgcaccagaggggccacactggagagaagccctatgagtgcagtgaatgtgggaaggccttctgtgggaagagccccctcatcatccaccagaagacccacccccgggagaagaccccagaatgtgccgagagcggcatgaccttcttctggaagagccagatgatcacctaccagaggaggcacactggagagaagcccagccgctgcagcgactgtgggaaggccttctgccagcacgtgtacttcaccggccaccagaacccctacaggaaggacaccctgtacatctgctag

SEQ ID NO: 176938 - DNA, 645 bp, synthetic construct
  misc_feature 1..645: note = Description of Artificial Sequence: Synthetic coding sequence
  source 1..645: mol_type = other DNA
atgattgagagccaggagcctgtgacctttgaagatgtggccgtggacttcacccaggaggagtggcagcagctgaacccagcccagaagaccctgcacagagatgtgatgctggagacctacaaccacctggtgtctgtgggctgcagcggcatcaagccagatgtgatcttcaagctggagcacggcaaggacccctggatcattgaaagtgagctgagccgctggatctacccagacagagtgaagggcctggagagcagccagcagatcatctctggagagctgctcttccagcgggagatcctggagcgggcccccaaggacaacagcctgtacagcgtgctgaagatctggcacatcgacaaccagatggaccgctaccagggcaaccaggacagagtgctgcggcaggtgaccgtcatcagccgggagaccctgacagatgagatgggcagcaagtacagcgccttcggcaagatgttcaaccgctgcacagacctggcccccctgagccagaagttccacaagtttgacagctgtgagaacagcctgaagagcaacagcgacctgctgaactacaacagaagctatgccaggaagaaccccaccaagcgcttccgctgtggccggccccccaagtag

SEQ ID NO: 176939 - DNA, 1932 bp, synthetic construct
  misc_feature 1..1932: note = Description of Artificial Sequence: Synthetic coding sequence
  source 1..1932: mol_type = other DNA
atgattgagagccaggaggagtggcagcagctgaacccagcccagaagaccctgcacagagatgtgatgctggagacctacaaccacctggtgtctgtgggctgcagcggcatcaagccagatgtgatcttcaagctggagcacggcaaggacccctggatcattgaaagtgagctgagccgctggatctacccagacagagtgaagggcctggagagcagccagcagatcatctctggagagctgctcttccagcgggagatcctggagcgggcccccaaggacaacagcctgtacagcgtgctgaagatctggcacatcgacaaccagatggaccgctaccagggcaaccaggacagagtgctgcggcaggtgaccgtcatcagccgggagaccctgacagatgagatgggcagcaagtacagcgccttcggcaagatgttcaaccgctgcacagacctggcccccctgagccagaagttccacaagtttgacagctgtgagaacagcctgaagagcaacagcgacctgctgaactacaacagaagctatgccaggaagaaccccaccaagcgcttccgctgtggccggccccccaagtacaatgccagctgcagcgtgcctgagaaggagggcttcatccacacaggcatggagccctatggagacagccagtgtgagaaggtgctgagccacaagcaggcccacgtgcagtacaagaagttccaggcccgggagaagcccaacgtgtgcagcatgtgtgggaaggccttcatcaagaagagccagctgatcatccaccagaggatccacactggagagaagccctacgtgtgtggggactgcaggaaggccttcagcgagaagagccacctgattgtgcaccagaggatccacactggagagaagccctatgagtgcaccaagtatggccgggccttcagcaggaagagccccttcaccgtgcaccagagggtgcacactggagagaagccctatgagtgctttgaatgtcccaaggccttcagccagaagagccacctgatcatccaccagagggtgcacacccgggagaagccctttgagtgcagtgaatgtaggaaggccttctgtgagatgagccacctgttcatccaccagatcacccacacaggcaagaagccctatgagtgcacagaatgtgggaagaccttccccaggaagacccagctgatcatccaccagaggacccacactggagagaagccctacaagtgtggagaatgtgggaagaccttctgccagcagagccacctgattggccaccagaggatccacactggagagaagccctacgtgtgcacagactgtgggaaggccttcagccagaagagccacctgaccggccaccagaggctgcacactggagagaagccctacatgtgcacagaatgtgggaagagcttcagccagaagagccccctcatcatccaccagaggatccacactggagagaagccctaccagtgtggagaatgtgggaagaccttcagccagaagagcctgctgatcatccacctgcgggtgcacactggagagaagccctatgagtgcacagaatgtggccgggccttcagcctgaagagccacctgatcctgcaccagaggggccacactggagagaagccctatgagtgcagtgaatgtgggaaggccttctgtgggaagagccccctcatcatccaccagaagacccacccccgggagaagaccccagaatgtgccgagagcggcatgaccttcttctggaagagccagatgatcacctaccagaggaggcacactggagagaagcccagccgctgcagcgactgtgggaaggccttctgccagcacgtgtacttcaccggccaccagaacccctacaggaaggacaccctgtacatctgctag

SEQ ID NO: 176940 - DNA, 5937 bp, synthetic construct
  misc_feature 1..5937: note = Description of Artificial Sequence: Synthetic coding sequence
  source 1..5937: mol_type = other DNA
atgagccggccccgcttcaaccccaggggggacttccccctgcagaggccccgggcccccaaccccagcggcatgaggcctcctggccccttcatgaggcctggctccatgggcctgccccgcttctacccagctggccgggcccggggcatcccccacagatttgctggccacgagagctaccagaacatgggcccccagaggatgaatgtgcaggtgacccagcacaggacagacccccggctgaccaaggagaagctggacttccacgaggcccagcagaagaagggcaagccccacggcagccgctgggatgatgagccccacatcagcgcctctgtggccgtgaagcagagctctgtgacccaggtgacagagcagagccccaaggtgcagagccgctacaccaaggagagcgccagcagcatcctggccagctttggcctgagcaatgaagacctggaggagctgagccgctacccagatgagcagctgaccccagagaacatgcccctcatcctgcgggacatccgcatgaggaagatgggccggcggctgcccaacctgcccagccagagcaggaacaaggagaccctgggcagcgaggccgtgagcagcaatgtgattgattatggccacgccagcaaatatggctacacagaggaccccctggaggtgcgcatctatgaccctgagatccccacagatgaggtggagaatgagttccagagccagcagaacatcagcgcctctgtgcccaaccccaacgtcatctgcaacagcatgtttcctgtggaggatgtgttccggcagatggacttccctggagagagcagcaacaacagaagcttcttctctgtggagagcggcaccaagatgagcggcctgcacatcagcggcggccagagcgtgctggagcccatcaagtctgtgaaccagagcatcaaccagacagtgtcccagaccatgagccagagcctcatccccccatccatgaaccagcagcccttcagcagcgagctgatcagctctgtgtcccagcaggagcgcatcccccatgagcctgtgatcaacagcagcaatgtgcacgtgggcagccggggcagcaagaagaactaccagagccaggccgacatccccatccgcagcccctttggaattgtgaaggcctcctggctgcccaagttcagccatgctgatgcccagaagatgaagaggctgcccacccccagcatgatgaatgactactatgctgccagcccccgcatcttcccccacctgtgcagcctgtgcaatgtggagtgcagccacctgaaggactggatccagcaccagaacaccagcacccacatcgagagctgccggcagctgcggcagcagtacccagactggaaccctgagatcctgcccagcagaagaaatgaaggcaacagaaaagaaaatgagaccccaagaagaagaagccacagccccagcccccggcgcagcagaagaagcagcagcagccaccgcttccgccgcagccgcagccccatgcactacatgtaccggcccaggagccgcagcccccgcatctgccaccgcttcatcagccgctaccgcagccgcagccgcagccgcagcccctaccgcatccggaaccccttccggggcagccccaagtgcttccgctctgtgtccccagagaggatgagccgccgctctgtgcgcagcagtgacaggaagaaggccctggaggatgtggtgcagaggagcggccatggaacagagttcaacaagcagaagcacctggaggccgctgacaagggccacagccctgcccagaagcccaagaccagcagcggcaccaagcccagcgtgaagcccaccagcgccaccaagagtgacagcaacctgggcggccacagcatccgctgcaagagcaagaacctggaggatgacaccctgtctgagtgcaagcaggtgtctgacaaggctgtgtccctgcagaggaagctgaggaaggagcagagcctgcactacggctctgtgctgctgatcacagagctgcctgaagatggctgcacagaagaagatgtgaggaagctgttccagccctttgggaaggtgaatgatgtgctgattgtgccctacaggaaggaggcctacctggagatggagttcaaggaggccatcacagccatcatgaagtacatcgagaccacccccctgaccatcaagggcaagtctgtgaagatctgtgtgcctgggaagaagaaggcccagaacaaggaggtgaagaagaagaccctggagagcaagaaggtgtctgccagcaccctgaagagagatgctgatgccagcaaggctgtggagatcgtgaccagcaccagcgctgccaagacaggccaggccaaggcctctgtggccaaggtgaacaagagcacaggcaagagcgccagctctgtgaagtctgtggtgacagtggccgtgaagggcaacaaggccagcatcaagacagccaagagcggcggcaagaagagcctggaggccaagaagacaggaaatgtgaagaacaaggacagcaacaagcctgtgaccatcccagaaaattctgagatcaagaccagcattgaggtgaaggccacagagaactgtgccaaggaggccatcagtgatgctgccctggaggccacagaaaatgagcccctgaacaaggagacagaggagatgtgtgtgatgctggtgagcaacctgcccaacaagggctacagcgtggaggaggtgtatgacctggccaagccctttggaggcctgaaggacatcctgatcctgagcagccacaagaaggcctacatcgagatcaacaggaaggctgctgagagcatggtgaagttctacacctgcttccctgtgctgatggatggcaaccagctgagcatctccatggcccctgagaacatgaacatcaaggatgaggaggccatcttcatcaccctggtgaaggaaaatgaccctgaggccaacatcgacaccatctatgacagatttgtgcacctggacaacctgcctgaagatggcctgcagtgtgtgctgtgtgtgggcctgcagtttgggaaggtggaccaccacgtgttcatcagcaacagaaacaaggccatcctgcagctggacagccctgagagcgcccagagcatgtacagcttcctgaagcagaacccccagaacatcggggaccacatgctgacctgcagcctgagccccaagattgacctgcctgaggtgcagatcgagcatgaccctgagctggagaaggagagccctggcctgaagaacagccccattgatgaaagtgaggtgcagacagccacagacagccccagcgtgaagcccaatgagctggaggaggagagcacccccagcatccagacagagaccctggtgcagcaggaggagccctgtgaggaggaggccgagaaggccacctgtgacagcgactttgctgtggagaccctggagctggagacccagggcgaggaggtgaaggaggagatccccctggtggccagcgcctctgtgtccattgagcagttcacagaaaatgcagaagaatgtgccctgaaccagcagatgttcaacagcgacctggagaagaagggagctgagatcatcaaccccaagacagccctgctgcccagcgacagcgtgtttgctgaggagaggaacctgaagggcatcctggaggagagccccagcgaggccgaggacttcatcagcggcatcacccagaccatggtggaggccgtggccgaggtggagaagaatgagaccgtgtctgagatcctgcccagcacctgcatcgtgaccctggtgcccggcatccccactggagatgagaagacagtggacaagaagaacatcagcgagaagaagggcaacatggatgagaaggaggagaaggagttcaacaccaaggagaccaggatggacctgcagatcggcacagagaaggccgagaagaatgaaggaaggatggatgctgagaaggtggagaagatggccgccatgaaggagaagccagctgagaacaccctcttcaaggcctaccccaacaagggcgtgggccaggccaacaagccagatgagaccagcaagaccagcatcctggccgtgtctgatgtgagcagcagcaagcccagcatcaaggccgtcatcgtgagcagccccaaggccaaggccaccgtgtccaagacagagaaccagaagagcttccccaagtctgtgccccgggaccagatcaatgctgagaagaagctgagcgccaaggagtttggcctgctgaagcccaccagcgcccggagcggcctggccgagagcagcagcaagttcaagcccacccagagcagcctgacccggggcggcagcggccgcatcagcgccctgcagggcaagctgagcaagctggactacagagacatcaccaagcagagccaggagacagaggcccggcccagcatcatgaagagagatgacagcaacaacaagaccctggccgagcagaacaccaagaaccccaagagcaccaccggccgcagcagcaagagcaaggaggagcccctcttccccttcaacctggatgaatttgtgacagtggatgaagtcatcgaggaggtgaaccccagccaggccaagcagaaccccctgaagggcaagaggaaggagaccctgaagaatgtgcccttcagcgagctgaacctgaagaagaagaagggcaagaccagcaccccccggggcgtggagggggagctgagctttgtgaccctggatgagatcggggaggaggaggatgctgctgcccacctggcccaggccctggtgacagtggatgaggtgattgatgaggaggagctgaacatggaggagatggtgaagaacagcaacagcctcttcaccctggatgagctgattgaccaggatgactgcatcagccacagcgagcccaaggatgtgacagtgctgtctgtggccgaggagcaggacctgctgaagcaggagcggctggtgacagtggatgagatcggggaggtggaggagctgcccctgaatgaatctgctgacatcacctttgccaccctgaacaccaagggaaatgaaggagacacagtgcgggacagcatcggcttcatcagcagccaggtgcctgaggaccccagcaccctggtgacagtggatgagatccaggatgacagcagtgacctgcacctggtgaccctggatgaggtgacagaagaagatgaggacagcctggccgacttcaacaacctgaaggaggagctgaactttgtgacagtggatgaggtgggggaggaggaggatggagacaatgacctgaaggtggagctggcccagagcaagaatgaccaccccacagacaagaagggcaacaggaagaagagagctgtggacaccaagaagaccaagctggagagcctgagccaggtgggccctgtgaatgaaaatgtgatggaggaggacctgaagaccatgattgagcggcacctgacagccaagacccccaccaagagggtgcgcatcggcaagaccctgcccagcgagaaggctgtggtgacagagcccgccaagggggaggaggccttccagatgtctgaggtggatgaggagagcggcctgaaggacagcgagcctgagaggaagaggaagaagacagaggacagcagcagcggcaagtctgtggccagtgatgtgcctgaggagctggacttcctggtgcccaaggccggcttcttctgccccatctgcagcctcttctacagcggggagaaggccatgaccaaccactgcaagagcaccaggcacaagcagaacacagagaagttcatggccaagcagaggaaggagaaggagcagaatgaggccgaggagaggagcagcaggtag

SEQ ID NO: 176941 - DNA, 3420 bp, synthetic construct
  misc_feature 1..3420: note = Description of Artificial Sequence: Synthetic coding sequence
  source 1..3420: mol_type = other DNA
atgagccggccccgcttcaaccccaggggggacttccccctgcagaggccccgggcccccaaccccagcggcatgaggcctcctggccccttcatgaggcctggctccatgggcctgccccgcttctacccagctggccgggcccggggcatcccccacagatttgctggccacgagagctaccagaacatgggcccccagaggatgaatgtgcaggtgacccagcacaggacagacccccggctgaccaaggagaagctggacttccacgaggcccagcagaagaagggcaagccccacggcagccgctgggatgatgagccccacatcagcgcctctgtggccgtgaagcagagctctgtgacccaggtgacagagcagagccccaaggtgcagagccgctacaccaaggagagcgccagcagcatcctggccagctttggcctgagcaatgaagacctggaggagctgagccgctacccagatgagcagctgaccccagagaacatgcccctcatcctgcgggacatccgcatgaggaagatgggccggcggctgcccaacctgcccagccagagcaggaacaaggagaccctgggcagcgaggccgtgagcagcaatgtgattgattatggccacgccagcaaatatggctacacagaggaccccctggaggtgcgcatctatgaccctgagatccccacagatgaggtggagaatgagttccagagccagcagaacatcagcgcctctgtgcccaaccccaacgtcatctgcaacagcatgtttcctgtggaggatgtgttccggcagatggacttccctggagagagcagcaacaacagaagcttcttctctgtggagagcggcaccaagatgagcggcctgcacatcagcggcggccagagcgtgctggagcccatcaagtctgtgaaccagagcatcaaccagacagtgtcccagaccatgagccagagcctcatccccccatccatgaaccagcagcccttcagcagcgagctgatcagctctgtgtcccagcaggagcgcatcccccatgagcctgtgatcaacagcagcaatgtgcacgtgggcagccggggcagcaagaagaactaccagagccaggccgacatccccatccgcagcccctttggaattgtgaaggcctcctggctgcccaagttcagccatgctgatgcccagaagatgaagaggctgcccacccccagcatgatgaatgactactatgctgccagcccccgcatcttcccccacctgtgcagcctgtgcaatgtggagtgcagccacctgaaggactggatccagcaccagaacaccagcacccacatcgagagctgccggcagctgcggcagcagtacccagactggaaccctgagatcctgcccagcagaagaaatgaaggcaacagaaaagaaaatgagaccccaagaagaagaagccacagccccagcccccggcgcagcagaagaagcagcagcagccaccgcttccgccgcagccgcagccccatgcactacatgtaccggcccaggagccgcagcccccgcatctgccaccgcttcatcagccgctaccgcagccgcagccgcagccgcagcccctaccgcatccggaaccccttccggggcagccccaagtgcttccgctctgtgtccccagagaggatgagccgccgctctgtgcgcagcagtgacaggaagaaggccctggaggatgtggtgcagaggagcggccatggaacagagttcaacaagcagaagcacctggaggccgctgacaagggccacagccctgcccagaagcccaagaccagcagcggcaccaagcccagcgtgaagcccaccagcgccaccaagagtgacagcaacctgggcggccacagcatccgctgcaagagcaagaacctggaggatgacaccctgtctgagtgcaagcaggtgtctgacaaggctgtgtccctgcagaggaagctgaggaaggagcagagcctgcactacggctctgtgctgctgatcacagagctgcctgaagatggctgcacagaagaagatgtgaggaagctgttccagccctttgggaaggtgaatgatgtgctgattgtgccctacaggaaggaggcctacctggagatggagttcaaggaggccatcacagccatcatgaagtacatcgagaccacccccctgaccatcaagggcaagtctgtgaagatctgtgtgcctgggaagaagaaggcccagaacaaggaggtgaagaagaagaccctggagagcaagaaggtgtctgccagcaccctgaagagagatgctgatgccagcaaggctgtggagatcgtgaccagcaccagcgctgccaagacaggccaggccaaggcctctgtggccaaggtgaacaagagcacaggcaagagcgccagctctgtgaagtctgtggtgacagtggccgtgaagggcaacaaggccagcatcaagacagccaagagcggcggcaagaagagcctggaggccaagaagacaggaaatgtgaagaacaaggacagcaacaagcctgtgaccatcccagaaaattctgagatcaagaccagcattgaggtgaaggccacagagaactgtgccaaggaggccatcagtgatgctgccctggaggccacagaaaatgagcccctgaacaaggagacagaggagatgtgtgtgatgctggtgagcaacctgcccaacaagggctacagcgtggaggaggtgtatgacctggccaagccctttggaggcctgaaggacatcctgatcctgagcagccacaagaaggcctacatcgagatcaacaggaaggctgctgagagcatggtgaagttctacacctgcttccctgtgctgatggatggcaaccagctgagcatctccatggcccctgagaacatgaacatcaaggatgaggaggccatcttcatcaccctggtgaaggaaaatgaccctgaggccaacatcgacaccatctatgacagatttgtgcacctggacaacctgcctgaagatggcctgcagtgtgtgctgtgtgtgggcctgcagtttgggaaggtggaccaccacgtgttcatcagcaacagaaacaaggccatcctgcagctggacagccctgagagcgcccagagcatgtacagcttcctgaagcagaacccccagaacatcggggaccacatgctgacctgcagcctgagccccaagattgacctgcctgaggtgcagatcgagcatgaccctgagctggagaaggagcggctgtggctgagcaagaccctgcgcatcctgaaggccctgctggtggaggtgcccaacctgaagaggagccactacttccacctgatctggatgaacctgctgctgtggatgaggctgtag

SEQ ID NO: 176942 - DNA, 2445 bp, synthetic construct
  misc_feature 1..2445: note = Description of Artificial Sequence: Synthetic coding sequence
  source 1..2445: mol_type = other DNA
atgagccggccccgcttcaaccccaggggggacttccccctgcagaggccccgggcccccaaccccagcggcatgaggcctcctggccccttcatgaggcctggctccatgggcctgccccgcttctacccagctggccgggcccggggcatcccccacagatttgctggccacgagagctaccagaacatgggcccccagaggatgaatgtgcaggtgacccagcacaggacagacccccggctgaccaaggagaagctggacttccacgaggcccagcagaagaagggcaagccccacggcagccgctgggatgatgagccccacatcagcgcctctgtggccgtgaagcagagctctgtgacccaggtgacagagcagagccccaaggtgcagagccgctacaccaaggagagcgccagcagcatcctggccagctttggcctgagcaatgaagacctggaggagctgagccgctacccagatgagcagctgaccccagagaacatgcccctcatcctgcgggacatccgcatgaggaagatgggccggcggctgcccaacctgcccagccagagcaggaacaaggagaccctgggcagcgaggccgtgagcagcaatgtgattgattatggccacgccagcaaatatggctacacagaggaccccctggaggtgcgcatctatgaccctgagatccccacagatgaggtggagaatgagttccagagccagcagaacatcagcgcctctgtgcccaaccccaacgtcatctgcaacagcatgtttcctgtggaggatgtgttccggcagatggacttccctggagagagcagcaacaacagaagcttcttctctgtggagagcggcaccaagatgagcggcctgcacatcagcggcggccagagcgtgctggagcccatcaagtctgtgaaccagagcatcaaccagacagtgtcccagaccatgagccagagcctcatccccccatccatgaaccagcagcccttcagcagcgagctgatcagctctgtgtcccagcaggagcgcatcccccatgagcctgtgatcaacagcagcaatgtgcacgtgggcagccggggcagcaagaagaactaccagagccaggccgacatccccatccgcagcccctttggaattgtgaaggcctcctggctgcccaagttcagccatgctgatgcccagaagatgaagaggctgcccacccccagcatgatgaatgactactatgctgccagcccccgcatcttcccccacctgtgcagcctgtgcaatgtggagtgcagccacctgaaggactggatccagcaccagaacaccagcacccacatcgagagctgccggcagctgcggcagcagtacccagactggaaccctgagatcctgcccagcagaagaaatgaaggcaacagaaaagaaaatgagaccccaagaagaagaagccacagccccagcccccggcgcagcagaagaagcagcagcagccaccgcttccgccgcagccgcagccccatgcactacatgtaccggcccaggagccgcagcccccgcatctgccaccgcttcatcagccgctaccgcagccgcagccgcagccgcagcccctaccgcatccggaaccccttccggggcagccccaagtgcttccgctctgtgtccccagagaggatgagccgccgctctgtgcgcagcagtgacaggaagaaggccctggaggatgtggtgcagaggagcggccatggaacagagttcaacaagcagaagcacctggaggccgctgacaagggccacagccctgcccagaagcccaagaccagcagcggcaccaagcccagcgtgaagcccaccagcgccaccaagagtgacagcaacctgggcggccacagcatccgctgcaagagcaagaacctggaggatgacaccctgtctgagtgcaagcaggtgtctgacaaggctgtgtccctgcagaggaagctgaggaaggagcagagcctgcactacggctctgtgctgctgatcacagagctgcctgaagatggctgcacagaagaagatgtgaggaagctgttccagccctttgggaaggtgaatgatgtgctgattgtgccctacaggaaggaggcctacctggagatggagttcaaggaggccatcacagccatcatgaagtacatcgagaccacccccctgaccatcaagggcaagtctgtgaagatctgtgtgcctgggaagaagaaggcccagaacaaggaggtgaagaagaagaccctggagagcaagaaggtgtctgccagcaccctgaagagagatgctgatgccagcaaggctgtggagatcgtgaccagcaccagcgctggcctgctgcccactggaggcggcaacaactacccccagatcgtgctggcccctggcctgtgccactag

SEQ ID NO: 176943 - DNA, 2643 bp, synthetic construct
  misc_feature 1..2643: note = Description of Artificial Sequence: Synthetic coding sequence
  source 1..2643: mol_type = other DNA
atgcccagagatggagtgcctgctggcaacaccaccccagctgctgcccaggccgccgcccagagcccagattctgccacagctggggccccccaggtgctggacagcctgaagcgctacccagactggaaccctgagatcctgcccagcagaagaaatgaaggcaacagaaaagaaaatgagacccccaggagaagaagccacagccccagccccaggaggagccgccgcagcagcagcagccaccgcttcagaagaagccgcagccccatgcactacatgtaccggcccaggagccgcagcccccgcatctgccaccgcttcatcagccgctaccgcagccgcagccgcagccgcagcccctaccgcatccggaaccccttccggggcagccccaagtgcttccgctctgtgtccccagagaggatgagcagaagatctgtgcgcagcagtgacaggaagaaggccctggaggatgtggtgcagaggagcggccacggcacagagttcaacaagcagaagcacctggaggccgctgacaagggccacagccctgcccagaagcccaagaccagcagcggcaccaagcccagcgtgaagcccaccagcgccaccaagagtgacagcaacctgggcggccacagcatccgctgcaagagcaagaacctggaggatgacaccctgtctgagtgcaagcaggtgtctgacaaggctgtgtccctgcagaggaagctgaggaaggagcagagcctgcactacggctctgtgctgctgatcacagagctgcctgaagatggctgcacagaggaggatgtgaggaagctgttccagccctttgggaaggtgaatgatgtgctgattgtgccctacaggaaggaggcctacctggagatggagttcaaggaggccatcacagccatcatgaagtacatcgagaccacccccctgaccatcaagggcaagtctgtgaagatctgtgtgcctgggaagaagaaggcccagaacaaggaggtgaagaagaagaccctggagagcaagaaggtgtctgccagcaccctgaagagagatgctgatgccagcaaggctgtggagatcgtgaccagcaccagcgctgccaagacaggccaggccaaggcctctgtggccaaggtgaacaagagcacaggcaagagcgccagctctgtgaagtctgtggtgacagtggccgtgaagggcaacaaggccagcatcaagacagccaagagcggcggcaagaagagcctggaggccaagaagacaggaaatgtgaagaacaaggacagcaacaagcctgtgaccatccctgagaacagcgagatcaagaccagcattgaggtgaaggccacagagaactgtgccaaggaggccatcagtgatgctgccctggaggccacagaaaatgagcccctgaacaaggagacagaggagatgtgtgtgatgctggtgagcaacctgcccaacaagggctacagcgtggaggaggtgtatgacctggccaagccctttggaggcctgaaggacatcctgatcctgagcagccacaagaaggcctacatcgagatcaacaggaaggctgctgagagcatggtgaagttctacacctgcttccctgtgctgatggatggcaaccagctgagcatctccatggcccctgagaacatgaacatcaaggatgaggaggccatcttcatcaccctggtgaaggaaaatgaccctgaggccaacatcgacaccatctatgacagatttgtgcacctggacaacctgcctgaagatggcctgcagtgtgtgctgtgtgtgggcctgcagtttgggaaggtggaccaccacgtgttcatcagcaacagaaacaaggccatcctgcagctggacagccctgagagcgcccagagcatgtacagcttcctgaagcagaacccccagaacattggagaccacatgctgacctgcagcctgagccccaagattgacctgcctgaggtgcagattgaacatgaccctgagctggagaaggagagccctggcctgaagaacagccccattgatgagagcgaggtgcagacagccacagacagccccagcgtgaagcccaatgagctggaggaggagagcacccccagcatccagacagagaccctggtgcagcaggaggagccctgtgaggaggaggccgagaaggccacctgtgacagcgactttgctgtggagaccctggagctggagacccagggcgaggaggtgaaggaggagatccccctggtggccagcgcctctgtgtccattgagcagttcacagaaaatgctgaggagtgtgccctgaaccagcagatgttcaacagcgacctggagaagaagggagctgagatcatcaaccccaagacagccctgctgcccagcgacagcgtgtttgctgaggagaggaacctgaagggcatcctggaggagagccccagcgaggccgaggacttcatcagcggcatcacccagaccatggtggaggccgtggccgaggtggagaagaatgaaacagtgtctgagatcctgcccagcacctgcatcgtgaccctggtgcccggcatccccactggagatgagaagacagtggacaagaagaacatctcctag

SEQ ID NO: 176944 - DNA, 2757 bp, synthetic construct
  misc_feature 1..2757: note = Description of Artificial Sequence: Synthetic coding sequence
  source 1..2757: mol_type = other DNA
atggacagcccccccctgaaggccctgaacagcaacagcatctacttcctgctgctcttccactgcatgctgatcagcgaggtgcagatcgagcatgaccctgagctggagaaggagagccctggcctgaagaacagccccattgatgaaagtgaggtgcagacagccacagacagccccagcgtgaagcccaatgagctggaggaggagagcacccccagcatccagacagagaccctggtgcagcaggaggagccctgtgaggaggaggccgagaaggccacctgtgacagcgactttgctgtggagaccctggagctggagacccagggcgaggaggtgaaggaggagatccccctggtggccagcgcctctgtgtccattgagcagttcacagaaaatgcagaagaatgtgccctgaaccagcagatgttcaacagcgacctggagaagaagggagctgagatcatcaaccccaagacagccctgctgcccagcgacagcgtgtttgctgaggagaggaacctgaagggcatcctggaggagagccccagcgaggccgaggacttcatcagcggcatcacccagaccatggtggaggccgtggccgaggtggagaagaatgagaccgtgtctgagatcctgcccagcacctgcatcgtgaccctggtgcccggcatccccactggagatgagaagacagtggacaagaagaacatcagcgagaagaagggcaacatggatgagaaggaggagaaggagttcaacaccaaggagaccaggatggacctgcagatcggcacagagaaggccgagaagaatgaaggaaggatggatgctgagaaggtggagaagatggccgccatgaaggagaagccagctgagaacaccctcttcaaggcctaccccaacaagggcgtgggccaggccaacaagccagatgagaccagcaagaccagcatcctggccgtgtctgatgtgagcagcagcaagcccagcatcaaggccgtcatcgtgagcagccccaaggccaaggccaccgtgtccaagacagagaaccagaagagcttccccaagtctgtgccccgggaccagatcaatgctgagaagaagctgagcgccaaggagtttggcctgctgaagcccaccagcgcccggagcggcctggccgagagcagcagcaagttcaagcccacccagagcagcctgacccggggcggcagcggccgcatcagcgccctgcagggcaagctgagcaagctggactacagagacatcaccaagcagagccaggagacagaggcccggcccagcatcatgaagagagatgacagcaacaacaagaccctggccgagcagaacaccaagaaccccaagagcaccaccggccgcagcagcaagagcaaggaggagcccctcttccccttcaacctggatgaatttgtgacagtggatgaagtcatcgaggaggtgaaccccagccaggccaagcagaaccccctgaagggcaagaggaaggagaccctgaagaatgtgcccttcagcgagctgaacctgaagaagaagaagggcaagaccagcaccccccggggcgtggagggggagctgagctttgtgaccctggatgagatcggggaggaggaggatgctgctgcccacctggcccaggccctggtgacagtggatgaggtgattgatgaggaggagctgaacatggaggagatggtgaagaacagcaacagcctcttcaccctggatgagctgattgaccaggatgactgcatcagccacagcgagcccaaggatgtgacagtgctgtctgtggccgaggagcaggacctgctgaagcaggagcggctggtgacagtggatgagatcggggaggtggaggagctgcccctgaatgaatctgctgacatcacctttgccaccctgaacaccaagggaaatgaaggagacacagtgcgggacagcatcggcttcatcagcagccaggtgcctgaggaccccagcaccctggtgacagtggatgagatccaggatgacagcagtgacctgcacctggtgaccctggatgaggtgacagaagaagatgaggacagcctggccgacttcaacaacctgaaggaggagctgaactttgtgacagtggatgaggtgggggaggaggaggatggagacaatgacctgaaggtggagctggcccagagcaagaatgaccaccccacagacaagaagggcaacaggaagaagagagctgtggacaccaagaagaccaagctggagagcctgagccaggtgggccctgtgaatgaaaatgtgatggaggaggacctgaagaccatgattgagcggcacctgacagccaagacccccaccaagagggtgcgcatcggcaagaccctgcccagcgagaaggctgtggtgacagagcccgccaagggggaggaggccttccagatgtctgaggtggatgaggagagcggcctgaaggacagcgagcctgagaggaagaggaagaagacagaggacagcagcagcggcaagtctgtggccagtgatgtgcctgaggagctggacttcctggtgcccaaggccggcttcttctgccccatctgcagcctcttctacagcggggagaaggccatgaccaaccactgcaagagcaccaggcacaagcagaacacagagaagttcatggccaagcagaggaaggagaaggagcagaatgaggccgaggagaggagcagcaggtag

SEQ ID NO: 176945 - DNA, 5937 bp, synthetic construct; identical to SEQ ID NO: 176940
  misc_feature 1..5937: note = Description of Artificial Sequence: Synthetic coding sequence
  source 1..5937: mol_type = other DNA

SEQ ID NO: 176946 - DNA, 90 bp, synthetic construct
  misc_feature 1..90: note = Description of Artificial Sequence: Synthetic coding sequence
  source 1..90: mol_type = other DNA
atgagccggccccgcttcaaccccaggggggacttccccctgcagaggccccgggcccccaaccccagcggcatgaggcctcctggatag

SEQ ID NO: 176947 - DNA, 594 bp, synthetic construct
  misc_feature 1..594: note = Description of Artificial Sequence: Synthetic coding sequence
  source 1..594: mol_type = other DNA
atgagccggccccgcttcaaccccaggggggacttccccctgcagaggccccgggcccccaaccccagcggcatgaggcctcctggccccttcatgaggcctggctccatgggcctgccccgcttctacccagctggccgggcccggggcatcccccacagatttgctggccacgagagctaccagaacatgggcccccagaggatgaatgtgcaggtgacccagcacaggacagacccccggctgaccaaggagaagctggacttccacgaggcccagcagaagaagggcaagccccacggcagccgctgggatgatgagccccacatcagcgcctctgtggccgtgaagcagagctctgtgacccaggtgacagagcagagccccaaggtgcagagccgctacaccaaggagagcgccagcagcatcctggccagctttggcctgagcaatgaagacctggaggagctgagccgctacccagatgagcagctgaccccagagaacatgcccctcatcctgcgggacatccgcatgaggaagatgggccggcggctgcccaacctgcccagccagagcaggaacaaggagtag

SEQ ID NO: 176948 - DNA, 111 bp, synthetic construct
  misc_feature 1..111: note = Description of Artificial Sequence: Synthetic coding sequence
  source 1..111: mol_type = other DNA
atgagccggccccgcttcaaccccaggggggacttccccctgcagaggccccgggcccccaaccccagcggcatgaggcctcctggccccttcatgaggcctggcagctag

SEQ ID NO: 176949 - DNA, 189 bp, synthetic construct
  misc_feature 1..189: note = Description of Artificial Sequence: Synthetic coding sequence
  source 1..189: mol_type = other DNA
atgagccggccccgcttcaaccccaggggggacttccccctgcagaggccccgggcccccaaccccagcggcatgaggcctcctggccccttcatgaggcctggctccatgggcctgccccgcttctacccagctggccgggcccggggcatcccccacagatttgctggccacgagagctaccagtag

SEQ ID NO: 176950 - DNA, 189 bp, synthetic construct; identical to SEQ ID NO: 176949
  misc_feature 1..189: note = Description of Artificial Sequence: Synthetic coding sequence
  source 1..189: mol_type = other DNA

SEQ ID NO: 176951 - DNA, 1758 bp, synthetic construct
  misc_feature 1..1758: note = Description of Artificial Sequence: Synthetic coding sequence
  source 1..1758: mol_type = other DNA
atggacagcccccccctgaaggccctgaacagcaacagcatctacttcctgctgctcttccactgcatgctgatcagcgaggtgcagatcgagcatgaccctgagctggagaaggagagccctggcctgaagaacagccccattgatgaaagtgaggtgcagacagccacagacagccccagcgtgaagcccaatgagctggaggaggagagcacccccagcatccagacagagaccctggtgcagcaggaggagccctgtgaggaggaggccgagaaggccacctgtgacagcgactttgctgtggagaccctggagctggagacccagggcgaggaggtgaaggaggagatccccctggtggccagcgcctctgtgtccattgagcagttcacagaaaatgcagaagaatgtgccctgaaccagcagatgttcaacagcgacctggagaagaagggagctgagatcatcaaccccaagacagccctgctgcccagcgacagcgtgtttgctgaggagaggaacctgaagggcatcctggaggagagccccagcgaggccgaggacttcatcagcggcatcacccagaccatggtggaggccgtggccgaggtggagaagaatgagaccgtgtctgagatcctgcccagcacctgcatcgtgaccctggtgcccggcatccccactggagatgagaagacagtggacaagaagaacatcagcgagaagaagggcaacatggatgagaaggaggagaaggagttcaacaccaaggagaccaggatggacctgcagatcggcacagagaaggccgagaagaatgaaggaaggatggatgctgagaaggtggagaagatggccgccatgaaggagaagccagctgagaacaccctcttcaaggcctaccccaacaagggcgtgggccaggccaacaagccagatgagaccagcaagaccagcatcctggccgtgtctgatgtgagcagcagcaagcccagcatcaaggccgtcatcgtgagcagccccaaggccaaggccaccgtgtccaagacagagaaccagaagagcttccccaagtctgtgccccgggaccagatcaatgctgagaagaagctgagcgccaaggagtttggcctgctgaagcccaccagcgcccggagcggcctggccgagagcagcagcaagttcaagcccacccagagcagcctgacccggggcggcagcggccgcatcagcgccctgcagggcaagctgagcaagctggactacagagacatcaccaagcagagccaggagacagaggcccggcccagcatcatgaagagagatgacagcaacaacaagaccctggccgagcagaacaccaagaaccccaagagcaccaccggccgcagcagcaagagcaaggaggagcccctcttccccttcaacctggatgaatttgtgacagtggatgaagtcatcgaggaggtgaaccccagccaggccaagcagaaccccctgaagggcaagaggaaggagaccctgaagaatgtgcccttcagcgagctgaacctgaagaagaagaagggcaagaccagcaccccccggggcgtggagggggagctgagctttgtgaccctggatgagatcggggaggaggaggatgctgctgcccacctggcccaggccctggtgacagtggatgaggtgattgatgaggaggagctgaacatggaggagatggtgaagttcaagttcaccttctacatcagatag

SEQ ID NO: 176952 - DNA, 3075 bp, synthetic construct
  misc_feature 1..3075: note = Description of Artificial Sequence: Synthetic coding sequence
  source 1..3075: mol_type = other DNA
atgcccagagatggagtgcctgctggcaacaccaccccagctgctgcccaggccgccgcccagagcccagattctgccacagctggggccccccaggtgctggacagcctgaagagatttgtgctcttcctggagaactttgcccccctggtgaacagcctgaacctgggcatcgccaaccccctgctgctgggccccagccccctgcactttgcccagatcaagacccagctggccctgcagcagctgaatgctgtggccagccacggcagcaccccaccctacaccctgctgaaccaggccttcctgaagatcgccatgagccggccccgcttcaaccccaggggggacttccccctgcagaggccccgggcccccaaccccagcggcatgaggcctcctggccccttcatgaggcctggctccatgggcctgccccgcttctacccagctggccgggcccggggcatcccccacagatttgctggccacgagagctaccagaacatgggcccccagaggatgaatgtgcaggtgacccagcacaggacagacccccggctgaccaaggagaagctggacttccacgaggcccagcagaagaagggcaagccccacggcagccgctgggatgatgagccccacatcagcgcctctgtggccgtgaagcagagctctgtgacccaggtgacagagcagagccccaaggtgcagagccgctacaccaaggagagcgccagcagcatcctggccagctttggcctgagcaatgaagacctggaggagctgagccgctacccagatgagcagctgaccccagagaacatgcccctcatcctgcgggacatccgcatgaggaagatgggccggcggctgcccaacctgcccagccagagcaggaacaaggagaccctgggcagcgaggccgtgagcagcaatgtgattgattatggccacgccagcaaatatggctacacagaggaccccctggaggtgcgcatctatgaccctgagatccccacagatgaggtggagaatgagttccagagccagcagaacatcagcgcctctgtgcccaaccccaacgtcatctgcaacagcatgtttcctgtggaggatgtgttccggcagatggacttccctggagagagcagcaacaacagaagcttcttctctgtggagagcggcaccaagatgagcggcctgcacatcagcggcggccagagcgtgctggagcccatcaagtctgtgaaccagagcatcaaccagacagtgtcccagaccatgagccagagcctcatccccccatccatgaaccagcagcccttcagcagcgagctgatcagctctgtgtcccagcaggagcgcatcccccatgagcctgtgatcaacagcagcaatgtgcacgtgggcagccggggcagcaagaagaactaccagagccaggccgacatccccatccgcagcccctttggaattgtgaaggcctcctggctgcccaagttcagccatgctgatgcccagaagatgaagaggctgcccacccccagcatgatgaatgactactatgctgccagcccccgcatcttcccccacctgtgcagcctgtgcaatgtggagtgcagccacctgaaggactggatccagcaccagaacaccagcacccacatcgagagctgccggcagctgcggcagcagtacccagactggaaccctgagatcctgcccagcagaagaaatgaaggcaacagaaaagaaaatgagaccccaagaagaagaagccacagccccagcccccggcgcagcagaagaagcagcagcagccaccgcttccgccgcagccgcagccccatgcactacatgtaccggcccaggagccgcagcccccgcatctgccaccgcttcatcagccgctaccgcagccgcagccgcagccgcagcccctaccgcatccggaaccccttccggggcagccccaagtgcttccgctctgtgtccccagagaggatgagccgccgctctgtgcgcagcagtgacaggaagaaggccctggaggatgtggtgcagaggagcggccatggaacagagttcaacaagcagaagcacctggaggccgctgacaagggccacagccctgcccagaagcccaagaccagcagcggcaccaagcccagcgtgaagcccaccagcgccaccaagagtgacagcaacctgggcggccacagcatccgctgcaagagcaagaacctggaggatgacaccctgtctgagtgcaagcaggtgtctgacaaggctgtgtccctgcagaggaagctgaggaaggagcagagcctgcactacggctctgtgctgctgatcacagagctgcctgaagatggctgcacagaagaagatgtgaggaagctgttccagccctttgggaaggtgaatgatgtgctgattgtgccctacaggaaggaggcctacctggagatggagttcaaggaggccatcacagccatcatgaagtacatcgagaccacccccctgaccatcaagggcaagtctgtgaagatctgtgtgcctgggaagaagaaggcccagaacaaggaggtgaagaagaagaccctggagagcaagaaggtgtctgccagcaccctgaagagagatgctgatgccagcaaggctgtggagatcgtgaccagcaccagcgctgagagcgtggaccagacccagcagctggtgcccctggtgaggaacacagcccgggaccatgatggcaccccagaaaatgaaggagaggagaccgtgcagagcgccctgtttggcttccagtatgatgccagtgaccacaccatggcctggctgggccccaacacagtgcctgaggtgaaggagatgatcctgcaggacccccagctgcagaccacccagctgccccagaccacccaggccccagacatcacctggggcatgctgaagaagaccacctacaaggccgagcagatcctgctgcagacccagaagcccttcaccccagacaacctcttcctggccctgctgtctggagatgccaagccagaatatgagcagtag

SEQ ID NO: 176953 - DNA, 1317 bp, synthetic construct
  misc_feature 1..1317: note = Description of Artificial Sequence: Synthetic coding sequence
  source 1..1317: mol_type = other DNA
atgcaggccgaggacaggagccagtttggatctgctgctgagatgctgtctgagcagacagctgccctgggcaccggctgggagagcatgaatgtgcagctggatggagctgagccccaggtggagcggggcagccaggaggagcggccctggaggacagtgcccggccccctggagcacctgtgctgtgacctggaggaggagccccagagcctgcaggagaaggcccagagcgccccctgggtgcctgccatcccccaggagggcaacacaggagactgggagatggccgccgccctgctggccgccggcagccagggcctggtgaccatcaaggatgtgtccctgtgcttcagccaggaggagtggaggagcctggaccccagccagacagacttctacggggagtatgtgatgcaggagaactgtggcatcgtggtgtccctgcgcttccccatccccaagctggacatgctgagccagctggagggcggggaggagcagtgggtgcctgacccccaggacctggaggagcgggacatcctgcgggtgacctacacaggagatggcagcgagcatgaaggagacaccccagagctggaggccgagccccccaggatgctgagctctgtgtctgaagatactgtgctgtggaaccctgagcatgatgagagctgggacagcatgcccagcagcagccggggcatgctgctgggcccccccttcctgcaggaggacagcttcagcaacctgctgtgcagcacagagatggacagcctgctgcggccccacacctgcccccagtgtgggaagcagtttgtgtggggcagccacctggcccggcaccagcagacccacactggagagcggccctacagctgcctgaagtgtgagaagacctttggaagaagacaccacctgatccgccaccagaagacccacctgcatgacaagaccagccgctgcagtgaatgtgggaagaacttccgctgcaacagccacctggccagccaccagagggtgcatgctgagggcaagagctgcaagggccaggaggtgggggagagccctggcaccaggaagaggcagagggcccctcctgtgcccaagtgccacgtgtgcacagaatgtgggaagagctttggaagaagacaccacctggtgcgccactggctgacccacactggagagaagcccttccagtgcccccgctgtgagaagagctttggaaggaagcaccacctggacagacacctgctgacccaccagggccagagccccaggaacagctgggaccggggcaccagcgtcttctag

SEQ ID NO: 176954 - DNA, 1248 bp, synthetic construct
  misc_feature 1..1248: note = Description of Artificial Sequence: Synthetic coding sequence
  source 1..1248: mol_type = other DNA
atgctgtctgagcagacagctgccctgggcaccggctgggagagcatgaatgtgcagctggatggagctgagccccaggtggagcggggcagccaggaggagcggccctggaggacagtgcccggccccctggagcacctgtgctgtgacctggaggaggagccccagagcctgcaggagaaggcccagagcgccccctgggtgcctgccatcccccaggagggcaacacaggagactgggagatggccgccgccctgctggccgccggcagccaggtgtcctctgccagcctgggcgtgtcctgtggccccatcacagctgcctttgtgctgctgagccaccagcccattgatgagctggcccacatgatcatcaatggcttccccatccccaagctggacatgctgagccagctggagggcggggaggagcagtgggtgcctgacccccaggacctggaggagcgggacatcctgcgggtgacctacacaggagatggcagcgagcacgagggggacaccccagagctggaggccgagccccccaggatgctgagctctgtgtctgaggacacagtgctgtggaaccctgagcatgatgagagctgggacagcatgcccagcagcagccggggcatgctgctgggcccccccttcctgcaggaggacagcttcagcaacctgctgtgcagcacagagatggacagcctgctgcggccccacacctgcccccagtgtgggaagcagtttgtgtggggcagccacctggcccggcaccagcagacccacactggagagcggccctacagctgcctgaagtgtgagaagaccttcggccgccgccaccacctgatccgccaccagaagacccacctgcatgacaagaccagccgctgcagtgaatgtgggaagaacttccgctgcaacagccacctggccagccaccagagggtgcacgccgagggcaagagctgcaagggccaggaggtgggggagagccctggcaccaggaagaggcagagggcccctcctgtgcccaagtgccacgtgtgcacagaatgtgggaagagctttggccgccgccaccacctggtgcgccactggctgacccacactggagagaagcccttccagtgcccccgctgtgagaagagctttggaaggaagcaccacctggacagacacctgctgacccaccagggccagagccccagaaattcctgggaccggggcacctctgtgttctag

SEQ ID NO: 176955 - DNA, 1317 bp, synthetic construct; identical to SEQ ID NO: 176953
  misc_feature 1..1317: note = Description of Artificial Sequence: Synthetic coding sequence
  source 1..1317: mol_type = other DNA

SEQ ID NO: 176956 - DNA, 1275 bp, synthetic construct
  misc_feature 1..1275: note = Description of Artificial Sequence: Synthetic coding sequence
  source 1..1275: mol_type = other DNA
atgctgtctgagcagacagctgccctgggcaccggctgggagagcatgaatgtgcagctggatggagctgagccccaggtggagcggggcagccaggaggagcggccctggaggacagtgcccggccccctggagcacctgtgctgtgacctggaggaggagccccagagcctgcaggagaaggcccagagcgccccctgggtgcctgccatcccccaggagggcaacacaggagactgggagatggccgccgccctgctggccgccggcagccagggcctggtgaccatcaaggatgtgtccctgtgcttcagccaggaggagtggaggagcctggaccccagccagacagacttctacggggagtatgtgatgcaggagaactgtggcatcgtggtgtccctgcgcttccccatccccaagctggacatgctgagccagctggagggcggggaggagcagtgggtgcctgacccccaggacctggaggagcgggacatcctgcgggtgacctacacaggagatggcagcgagcatgaaggagacaccccagagctggaggccgagccccccaggatgctgagctctgtgtctgaagatactgtgctgtggaaccctgagcatgatgagagctgggacagcatgcccagcagcagccggggcatgctgctgggcccccccttcctgcaggaggacagcttcagcaacctgctgtgcagcacagagatggacagcctgctgcggccccacacctgcccccagtgtgggaagcagtttgtgtggggcagccacctggcccggcaccagcagacccacactggagagcggccctacagctgcctgaagtgtgagaagacctttggaagaagacaccacctgatccgccaccagaagacccacctgcatgacaagaccagccgctgcagtgaatgtgggaagaacttccgctgcaacagccacctggccagccaccagagggtgcatgctgagggcaagagctgcaagggccaggaggtgggggagagccctggcaccaggaagaggcagagggcccctcctgtgcccaagtgccacgtgtgcacagaatgtgggaagagctttggaagaagacaccacctggtgcgccactggctgacccacactggagagaagcccttccagtgcccccgctgtgagaagagctttggaaggaagcaccacctggacagacacctgctgacccaccagggccagagccccaggaacagctgggaccggggcaccagcgtcttctag

SEQ ID NO: 176957 - DNA, 411 bp, synthetic construct
  misc_feature 1..411: note = Description of Artificial Sequence: Synthetic coding sequence
  source 1..411: mol_type = other DNA
atgcaggccgaggacaggagccagtttggatctgctgctgagatgctgtctgagcagacagctgccctgggcaccggctgggagagcatgaatgtgcagctggatggagctgagccccaggtggagcggggcagccaggaggagcggccctggaggacagtgcccggccccctggagcacctgtgctgtgacctggaggaggagccccagagcctgcaggagaaggcccagagcgccccctgggtgcctgccatcccccaggagggcaacacaggagactgggagatggccgccgccctgctggccgccggcagccagggcctggtgaccatcaaggatgtgtccctgtgcttcagccaggaggagtggaggagcctggaccccagccagacagacttctacggggagtag

SEQ ID NO: 176958 - DNA, 324 bp, synthetic construct
  misc_feature 1..324: note = Description of Artificial Sequence: Synthetic coding sequence
  source 1..324: mol_type = other DNA
atgctgtctgagcagacagctgccctgggcaccggctgggagagcatgaatgtgcagctggatggagctgagccccaggtggagcggggcagccaggaggagcggccctggaggacagtgcccggccccctggagcacctgtgctgtgacctggaggaggagccccagagcctgcaggagaaggcccagagcgccccctgggtgcctgccatcccccaggagggcaacacaggagactgggagatggccgccgccctgctggccgccggcagccagggcctggtgaccatcaaggatgtgtccctgtgcttcagccaggagtag

SEQ ID NO: 176959 - DNA, 234 bp, synthetic construct
  misc_feature 1..234: note = Description of Artificial Sequence: Synthetic coding sequence
  source 1..234: mol_type = other DNA
atgctgtctgagcagacagctgccctgggcaccggctgggagagcatgaatgtgcagctggatggagctgagccccaggtggagcggggcagccaggaggagcggccctggaggacagtgcccggccccctggagcacctgtgctgtgacctggaggaggagccccagagcctgcaggagaaggcccagagcgccccctgggtgcctgccatcccccaggagggcaacacctag

SEQ ID NO: 176960 - DNA, 3984 bp, synthetic construct
  misc_feature 1..3984: note = Description of Artificial Sequence: Synthetic coding sequence
  source 1..3984: mol_type = other DNA
atgaggagcttcctgcagcaggatgtgaacaagaccaagagccggctgaatgtgctgaatggcctggccaacaacatggatgacctgaagatcaacacagacatcaccggggccaaggaggagctgctggatgacaacaacttcatcagtgacaaggagagcggcgtgcacaagcccaaggactgccagaccagcttccagaagaacaacaccctgaccctgcctgaggagctgagcaaggacaagtcagaaaatgccctgagcggcggccagagcagcctcttcatccacgccggggcccccaccgtgtcctctgagaacttcatcctgcccaagggagctgctgtgaatggacctgtgagccacagcagcctgaccaagaccagcaacatgaacaagggctctgtgtccctgaccaccggccagcctgtggaccagcccaccacagagagctgcagcaccctgaaggtggccgctgacctgcagctgagcaccccccagaaggccagccagcaccaggtgctcttcctgctgagtgatgtggcccacgccaagaaccccacccacagcaacaagaagctgcccaccagcgcctctgtgggctgtgacatccagaacagcgtgggcagcaacatcaagagtgatggcaccctcatcaaccaggtggaggtgggggaggatggagaggacctgctggtgaaggatgactgtgtgaacacagtgacaggcatcagcagcggcacagatggcttccgctcagaaaatgacaccaactgggacccccagaaggagttcatccagttcctgatgaccaatgaggagaccgtggacaaggccccaccccacagcaagattggcctggagaagaagaggaagaggaagatggatgtgtccaagatcacccgctacacagaggactgcttcagtgacagcaactgtgtgcccaacaagagcaagatgcaggaggtggacttcctggagcagaatgaggagctgcaggccgtggacagccagaagtatgccctgagcaaggtgaagccagagagcacagatgaggacctggagagcgtggatgccttccagcacctgatctacaacccagacaagtgtggggaggagagcagccctgtgcacaccagcaccttcctgagcaacaccctgaagaagaagtgtgaggagagtgacagcgagagccctgccaccttcagcacagaggagcccagcttctacccctgcaccaagtgcaatgtgaacttccgggagaagaagcacctgcaccgccacatgatgtaccacctggatggcaacagccacttccgccacctgaatgtgccccggccctatgcctgccgggagtgtggccgcaccttccgggacaggaacagcctgctgaagcacatgatcatccaccaggagcggcggcagaagctgatggaggagatccgggagctgaaggagctgcaggatgagggccgcagcgcccggctgcagtgcccccagtgtgtgtttggcaccaactgccccaagacctttgtgcagcacgccaagacccatgagaaggacaagcgctactactgctgtgaggagtgcaacttcatggctgtgacagaaaatgagctggagtgccaccggggcatcgcccacggggctgtggtgaagtgccccatggtgaccagtgacatcgcccagaggaagacccagaagaagaccttcatgaaggacagcgtggtgggcagcagcaagaagagcgccacctacatctgcaagatgtgccccttcaccaccagcgccaagtctgtgctgaagaagcacacagagtacctgcacagcagcagctgtgtggacagctttggcagccccctgggcctggacaagaggaagaatgacatcctggaggagcctgtggacagcgacagcaccaagaccctgaccaagcagcagagcaccaccttccccaagaacagcgccctgaagcaggatgtgaagaggaccttcggcagcaccagccagagcagcagcttcagcaagatccacaagaggccccaccgcatccagaaggccaggaagagcatcgcccagagcggcgtgaacatgtgcaaccagaacagcagcccccacaagaatgtgaccatcaagagctctgtggaccagaagcccaagtacttccaccaggccgccaaggagaagagcaatgccaaggccaacagccactacctgtaccgccacaagtatgagaactacaggatgatcaagaagtctggagagagctaccctgtgcacttcaagaaggaggaggccagcagcctgaacagcctgcacctgttcagcagcagcagcaacagccacaacaacttcatcagtgacccccacaagccagatgccaagaggcctgagagcttcaaggaccaccggcgggtggccgtgaagagggtcatcaaggagagcaagaaggagagctctgtgggcggggaggacctggacagctacccagacttcctgcacaagatgacagtggtggtgctgcagaagctgaacagcgctgagaagaaggacagctatgaaacagaagatgagagctcctgggacaacgtggagctgggggactacaccacccaggccattgaagatgagacctacagcgacatcaaccaggagcacgtgaacctcttccccctcttcaagagcaaggtggagggccaggagcccggggagaatgccaccctgtcctatgaccagaatgatggcttctactttgagtactatgaggacaccggcagcaacaacttcctgcacgagatccatgacccccagcacctggagacagcagatgccagcctgagcaagcacagctctgtgttccactggacagacctgagcctggagaagaagagctgcccctactgcccagccacctttgagaccggggtgggcctgagcaaccacgtgcggggccacctgcacagagctggcctgtcctatgaggcccggcacgtggtgtccccagagcagatcgccaccagtgacaagatgcagcacttcaagaggacaggcaccggcacccctgtgaagagggtgaggaaggccatcgagaagtctgagaccaccagcgagcacacctgccagctgtgtggcggctggtttgacaccaagattggcctgagcaaccacgtgcggggccacctgaagaggctgggcaagaccaagtgggatgcccacaagagccccatctgtgtgctgaatgagatgatgcagaatgaggagaagtatgagaagatcctgaaggccctgaacagccgccgcatcatcccccggccctttgtggcccagaagctggccagcagtgatgacttcatcagccagaatgtcatccccctggaggcctacagaaatggcctgaagacagaggccctgtctgtgtctgccagcgaggaggagggcctgaacttcctgaatgaatatgatgagaccaagccagagctgcccagcggcaagaagaaccagagcctgaccctcatcgagctgctgaagaacaagaggatgggagaggagaggaacagcgccatcagcccccagaagatccacaaccagacagccaggaagagatttgtgcagaagtgtgtgctgcccctgaatgaagacagccccctgatgtaccagccccagaagatggacctgaccatgcacagcgccctggactgcaagcagaagaagagccgcagccgcagcggcagcaagaagaagatgctgaccctgccccatggagcagatgaggtgtacatcctgcgctgccgcttctgtggcctggtgttccggggccccctgtctgtgcaggaggactggatcaagcacctgcagaggcacatcgtgaatgccaacctgcccaggactggagctggcatggtggaggtgaccagcctgctgaagaagccagccagcatcacagagaccagcttcagcctgctgatggccgaggccgccagctag

SEQ ID NO: 176961 - DNA, 318 bp, synthetic construct
  misc_feature 1..318: note = Description of Artificial Sequence: Synthetic coding sequence
  source 1..318: mol_type = other DNA
atgctgatccggcagaacctggccctggactgcaagcagaagaagagccgcagccgcagcggcagcaagaagaagatgctgaccctgccccatggagcagatgaggtgtacatcctgcgctgccgcttctgtggcctggtgttccggggccccctgtctgtgcaggaggactggatcaagcacctgcagaggcacatcgtgaatgccaacctgcccaggactggagctggcatggtggaggtgaccagcctgctgaagaagccagccagcatcacagagaccagcttcagcctgctgatggccgaggccgccagctag

SEQ ID NO: 176962 - DNA, 318 bp, synthetic construct; identical to SEQ ID NO: 176961
  misc_feature 1..318: note = Description of Artificial Sequence: Synthetic coding sequence
  source 1..318: mol_type = other DNA

SEQ ID NO: 176963 - DNA, 3984 bp, synthetic construct; identical to SEQ ID NO: 176960
  misc_feature 1..3984: note = Description of Artificial Sequence: Synthetic coding sequence
  source 1..3984: mol_type = other DNA

SEQ ID NO: 176964 - DNA, 1953 bp, synthetic construct
  misc_feature 1..1953: note = Description of Artificial Sequence: Synthetic coding sequence
  source 1..1953: mol_type = other DNA
atgatgtaccacctggatggcaacagccacttccgccacctgaatgtgccccggccctatgcctgccgggagtgtggccgcaccttccgggacaggaacagcctgctgaagcacatgatcatccaccaggagcggcggcagaagctgatggaggagatccgggagctgaaggagctgcaggatgagggccgcagcgcccggctgcagtgcccccagtgtgtgtttggcaccaactgccccaagacctttgtgcagcacgccaagacccatgagaaggacaagcgctactactgctgtgaggagtgcaacttcatggctgtgacagaaaatgagctggagtgccaccggggcatcgcccacggggctgtggtgaagtgccccatggtgaccagtgacatcgcccagaggaagacccagaagaagaccttcatgaaggacagcgtggtgggcagcagcaagaagagcgccacctacatctgcaagatgtgccccttcaccaccagcgccaagtctgtgctgaagaagcacacagagtacctgcacagcagcagctgtgtggacagctttggcagccccctgggcctggacaagaggaagaatgacatcctggaggagcctgtggacagcgacagcaccaagaccctgaccaagcagcagagcaccaccttccccaagaacagcgccctgaagcaggatgtgaagaggaccttcggcagcaccagccagagcagcagcttcagcaagatccacaagaggccccaccgcatccagaaggccaggaagagcatcgcccagagcggcgtgaacatgtgcaaccagaacagcagcccccacaagaatgtgaccatcaagagctctgtggaccagaagcccaagtacttccaccaggccgccaaggagaagagcaatgccaaggccaacagccactacctgtaccgccacaagtatgagaactacaggatgatcaagaagtctggagagagctaccctgtgcacttcaagaaggaggaggccagcagcctgaacagcctgcacctgttcagcagcagcagcaacagccacaacaacttcatcagtgacccccacaagccagatgccaagaggcctgagagcttcaaggaccaccggcgggtggccgtgaagagggtcatcaaggagagcaagaaggagagctctgtgggcggggaggacctggacagctacccagacttcctgcacaagatgacagtggtggtgctgcagaagctgaacagcgctgagaagaaggacagctatgaaacagaagatgagagctcctgggacaacgtggagctgggggactacaccacccaggccattgaagatgagacctacagcgacatcaaccaggagcacgtgaacctcttccccctcttcaagagcaaggtggagggccaggagcccggggagaatgccaccctgtcctatgaccagaatgatggcttctactttgagtactatgaggacaccggcagcaacaacttcctgcacgagatccatgacccccagcacctggagacagcagatgccagcctgagcaagcacagctctgtgttccactggacagacctgagcctggagaagaagagctgcccctactgcccagccacctttgagaccggggtgggcctgagcaaccacgtgcggggccacctgcacagagctggcctgtcctatgaggcccggcacgtggtgtccccagagcagatcgccaccagtgacaagatgcagcacttcaagaggacaggcaccggcacccctgtgaagagggtgaggaaggccatcgagaagtctgagaccaccagcgagcacacctgccagctgtgtggcggctggtttgacaccaagattggcctgagcaaccacgtgcggggccacctgaagaggctgggcaagaccaagtgggatgcccacaagagccccatctgtgtgtag

SEQ ID NO: 176965 - DNA, 924 bp, synthetic construct
  misc_feature 1..924: note = Description of Artificial Sequence: Synthetic coding sequence
  source 1..924: mol_type = other DNA
atgaggagcttcctgcagcaggatgtgaacaagaccaagagccggctgaatgtgctgaatggcctggccaacaacatggatgacctgaagatcaacacagacatcaccggggccaaggaggagctgctggatgacaacaacttcatcagtgacaaggagagcggcgtgcacaagcccaaggactgccagaccagcttccagaagaacaacaccctgaccctgcctgaggagctgagcaaggacaagtcagaaaatgccctgagcggcggccagagcagcctcttcatccacgccggggcccccaccgtgtcctctgagaacttcatcctgcccaagggagctgctgtgaatggacctgtgagccacagcagcctgaccaagaccagcaacatgaacaagggctctgtgtccctgaccaccggccagcctgtggaccagcccaccacagagagctgcagcaccctgaaggtggccgctgacctgcagctgagcaccccccagaaggccagccagcaccaggtgctcttcctgctgagtgatgtggcccacgccaagaaccccacccacagcaacaagaagctgcccaccagcgcctctgtgggctgtgacatccagaacagcgtgggcagcaacatcaagagtgatggcaccctcatcaaccaggtggaggtgggggaggatggagaggacctgctggtgaaggatgactgtgtgaacacagtgacaggcatcagcagcggcacagatggcttccgctcagaaaatgacaccaactgggacccccagaaggagttcatccagttcctgatgaccaatgaggagaccgtggacaaggccccaccccacagcaagattggcctggagaagaagaaggccaagaatggctgcaagcaggacaacagcctgtaccggggcctgctgtag

SEQ ID NO: 176966 - DNA, 1518 bp, synthetic construct
  misc_feature 1..1518: note = Description of Artificial Sequence: Synthetic coding sequence
  source 1..1518: mol_type = other DNA
atgaccaaggcccaggagagcctgaccctggaggatgtggccgtggacttcacctgggaggagtggcagttcctgagccctgcccagaaggacctgtacagagatgtgatgctggagaactacagcaacctggtgtctgtgggctaccaggccggcaagccagatgccctgaccaagctggagcagggcgagcccctgtggaccctggaggatgagatccacagccctgcccaccctgagattgagaaggcagatgaccacctgcagcagcccctgcagaaccagaagatcctgaagaggacaggccagagatatgaacatggccgcaccctgaagagctacctgggcctgaccaaccagagccgccgctacaacaggaaggagcctgctgagttcaatggagatggagccttcctgcatgacaaccacgagcagatgcccacagaaattgagttccctgagagcaggaagcccatcagcaccaagagccagttcctgaagcaccagcagacccacaacatcgagaaggcccatgaatgtacagactgtgggaaggccttcctgaagaagagccagctgacagagcacaagaggatccacacaggcaagaagccccacgtgtgcagcctgtgtgggaaggccttctacaagaagtaccgcctgacagagcacgagcgggcccacagaggagagaagccccacggctgcagcctgtgtgggaaggccttctacaagcgctaccgcctgacagagcacgagcgggcccacaagggggagaagccctacggctgcagtgaatgtgggaaggccttccccaggaagtctgagctgacagagcaccagaggatccacacaggcatcaagccccaccagtgcagtgaatgtggccgggccttcagcaggaagagcctgctggtggtgcaccagaggacccacactggagagaagccccacacctgcagtgaatgtgggaagggcttcatccagaagggcaacctgaacatccaccagaggacccacactggagagaagccctacggctgcatcgactgtgggaaggccttcagccagaagagctgcctggtggcccaccagcgctaccacacaggcaagaccccatttgtgtgcccagaatgtggccagccctgcagccagaagagcggcctcatccgccaccagaagatccacagcggggagaagccctacaagtgcagcgactgtgggaaggccttcctgaccaagaccatgctgattgtgcaccacaggacccacactggagagcggccctacggctgtgatgaatgtgagaaggcctacttctacatgagctgcctggtgaagcacaagaggatccacagccgggagaagagaggagacagcgtgaaggtggagaaccccagcacagccagccacagcctgagccccagcgagcacgtgcagggcaagagccctgtgaacatggtgacagtggccatggtggccggccagtgtgaatttgcccacatcctgcacagctag

SEQ ID NO: 176967 - DNA, 1833 bp, synthetic construct
  misc_feature 1..1833: note = Description of Artificial Sequence: Synthetic coding sequence
  source 1..1833: mol_type = other DNA
atgcccagcgcccggggcaagagcaagagcaaggcccccatcaccttcggggacctggccatctacttcagccaggaggagtgggagtggctgagccccatccagaaggacctgtatgaagatgtgatgctggagaactacagaaacctggtgtccctgggcctgtccttccggcggcccaacgtcatcaccctgctggagaagggcaaggccccctggatggtggagcctgtgagaagaagaagagccccagacagcggcagcaaatgtgagaccaagaagctgccccccaaccagtgcaacaagagcggccagagcatctgccagaagctggtgtctgcccagcagaaggcccccaccaggaagagcggctgcaacaagaacagcgtgctggtgaagcccaagaagggccacagcggcaagaagcccctgaagtgcaatgactgtgggaagaccttcagccgctccttcagcctgaagctgcaccagaacatccacactggagagaagccctttgaatgtagcaactgcaggaaggccttccggcagatcagcagcatcctgctgcaccagaggatccacagcggcaagaagagccatgagtgcaacaagtgtggggagagcttcaaccagaggaccaccctcatcctgcacatgagaattcatgatggcaaggagatcctggactgtgggaaggccctgagccagtgccagagcttcaacatccaccagaagatccacgtggtgggcaatgtgtgccagtgcaggaaatgtgggaaggccttcaaccagatgagcagcctgctgctgcacaagaagatccacaacgggaagaagacccacaagtacaacaagtgtggccggggcttcaagaagaagtctgtgtttgtggtgcacaagagaattcatgctggggagaagatcccagaaaatgccaaggccctgagccagagcctgcagcagaggagccaccacctggagaaccccttcaagtgcaggaaatgtgggaagctgttcaaccgcatcagccccctgatgctgcaccagaggatccacaccagcgagaagccctacaagtgtgacaagtgtgacaagttcttccggcggctgagcaccctcatcctgcacctgcgcatccacaatggagagaagctgtaccgctgcaacaagtgtgagaaggtgtgcaacagacacagcagcctcatccagcaccagaaggtgcacaccaagaagaagaagctgtttgagtgcaaggaatgtgggaagatgttttctggaacagccaacctgaagatccaccagaacatccacagcgaggagaagcccttcaagtgcaacaagtgcagcaaggtgtttggccggcagagcttcctgattgagcaccagaggatccacactggagagaagccctaccagtgtgaagaatgtgggaaggccttcagccaccgcatcagcctgaccaggcacaagaggatccacacagaagatcggccctatgaatgtgaccagtgtgggaaggccttcagccagagcgcccacctggcccagcacgagcgcatccacactggagagaagccctacacctgcaagacctgtgggaaggccttcagccagaggaccagcctcatcctgcacgagaggagccacactggagagaagccctatgagtgcaatgaatgtgggaaggccttcagcagcggcagtgacctgatccgccaccagaggagccacagcagcgagaagccctatgagtgcagcaaatgtgggaaggcctacagccgcagcagcagcctcatccgccaccagaacacccacagcgaggagaaggcctag

SEQ ID NO: 176968 - DNA, 2217 bp, synthetic construct
  misc_feature 1..2217: note = Description of Artificial Sequence: Synthetic coding sequence
  source 1..2217: mol_type = other DNA
atgaggaccctggtgaatgccctgagcggcggcggccaggagatcaagccagagggcaaatgtgcccacaacggcatgtgcttccgctgtgaggaggtggccccagacacctgtgaggcctacccctacccaggcctggtggtgtctgtggccggcaaggagggccccaacccagaccacaagaggggcttcctggacctggcccaggagggcatccaggccctgccctaccagctgagcgcccacctgtctgtgtggaccctgaagggggaggagaggatgcccagcgcccggggcaagagcaagagcaaggcccccatcacctttggagacctggccatctacttcagccaggaggagtgggagtggctgagccccatccagaaggacctgtatgaagatgtgatgctggagaactacagaaacctggtgtccctgggcctgtccttcagaagacccaacgtcatcaccctgctggagaagggcaaggccccctggatggtggagcctgtgagaagaagaagagcccctgagctggtgacagtggccctcttcagcagctttggagaggtgatgttcagcaggatggtgctgatgctgatggatgtgtgccagtacctggtgattgatgagctggacagcggcagcaaatgtgagaccaagaagctgccccccaaccagtgcaacaagagcggccagagcatctgccagaagctggtgtctgcccagcagaaggcccccaccaggaagagcggctgcaacaagaacagcgtgctggtgaagcccaagaagggccacagcggcaagaagcccctgaagtgcaatgactgtgggaagaccttcagccgctccttcagcctgaagctgcaccagaacatccacactggagagaagccctttgaatgtagcaactgcaggaaggccttccggcagatcagcagcatcctgctgcaccagaggatccacagcggcaagaagagccatgagtgcaacaagtgtggggagagcttcaaccagaggaccaccctcatcctgcacatgagaattcatgatggcaaggagatcctggactgtgggaaggccctgagccagtgccagagcttcaacatccaccagaagatccacgtggtgggcaatgtgtgccagtgcaggaaatgtgggaaggccttcaaccagatgagcagcctgctgctgcacaagaagatccacaacgggaagaagacccacaagtacaacaagtgtggccggggcttcaagaagaagtctgtgtttgtggtgcacaagagaattcatgctggggagaagatcccagaaaatgccaaggccctgagccagagcctgcagcagaggagccaccacctggagaaccccttcaagtgcaggaaatgtgggaagctgttcaaccgcatcagccccctgatgctgcaccagaggatccacaccagcgagaagccctacaagtgtgacaagtgtgacaagttcttccggcggctgagcaccctcatcctgcacctgcgcatccacaatggagagaagctgtaccgctgcaacaagtgtgagaaggtgtgcaacagacacagcagcctcatccagcaccagaaggtgcacaccaagaagaagaagctgtttgagtgcaaggaatgtgggaagatgttttctggaacagccaacctgaagatccaccagaacatccacagcgaggagaagcccttcaagtgcaacaagtgcagcaaggtgtttggccggcagagcttcctgattgagcaccagaggatccacactggagagaagccctaccagtgtgaagaatgtgggaaggccttcagccaccgcatcagcctgaccaggcacaagaggatccacacagaagatcggccctatgaatgtgaccagtgtgggaaggccttcagccagagcgcccacctggcccagcacgagcgcatccacactggagagaagccctacacctgcaagacctgtgggaaggccttcagccagaggaccagcctcatcctgcacgagaggagccacactggagagaagccctatgagtgcaatgaatgtgggaaggccttcagcagcggcagtgacctgatccgccaccagaggagccacagcagcgagaagccctatgagtgcagcaaatgtgggaaggcctacagccgcagcagcagcctcatccgccaccagaacacccacagcgaggagaaggcctag

SEQ ID NO: 176969 - DNA, 975 bp, synthetic construct
  misc_feature 1..975: note = Description of Artificial Sequence: Synthetic coding sequence
  source 1..975: mol_type = other DNA
aagaacagcgtgctggtgaagcccaagaagggccacagcggcaagaagcccctgaagtgcaatgactgtgggaagaccttcagccgctccttcagcctgaagctgcaccagaacatccacactggagagaagccctttgaatgtagcaactgcaggaaggccttccggcagatcagcagcatcctgctgcaccagaggatccacagcggcaagaagagccatgagtgcaacaagtgtggggagagcttcaaccagaggaccaccctcatcctgcacatgagaattcatgatggcaagaaccccttcaagtgcaggaaatgtgggaagctgttcaaccgcatcagccccctgatgctgcaccagaggatccacaccagcgagaagccctacaagtgtgaggagtgtgggaagatgttcagcggcacagccaacctgaagatccaccagaacatccacagcgaggagaagcccttcaagtgcaacaagtgcagcaaggtgtttggccggcagagcttcctgattgagcaccagaggatccacactggagagaagccctaccagtgtgaggagtgtgggaaggccttcagccaccgcatcagcctgaccaggcacaagaggatccacacagaggaccggccctatgaatgtgaccagtgtgggaaggccttcagccagagcgcccacctggcccagcacgagcgcatccacactggagagaagccctacacctgcaagacctgtgggaaggccttcagccagaggaccagcctcatcctgcacgagaggagccacactggagagaagccctatgaatgtaatgaatgtgggaaggccttcagcagcggcagtgacctgatccgccaccagaggagccacagcagcgagaagccctatgaatgttccaaatgtgggaaggcctacagccgcagcagcagcctcatccgccaccagaacacccacagcgaggagaagtag

SEQ ID NO: 176970 - DNA, 1179 bp, synthetic construct
  misc_feature 1..1179: note = Description of Artificial Sequence: Synthetic coding sequence
  source 1..1179: mol_type = other DNA
atgagaattcatgatggcaaggagatcctggactgtgggaaggccctgagccagtgccagagcttcaacatccaccagaagatccacgtggtgggcaatgtgtgccagtgcaggaaatgtgggaaggccttcaaccagatgagcagcctgctgctgcacaagaagatccacaacgggaagaagacccacaagtacaacaagtgtggccggggcttcaagaagaagtctgtgtttgtggtgcacaagagaattcatgctggggagaagatcccagaaaatgccaaggccctgagccagagcctgcagcagaggagccaccacctggagaaccccttcaagtgcaggaaatgtgggaagctgttcaaccgcatcagccccctgatgctgcaccagaggatccacaccagcgagaagccctacaagtgtgacaagtgtgacaagttcttccggcggctgagcaccctcatcctgcacctgcgcatccacaatggagagaagctgtaccgctgcaacaagtgtgagaaggtgtgcaacagacacagcagcctcatccagcaccagaaggtgcacaccaagaagaagaagctgtttgagtgcaaggaatgtgggaagatgttttctggaacagccaacctgaagatccaccagaacatccacagcgaggagaagcccttcaagtgcaacaagtgcagcaaggtgtttggccggcagagcttcctgattgagcaccagaggatccacactggagagaagccctaccagtgtgaagaatgtgggaaggccttcagccaccgcatcagcctgaccaggcacaagaggatccacacagaagatcggccctatgaatgtgaccagtgtgggaaggccttcagccagagcgcccacctggcccagcacgagcgcatccacactggagagaagccctacacctgcaagacctgtgggaaggccttcagccagaggaccagcctcatcctgcacgagaggagccacactggagagaagccctatgagtgcaatgaatgtgggaaggccttcagcagcggcagtgacctgatccgccaccagaggagccacagcagcgagaagccctatgagtgcagcaaatgtgggaaggcctacagccgcagcagcagcctcatccgccaccagaacacccacagcgaggagaaggcctag

SEQ ID NO: 176971 - DNA, 1833 bp, synthetic construct; identical to SEQ ID NO: 176967
  misc_feature 1..1833: note = Description of Artificial Sequence: Synthetic coding sequence
  source 1..1833: mol_type = other DNA

SEQ ID NO: 176972 - DNA, 1728 bp, synthetic construct
  misc_feature 1..1728: note = Description of Artificial Sequence: Synthetic coding sequence
  source 1..1728: mol_type = other DNA
atggccatgagccaggagagcctgaccttcaaggatgtgtttgtggacttcaccctggaggagtggcagcagctggacagcgcccagaagaacctgtacagagatgtgatgctggagaactacagccacctggtgtctgtgggccacctggtgggcaagccagatgtgatcttccggctgggccctggagatgagagctggatggctgatggcggcacccctgtgaggacctgtgctgtgtgggaggtggatgagcagattgaccactacaaggagagccaggacaagttcctgtggcaggccgccttcatcggcaaggagaccctgaaggatgaaagtggccaggagtgcaagatctgcaggaagatcatctacctgaacacagactttgtgtctgtgaagcagaggctgcccaagtactacagctgggagcgctgcagcaagcaccacctgaacttcctgggccagaacagaagctatgtgaggaagaaggatgatggctgcaaggcctactggaaggtgtgcctgcactacaacctgcacaaggcccagcctgctgagcgcttctttgaccccaaccagaggggcaaggccctgcaccagaagcaggccctgaggaagagccagaggagccagacaggagagaagctgtacaagtgcacagaatgtgggaaggtgttcatccagaaggccaacctggtggtgcaccagaggacccacactggagagaagccctatgagtgctgtgaatgtgccaaggccttcagccagaagagcaccctcatcgcccaccagaggacccacactggagagaagccctatgaatgttctgaatgtgggaagaccttcatccagaagagcaccctcatcaagcaccagaggacccacactggagagaagccctttgtgtgtgacaagtgccccaaggccttcaagagcagctaccacctgatcagacatgagaagacccacatccggcaggccttctacaagggcatcaagtgcaccaccagcagcctcatctaccagaggatccacaccagcgagaagccccagtgcagcgagcacggcaaggccagtgatgagaagcccagccccaccaagcactggaggacccacaccaaggagaacatctatgagtgcagcaaatgtgggaagagcttccggggcaagagccacctgtctgtgcaccagaggatccacactggagagaagccctatgagtgcagcatctgtgggaagaccttcagcggcaagagccacctgtctgtgcaccacaggacccacactggagagaagccctatgagtgccgccgctgtgggaaggccttcggggagaagagcaccctgattgtgcaccagaggatgcacactggagagaagccctacaagtgcaatgaatgtgggaaggccttcagcgagaagagccccctcatcaagcaccagaggatccacactggagagcggccctatgagtgcacagactgcaagaaggccttcagcaggaagagcaccctcatcaagcaccagaggatccacactggagagaagccctacaagtgcagtgaatgtgggaaggccttctctgtgaagagcaccctgattgtgcaccacaggacccacactggagagaagccctatgagtgccgggactgtgggaaggccttcagcggcaagagcaccctcatcaagcaccagaggagccacactggagacaagaacctgtag

SEQ ID NO: 176973 - DNA, 1746 bp, synthetic construct
  misc_feature 1..1746: note = Description of Artificial Sequence: Synthetic coding sequence
  source 1..1746: mol_type = other DNA
atggccatgagccaggagagcctgaccttcaaggatgtgtttgtggacttcaccctggaggagtggcagcagctggacagcgcccagaagaacctgtacagagatgtgatgctggagaactacagccacctggtgtctgtgggccacctggtgggcaagccagatgtgatcttccggctgggccctggagatgagagctggatggctgatggcggcacccctgtgaggacctgtgctggagaagatagacctgaggtgtgggaggtggatgagcagattgaccactacaaggagagccaggacaagttcctgtggcaggccgccttcatcggcaaggagaccctgaaggatgaaagtggccaggagtgcaagatctgcaggaagatcatctacctgaacacagactttgtgtctgtgaagcagaggctgcccaagtactacagctgggagcgctgcagcaagcaccacctgaacttcctgggccagaacagaagctatgtgaggaagaaggatgatggctgcaaggcctactggaaggtgtgcctgcactacaacctgcacaaggcccagcctgctgagcgcttctttgaccccaaccagaggggcaaggccctgcaccagaagcaggccctgaggaagagccagaggagccagacaggagagaagctgtacaagtgcacagaatgtgggaaggtgttcatccagaaggccaacctggtggtgcaccagaggacccacactggagagaagccctatgagtgctgtgaatgtgccaaggccttcagccagaagagcaccctcatcgcccaccagaggacccacactggagagaagccctatgaatgttctgaatgtgggaagaccttcatccagaagagcaccctcatcaagcaccagaggacccacactggagagaagccctttgtgtgtgacaagtgccccaaggccttcaagagcagctaccacctgatcagacatgagaagacccacatccggcaggccttctacaagggcatcaagtgcaccaccagcagcctcatctaccagaggatccacaccagcgagaagccccagtgcagcgagcacggcaaggccagtgatgagaagcccagccccaccaagcactggaggacccacaccaaggagaacatctatgagtgcagcaaatgtgggaagagcttccggggcaagagccacctgtctgtgcaccagaggatccacactggagagaagccctatgagtgcagcatctgtgggaagaccttcagcggcaagagccacctgtctgtgcaccacaggacccacactggagagaagccctatgagtgccgccgctgtgggaaggccttcggggagaagagcaccctgattgtgcaccagaggatgcacactggagagaagccctacaagtgcaatgaatgtgggaaggccttcagcgagaagagccccctcatcaagcaccagaggatccacactggagagcggccctatgagtgcacagactgcaagaaggccttcagcaggaagagcaccctcatcaagcaccagaggatccacactggagagaagccctacaagtgcagtgaatgtgggaaggccttctctgtgaagagcaccctgattgtgcaccacaggacccacactggagagaagccctatgagtgccgggactgtgggaaggccttcagcggcaagagcaccctcatcaagcaccagaggagccacactggagacaagaacctgtag

SEQ ID NO: 176974 - DNA, 3714 bp, synthetic construct
  misc_feature 1..3714: note = Description of Artificial Sequence: Synthetic coding sequence
  source 1..3714: mol_type = other DNA
atgggagacatgaagaccccagactttgatgacctgctggccgcctttgacatcccagacattgatgccaatgaggccatccacagcggcccagaagaaaatgaaggacctgggggccctgggaagccagagcccggggtgggcagcgagagcgaggacacagctgctgccagcgctggagatggccctggggtgcctgcccaggccagtgaccacggcctgcccccaccagacatctctgtggtgtctgtgattgtgaagaacacagtgtgcccagagcagagcgaggccctggccggcggcagcgctggagatggagcccaggccgccggcgtgaccaaggagggccctgtgggcccccacaggatgcagaatggatttggcagccctgagcccagcctgcccggcaccccccacagccctgcccctccttctgggggcacctggaaggagaagggcatggagggcaagacccccctggacctgtttgcccacttcggccctgagcccggggaccacagcgaccccctgccccccagcgcccccagccccacccgggagggcgccctgaccccaccacccttccccagcagctttgagctggcccaggagaatggacctggcatgcagccccctgtgagcagcccccccctgggcgccctgaagcaggagagctgcagcccccaccacccccaggtgctggcccagcagggcagcggcagcagccccaaggccacagacatcccagccagcgccagccccccacctgtggccggcgtgcccttcttcaagcagagccctggccaccagagccccctggccagccccaaggtgcctgtgtgccagcccctgaaggaggaggatgatgatgagggccctgtggacaagagcagccctggcagcccccagagccccagcagtggagctgaggccgcagatgaggacagcaatgacagccctgccagcagcagcagccggcccctgaaggtgcgcatcaagaccatcaagaccagctgtggcaacatcaccaggacagtgacccaggtgcccagcgaccctgaccccccagcccccctggccgagggcgccttcctggccgaggccagcctgctgaagctgagccctgccacccccaccagcgagggccccaaggtggtgtctgtgcagctgggagatggcacccggctgaagggcaccgtgctgcctgtggccaccatccagaatgccagcacagccatgctgatggccgcctctgtggccaggaaggctgtggtgctgcccggcggcacagccaccagccccaagatgattgccaagaatgtgctgggcctggtgccccaggccctgcccaaggcagatggccgggccggcctgggcaccggcggccagaaggtgaatggagcctctgtggtgatggtgcagcccagcaagacagccaccggccccagcactggaggcggcaccgtcatcagcaggacccagagcagcctggtggaggccttcaacaagatcctgaacagcaagaacctgctgcctgcctaccggcccaacctgagccccccagctgaggccggcctggccctgcccccaacaggctaccgctgcctggagtgtggagatgccttcagcctggagaagagcctggcccggcactatgaccggcgctccatgagaattgaggtgacctgcaaccactgtgcccggcggctggtgttcttcaacaagtgcagcctgctgctgcacgcccgggagcacaaggacaagggcctggtgatgcagtgcagccacctggtgatgaggcctgtggccctggaccagatggtgggccagcctgacatcacccccctgctgcctgtggccgtgccccctgtgtctggccccctggccctgcctgccctgggcaaaggagagggcgccatcaccagcagcgccatcaccaccgtggccgctgaggcccctgtgctgcccctgagcacagagcccccagctgccccagccaccagcgcctacacctgcttccgctgcctggagtgcaaggagcagtgccgggacaaggccggcatggccgcccacttccagcagctgggccccccagcccctggggccaccagcaatgtgtgccccacctgccccatgatgctgcccaaccgctgcagcttcagcgcccaccagaggatgcacaagaacagacctcctcatgtgtgcccagaatgtggcggcaacttcctgcaggccaacttccagacccacctgcgggaggcctgcctgcacgtgtcccggcgggtgggctaccgctgccccagctgcagcgtggtgtttggaggagtgaacagcatcaagagccacatccagaccagccactgtgaggtgttccacaagtgccccatctgccccatggccttcaagagcggccccagcgcccacgcccacctgtacagccagcaccccagcttccagacccagcaggccaagctgatctacaagtgtgccatgtgtgacaccgtcttcacccacaagcccctgctgagcagccactttgaccagcacctgctgccccagagggtgtctgtgttcaagtgccccagctgccccctgctgtttgcccagaagaggaccatgctggagcacctgaagaacacccaccagagcggccgcctggaggagacagctgggaagggggccggcggggccctgctgacccccaagacagagcctgaggagctggccgtgtcccagggcggggccgccccagccacagaggagagcagcagcagcagcgaggaggaggaggtgcccagcagccctgagccccccaggcctgccaagaggccccggcgggagctgggcagcaagggcctgaagggcggcggcggcggccctgggggctggacctgtggcctgtgccacagctggttccctgagagagatgaatatgtggcccacatgaagaaggagcacggcaagtctgtgaagaagttcccctgccgcctgtgtgagaggagcttctgcagcgcccccagcctgcggagacatgtgcgggtgaaccacgagggcatcaagagggtgtacccctgccgctactgcacagagggcaagaggaccttcagcagccgcctcatcctggagaagcacgtgcaggtgagacatggcctgcagctgggcgcccagagccctggccggggcaccaccctggcccggggcagcagcgcccgggcccagggccctggcaggaagaggcggcagagcagtgacagctgcagcgaggagccagacagcaccaccccaccagccaagagcccccggggcggccctggcagcggcggccacggccccctgcgctaccgcagcagcagcagcacagagcagagcctgatgatgggcctgcgggtggaggatggagcccagcagtgcctggactgtggcctgtgctttgccagccctggcagcctgagccgccaccgcttcatcagccacaagaagagaagaggagtgggcaaggccagcgccctgggcctgggagatggagaggaggaggccccacccagcagaagtgaccctgatggaggagacagccccctgcctgccagcggcggccccctgacctgcaaggtgtgtgggaagagctgtgacagccccctgaacctgaagacccacttccgcacccacggcatggccttcatccgggcccggcagggcgctgtgggggacaactag

SEQ ID NO: 176975 - DNA, 3714 bp, synthetic construct; identical to SEQ ID NO: 176974
  misc_feature 1..3714: note = Description of Artificial Sequence: Synthetic coding sequence
  source 1..3714: mol_type = other DNA

SEQ ID NO: 176976 - DNA, 3312 bp, synthetic construct
  misc_feature 1..3312: note = Description of Artificial Sequence: Synthetic coding sequence
  source 1..3312: mol_type = other DNA
atgggagacatgaagaccccagactttgatgacctgctggccgcctttgacatcccagacattgatgccaatgaggccatccacagcggcccagaagaaaatgaaggacctgggggccctgggaagccagagcccggggtgggcagcgagagcgaggacacagctgctgccagcgctggagatggccctggggtgcctgcccaggccagtgaccacggcctgcccccaccagacatctctgtggtgtctgtgattgtgaagaacacagtgtgcccagagcagagcgaggccctggccggcggcagcgctggagatggagcccaggccgccggcgtgaccaaggagggccctgtgggcccccacaggatgcagaatggatttggcagccctgagcccagcctgcccggcaccccccacagccctgcccctccttctgggggcacctggaaggagaagggcatggagggcaagacccccctggacctgtttgcccacttcggccctgagcccggggaccacagcgaccccctgccccccagcgcccccagccccacccgggagggcgccctgaccccaccacccttccccagcagctttgagctggcccaggagaatggacctggcatgcagccccctgtgagcagcccccccctgggcgccctgaagcaggagagctgcagcccccaccacccccaggtgctggcccagcagggcagcggcagcagccccaaggccacagacatcccagccagcgccagccccccacctgtggccggcgtgcccttcttcaagcagagccctggccaccagagccccctggccagccccaaggtgcctgtgtgccagcccctgaaggaggaggatgatgatgagggccctgtggacaagagcagccctggcagcccccagagccccagcagtggagctgaggccgcagatgaggacagcaatgacagccctgccagcagcagcagccggcccctgaaggtgcgcatcaagaccatcaagaccagctgtggcaacatcaccaggacagtgacccaggtgcccagcgaccctgaccccccagcccccctggccgagggcgccttcctggccgaggccagcctgctgaagctgagccctgccacccccaccagcgagggccccaaggtggtgtctgtgcagctgggagatggcacccggctgaagggcaccgtgctgcctgtggccaccatccagaatgccagcacagccatgctgatggccgcctctgtggccaggaaggctgtggtgctgcccggcggcacagccaccagccccaagatgattgccaagaatgtgctgggcctggtgccccaggccctgcccaaggcagatggccgggccggcctgggcaccggcggccagaaggtgaatggagcctctgtggtgatggtgcagcccagcaagacagccaccggccccagcactggaggcggcaccgtcatcagcaggacccagagcagcctggtggaggccttcaacaagatcctgaacagcaagaacctgctgcctgcctaccggcccaacctgagccccccagctgaggccggcctggccctgcccccaacaggctaccgctgcctggagtgtggagatgccttcagcctggagaagagcctggcccggcactatgaccggcgctccatgagaattgaggtgacctgcaaccactgtgcccggcggctggtgttcttcaacaagtgcagcctgctgctgcacgcccgggagcacaaggacaagggcctggtgatgcagtgcagccacctggtgatgaggcctgtggccctggaccagatggtgggccagcctgacatcacccccctgctgcctgtggccgtgccccctgtgtctggccccctggccctgcctgccctgggcaaaggagagggcgccatcaccagcagcgccatcaccaccgtggccgctgaggcccctgtgctgcccctgagcacagagcccccagctgccccagccaccagcgcctacacctgcttccgctgcctggagtgcaaggagcagtgccgggacaaggccggcatggccgcccacttccagcagctgggccccccagcccctggggccaccagcaatgtgtgccccacctgccccatgatgctgcccaaccgctgcagcttcagcgcccaccagaggatgcacaagaacagacctcctcatgtgtgcccagaatgtggcggcaacttcctgcaggccaacttccagacccacctgcgggaggcctgcctgcacgtgtcccggcgggtgggctaccgctgccccagctgcagcgtggtgtttggaggagtgaacagcatcaagagccacatccagaccagccactgtgaggtgttccacaagtgccccatctgccccatggccttcaagagcggccccagcgcccacgcccacctgtacagccagcaccccagcttccagacccagcaggccaagctgatctacaagtgtgccatgtgtgacaccgtcttcacccacaagcccctgctgagcagccactttgaccagcacctgctgccccagagggtgtctgtgttcaagtgccccagctgccccctgctgtttgcccagaagaggaccatgctggagcacctgaagaacacccaccagagcggccgcctggaggagacagctgggaagggggccggcggggccctgctgacccccaagacagagcctgaggagctggccgtgtcccagggcggggccgccccagccacagaggagagcagcagcagcagcgaggaggaggaggtgcccagcagccctgagccccccaggcctgccaagaggccccggcgggagctgggcagcaagggcctgaagggcggcggcggcggccctgggggctggacctgtggcctgtgccacagctggttccctgagagagatgaatatgtggcccacatgaagaaggagcacggcaagtctgtgaagaagttcccctgccgcctgtgtgagaggagcttctgcagcgcccccagcctgcggagacatgtgcgggtgaaccacgagggcatcaagagggtgtacccctgccgcagcaagggccctggcctgcgggctgtgcccctgctgcccagctgccccctgcccttccaggtgctgcaccggggcaagacccacctgcagcagcccccagacccccgggagacctgccccggccctgcccggctggccgcctggggccctgtgccctggccaggggaccacctgggcagcggcttccagtgccagagccctggggcccggtctgagaccccacctgtgttctag

SEQ ID NO: 176977 - DNA, 2121 bp, synthetic construct
  misc_feature 1..2121: note = Description of Artificial Sequence: Synthetic coding sequence
  source 1..2121: mol_type = other DNA
tgaacagtgctgcctgtggccaccatccagaatgccagcacagccatgctgatggccgcctctgtggccaggaaggctgtggtgctgcccggcggcacagccaccagccccaagatgattgccaagaatgtgctgggcctggtgccccaggccctgcccaaggcagatggccgggccggcctgggcactggaggccagaaggtgaatggagcctctgtggtgatggtgcagcccagcaagacagccaccggccccagcactggaggcggcaccgtcatcagcaggacccagagcagcctggtggaggccttcaacaagatcctgaacagcaagaacctgctgcctgcctaccggcccaacctgagccccccagctgaggccggcctggccctgccccccaccggctaccgctgcctggagtgtggagatgccttcagcctggagaagagcctggcccggcactatgacagaagatccatgagaattgaggtgacctgcaaccactgtgcccggcggctggtgttcttcaacaagtgcagcctgctgctgcacgcccgggagcacaaggacaagggcctggtgatgcagtgcagccacctggtgatgaggcctgtggccctggaccagatggtgggccagcctgacatcacccccctgctgcctgtggccgtgccccctgtgtctggccccctggccctgcctgccctgggcaagggggagggcgccatcaccagcagcgccatcaccaccgtggccgctgaggcccctgtgctgcccctgagcacagagcccccagctgccccagccaccagcgcctacacctgcttccgctgcctggagtgcaaggagcagtgccgggacaaggccggcatggccgcccacttccagcagctgggccccccagcccctggggccaccagcaatgtgtgccccacctgccccatgatgctgcccaaccgctgcagcttcagcgcccaccagaggatgcacaagaaccggcccccccacgtgtgcccagaatgtggcggcaacttcctgcaggccaacttccagacccacctgcgggaggcctgcctgcacgtgtccagaagagtgggctaccgctgccccagctgcagcgtggtgtttggaggagtgaacagcatcaagagccacatccagaccagccactgtgaggtgttccacaagtgccccatctgccccatggccttcaagagcggccccagcgcccacgcccacctgtacagccagcaccccagcttccagacccagcaggccaagctgatctacaagtgtgccatgtgtgacacagtgttcacccacaagcccctgctgagcagccactttgaccagcacctgctgccccagagggtgtctgtgttcaagtgccccagctgccccctgctgtttgcccagaagaggaccatgctggagcacctgaagaacacccaccagagcggccgcctggaggagacagctggaaaaggagctggaggagccctgctgacccccaagacagagcctgaggagctggccgtgtcccagggcggggccgccccagccacagaggagagcagcagcagcagcgaggaggaggaggtgcccagcagccctgagccccccaggcctgccaagaggccccggcgggagctgggcagcaagggcctgaagggcggcggcggcggccctgggggctggacctgtggcctgtgccacagctggttccctgagagagatgaatatgtggcccacatgaagaaggagcacggcaagtctgtgaagaagttcccctgccgcctgtgtgagaggagcttctgcagcgcccccagcctgcggcggcacgtgcgggtgaaccacgagggcatcaagagggtgtacccctgccgcagcaaaggacctggcctgcgggctgtgcccctgctgcccagctgccccctgcccttccaggtgctgcaccggggcaagacccacctgcagcagcccccagacccccgggagacctgccccggccctgcccggctggccgcctggggccctgtgccctggccaggggaccacctgggcagcggcttccagtgccagagccctggggcccggtctgagaccccacctgtgttctag

SEQ ID NO: 176978 - DNA, 450 bp, synthetic construct
  misc_feature 1..450: note = Description of Artificial Sequence: Synthetic coding sequence
  source 1..450: mol_type = other DNA
atgccctgctgcagccaccggcgctgcagagaagatcctggcaccagcgagagccaggagatggaggagtgggccctgctggacatcagccagaggaagctgtacaaggaggtgatgctggagaccttcaggaacctgacctctgtgggcaagtcctggaaggaccagaacatcgagtatgagtaccagaaccccaggaggaacttccgcagcctgattgagaagaaggtgaatgagatcaaggatgacagccactgtggggagaccttcacccaggtgcctgatgaccggctgaacttccaggagaagaaggccagccctgagatcaagagctgtgacagctttgtgtgtggggaggtgggcctgggcaacagcagcttcaacatgaacatccggggggacatcggccacaaggcctatgagtaccaggagtatggccccaagccctag

SEQ ID NO: 176979 - DNA, 1701 bp, synthetic construct
  misc_feature 1..1701: note = Description of Artificial Sequence: Synthetic coding sequence
  source 1..1701: mol_type = other DNA
atgccctgctgcagccaccggcgctgcagagaagatcctggcaccagcgagagccaggagatggaccctgtggcctttgatgatgtggccgtgaacttcacccaggaggagtgggccctgctggacatcagccagaggaagctgtacaaggaggtgatgctggagaccttcaggaacctgacctctgtgggcaagtcctggaaggaccagaacatcgagtatgagtaccagaaccccaggaggaacttccgcagcctgattgagaagaaggtgaatgagatcaaggatgacagccactgtggggagaccttcacccaggtgcctgatgaccggctgaacttccaggagaagaaggccagccctgagatcaagagctgtgacagctttgtgtgtggggaggtgggcctgggcaacagcagcttcaacatgaacatccggggggacatcggccacaaggcctatgagtaccaggagtatggccccaagccctgcaagtgccagcagcccaagaaggccttccgctaccaccccagcttccgcaccccccagagggaccacactggagagaagccctatgcctgcaaggaatgtgggaagaccttcatcagccacagcagcatccagagacatgtggtgatgcacagcggagatggcccctacaagtgcaagttctgtgggaaggccttccactgcctgagcctgtacctgatccacgagcgcatccacactggagagaagccctatgagtgcaagcagtgtgggaagagcttctcctacagcgccaccctgcgcatccacgagaggacccacactggagagaagccctatgagtgccagcagtgtgggaaggccttccacagcccccgctgctacagaagacatgagcgcatccacactggagagaaggcctaccagtgcaaggaatgtgggaaggccttcacctgcccccagtatgtgcgcatccacgagaggacccacagcaggaagaagccctatgaatgtacccagtgtgggaaggccctgagcagcctgaccagcttccagacccacatccgcatgcacagcggggagcggccctatgagtgcaagatctgtgggaagggcttctgcagcgccaacagcttccagagacatgagaagacccacagcggggagaagccctacaagtgcaagcagtgtgggaaggccttcatccacagcagcagcctgcgctaccacgagcgcatccacactggagagaagccctatgagtgcaagcagtgtgggaaggccttccgcagcagcagccacctgcagctgcacggccgcacccacactggagagaagccctatgagtgccaggagtgtgggaaggccttccgctccatgaagaacctgcagagccatgagaggacccagacccacgtgcgcatccacagcggggagcggccctacaagtgcaagctgtgtgggaagggcttctactgccccaagagcctgcagagacatgagaagacccacactggagagaagctgtatgagtgcaagcagtgtggggaggccttcagcagcagcagcagcttccgctaccacgagaggacccacactggagagaagccctacaagtgcaagcagtgtgggaaggccttccgggccgcctctgtgctgaggatgcacggccgcacccaccctgaggacaagccctatgagtgcaagcagtag

SEQ ID NO: 176980 - DNA, 2061 bp, synthetic construct
  misc_feature 1..2061: note = Description of Artificial Sequence: Synthetic coding sequence
  source 1..2061: mol_type = other DNA
atggaggtggtgacctttggagatgtggccgtgcacttcagccgggaggagtggcagtgcctggaccccggccagagggccctgtaccgggaggtgatgctggagaaccacagctctgtggccggcctggccggcttcctggtgttcaagccagagctgatcagccggctggagcagggcgaggagccctgggtgctggacctgcagggcgctgagggcacagaggcccccaggaccagcaagacagacagcaccatcagaacagaaaatgagcaggcctgtgaggacatggacatcctgaagtctgagagctatggaacagtggtgcgcatcagcccccaggacttcccccagaaccctggctttggagatgtgtctgacagcgaggtgtggctggacagccacctgggcagccctggcctgaaggtgacaggcttcaccttccagaacaactgcctgaatgaggagaccgtggtgcccaagaccttcaccaaggatgccccccagggctgcaaggagctgggcagcagcggcctggactgccagcccctggagagccagggcgagagcgctgagggcatgagccagagatgtgaggagtgtgggaagggcatccgggccaccagtgacatcgccctgcactgggagatcaacacccagaagatcagccgctgccaggagtgccagaagaagctgagtgactgcctgcagggcaagcacaccaacaactgccacggggagaagccctatgaatgtgccgagtgtgggaaggtgttccggctgtgcagccagctgaaccagcaccagaggatccacactggagagaagcccttcaagtgcacagaatgtgggaaggccttccggctgagcagcaagctgatccagcaccagaggatccacactggagagaagccctaccgctgtgaggagtgtgggaaggccttcggccagagcagcagcctcatccaccaccagaggatccacactggagagcggccctacggctgccgggagtgtgggaaggccttcagccagcagagccagctggtgcgccaccagaggacccacactggagagcggccctacccctgcaaggaatgtgggaaggccttcagccagagcagcaccctggcccagcaccagaggatgcacactggagagaaggcccagatcctgaaggccagtgacagccccagcctggtggcccaccagagaattcatgctgtggagaagcccttcaagtgtgatgaatgtgggaaggccttccgctggatcagccggctgagccagcaccagctgatccacactggagagaagccctacaagtgcaacaagtgcaccaaggccttcggctgcagcagccgcctcatccgccaccagaggacccacactggagagaagcccttcaagtgtgatgaatgtgggaagggctttgtgcagggcagccacctgatccagcaccagaggatccacactggagagaagccctacgtgtgcaatgactgtgggaaggccttcagccagagcagcagcctcatctaccaccagaggatccacaagggggagaagccctatgagtgcctgcagtgtgggaaggccttctccatgagcacccagctgaccatccaccagagggtgcacactggagagcggccctacaagtgcaatgaatgtgggaaggccttcagccagaacagcaccctcttccagcaccagatcatccacgccggcgtgaagccctatgagtgcagtgaatgtgggaaggccttcagccgcagcagctacctgattgagcaccagaggatccacacccgggcccagtggttctatgaatatggaaatgccctggagggcagcacctttgtgtccaggaagaaggtgaacaccatcaagaagctgcaccagtgtgaggactgtgagaagatcttccgctggaggagccacctgatcatccaccagaggatccacactggagagaagccctacaagtgcaatgactgtgggaaggccttcaacagaagcagccggctgacccagcaccagaagatccacatgggctag

SEQ ID NO: 176981 - DNA, 2094 bp, synthetic construct
  misc_feature 1..2094: note = Description of Artificial Sequence: Synthetic coding sequence
  source 1..2094: mol_type = other DNA
atgggcttcctgggctgctggtgtgtgtccttccaggaggtggtgacctttggagatgtggccgtgcacttcagccgggaggagtggcagtgcctggaccccggccagagggccctgtaccgggaggtgatgctggagaaccacagctctgtggccggcctggccggcttcctggtgttcaagccagagctgatcagccggctggagcagggcgaggagccctgggtgctggacctgcagggcgctgagggcacagaggcccccaggaccagcaagacagacagcaccatcagaacagaaaatgagcaggcctgtgaggacatggacatcctgaagtctgagagctatggcaccgtggtgcgcatcagcccccaggacttcccccagaaccctggctttggagatgtgtctgattctgaggtgtggctggacagccacctgggcagccctggcctgaaggtgacaggcttcaccttccagaacaactgcctgaatgaggagaccgtggtgcccaagaccttcaccaaggatgccccccagggctgcaaggagctgggcagcagcggcctggactgccagcccctggagagccagggcgagagcgctgagggcatgagccagagatgtgaagaatgtgggaagggcatccgggccaccagtgacatcgccctgcactgggagatcaacacccagaagatcagccgctgccaggagtgccagaagaagctgagtgactgcctgcagggcaagcacaccaacaactgccacggggagaagccctatgaatgtgctgaatgtgggaaggtgttccggctgtgcagccagctgaaccagcaccagaggatccacactggagagaagcccttcaagtgcacagaatgtgggaaggccttccggctgagcagcaagctgatccagcaccagaggatccacactggagagaagccctaccgctgtgaagaatgtgggaaggccttcggccagagcagcagcctcatccaccaccagaggatccacactggagagcggccctacggctgcagagaatgtgggaaggccttcagccagcagagccagctggtgcgccaccagaggacccacactggagagcggccctacccctgcaaggaatgtgggaaggccttcagccagagcagcaccctggcccagcaccagaggatgcacactggagagaaggcccagatcctgaaggccagtgacagccccagcctggtggcccaccagagaattcatgctgtggagaagcccttcaagtgtgatgaatgtgggaaggccttccgctggatcagccggctgagccagcaccagctgatccacactggagagaagccctacaagtgcaacaagtgcaccaaggccttcggctgcagcagccgcctcatccgccaccagaggacccacactggagagaagcccttcaagtgtgatgaatgtgggaaaggatttgtgcagggcagccacctgatccagcaccagaggatccacactggagagaagccctacgtgtgcaatgactgtgggaaggccttcagccagagcagcagcctcatctaccaccagaggatccacaagggggagaagccctatgaatgtctgcagtgtgggaaggccttctccatgagcacccagctgaccatccaccagagggtgcacactggagagcggccctacaagtgcaatgaatgtgggaaggccttcagccagaacagcaccctcttccagcaccagatcatccatgctggggtgaagccctatgaatgttctgaatgtgggaaggccttcagccgcagcagctacctgattgagcaccagaggatccacacccgggcccagtggttctatgaatatggaaatgccctggagggcagcacctttgtgtccaggaagaaggtgaacaccatcaagaagctgcaccagtgtgaggactgtgagaagatcttccgctggaggagccacctgatcatccaccagaggatccacactggagagaagccctacaagtgcaatgactgtgggaaggccttcaacagaagcagccggctgacccagcaccagaagatccacatgggctag

SEQ ID NO: 176982 - DNA, 447 bp, synthetic construct
  misc_feature 1..447: note = Description of Artificial Sequence: Synthetic coding sequence
  source 1..447: mol_type = other DNA
atggaggtggtgacctttggagatgtggccgtgcacttcagccgggaggagtggcagtgcctggaccccggccagagggccctgtaccgggaggtgatgctggagaaccacagctctgtggccggcctggccggcttcctggtgttcaagccagagctgatcagccggctggagcagggcgaggagccctgggtgctggacctgcagggcgctgagggcacagaggcccccaggaccagcaagacaggcttcctgggccggcccaccatgggccaggagcccaggcacccccacgcccccccagccacccctgtgcccggcctgcccaagcactgcagccagaggctgaccctgcccccacctggcctgagcagcagccccctgggccacttcctggtgcatgaccaggacagaagaagaggcaccagcgccatctggatggtgtag

SEQ ID NO: 176983 - DNA, 2061 bp, synthetic construct; identical to SEQ ID NO: 176980
  misc_feature 1..2061: note = Description of Artificial Sequence: Synthetic coding sequence
  source 1..2061: mol_type = other DNA

SEQ ID NO: 176984 - DNA, 1773 bp, synthetic construct
  misc_feature 1..1773: note = Description of Artificial Sequence: Synthetic coding sequence
  source 1..1773: mol_type = other DNA
atggacatcctgaagtctgagagctatggaacagtggtgcgcatcagcccccaggacttcccccagaaccctggctttggagatgtgtctgacagcgaggtgtggctggacagccacctgggcagccctggcctgaaggtgacaggcttcaccttccagaacaactgcctgaatgaggagaccgtggtgcccaagaccttcaccaaggatgccccccagggctgcaaggagctgggcagcagcggcctggactgccagcccctggagagccagggcgagagcgctgagggcatgagccagagatgtgaggagtgtgggaagggcatccgggccaccagtgacatcgccctgcactgggagatcaacacccagaagatcagccgctgccaggagtgccagaagaagctgagtgactgcctgcagggcaagcacaccaacaactgccacggggagaagccctatgaatgtgccgagtgtgggaaggtgttccggctgtgcagccagctgaaccagcaccagaggatccacactggagagaagcccttcaagtgcacagaatgtgggaaggccttccggctgagcagcaagctgatccagcaccagaggatccacactggagagaagccctaccgctgtgaggagtgtgggaaggccttcggccagagcagcagcctcatccaccaccagaggatccacactggagagcggccctacggctgccgggagtgtgggaaggccttcagccagcagagccagctggtgcgccaccagaggacccacactggagagcggccctacccctgcaaggaatgtgggaaggccttcagccagagcagcaccctggcccagcaccagaggatgcacactggagagaaggcccagatcctgaaggccagtgacagccccagcctggtggcccaccagagaattcatgctgtggagaagcccttcaagtgtgatgaatgtgggaaggccttccgctggatcagccggctgagccagcaccagctgatccacactggagagaagccctacaagtgcaacaagtgcaccaaggccttcggctgcagcagccgcctcatccgccaccagaggacccacactggagagaagcccttcaagtgtgatgaatgtgggaagggctttgtgcagggcagccacctgatccagcaccagaggatccacactggagagaagccctacgtgtgcaatgactgtgggaaggccttcagccagagcagcagcctcatctaccaccagaggatccacaagggggagaagccctatgagtgcctgcagtgtgggaaggccttctccatgagcacccagctgaccatccaccagagggtgcacactggagagcggccctacaagtgcaatgaatgtgggaaggccttcagccagaacagcaccctcttccagcaccagatcatccacgccggcgtgaagccctatgagtgcagtgaatgtgggaaggccttcagccgcagcagctacctgattgagcaccagaggatccacacccgggcccagtggttctatgaatatggaaatgccctggagggcagcacctttgtgtccaggaagaaggtgaacaccatcaagaagctgcaccagtgtgaggactgtgagaagatcttccgctggaggagccacctgatcatccaccagaggatccacactggagagaagccctacaagtgcaatgactgtgggaaggccttcaacagaagcagccggctgacccagcaccagaagatccacatgggctag

SEQ ID NO: 176985 - DNA, 1470 bp, synthetic construct
  misc_feature 1..1470: note = Description of Artificial Sequence: Synthetic coding sequence
  source 1..1470: mol_type = other DNA
atgaaggagctggaccccaagaatgacatcagcgaggacaagctgtctgtggtgggggaggccaccggcggccccaccagaaatggagcccggggccctggcagcgagggcgtgtgggagcccggctcctggccagagcggcccagaggagatgctggagctgagtgggagcccctgggcatcccccagggcaacaagctgctgggcggctctgtgcctgcctgccacgagctgaaggcctttgccaaccagggctgtgtgctggtgcccccccggctggatgaccccacagagaagggggcctgcccccctgtgcggcggggcaagaacttcagcagcaccagtgacctgagcaagccacccatgccctgtgaggagaagaagacctatgactgcagtgaatgtgggaaggccttcagccgcagcagcagcctcatcaagcaccagaggatccacactggagagaagccctttgaatgtgacacctgtgggaagcacttcatcgagaggagcagcctgaccatccaccagagggtgcacactggagagaagccctatgcctgtggggactgtgggaaggccttcagccagaggatgaacctgactgtgcaccagaggacccacactggagagaagccctacgtgtgtgatgtgtgtgggaaggccttcaggaagaccagcagcctgacccagcacgagcgcatccacactggagagaagccctatgcctgtggggactgtgggaaggccttcagccagaacatgcacctgattgtgcaccagaggacccacactggagagaagccctacgtgtgcccagaatgtggccgggccttcagccagaacatgcacctgacagagcaccagaggacccacactggagagaagccctatgcctgcaaggaatgtgggaaggccttcaacaagagcagcagcctgaccctgcaccagaggaaccacactggagagaagccctacgtgtgtggggagtgtgggaaggccttcagccagagcagctacctgatccagcaccagcgcttccacatcggcgtgaagccctttgaatgttctgaatgtgggaaggccttcagcaagaacagcagcctgacccagcaccagaggatccacactggagagaagccctatgagtgctacatctgcaagaagcacttcaccggccgcagcagcctcatcgtgcaccagatcgtgcacactggagagaagccctacgtgtgtggggagtgtgggaaggccttcagccagagcgcctacctgattgagcaccagaggatccacactggagagaagccctaccgctgtggccagtgtgggaagagcttcatcaagaacagcagcctgactgtgcaccagaggatccacactggagagaagccctaccgctgtggggagtgtgggaagaccttcagcaggaacaccaacctgaccaggcacctgcgcatccacacctag

SEQ ID NO: 176986 - DNA, 2286 bp, synthetic construct
  misc_feature 1..2286: note = Description of Artificial Sequence: Synthetic coding sequence
  source 1..2286: mol_type = other DNA
atggattctgggggcggcagcctgggcctgcacaccccagacagcaggatggcccacaccatgatcatgcaggactttgtggccggcatggccggcacagcccacattgatggagaccacatcgtggtgtctgtgcctgaggccgtgctggtgtctgatgtggtgacagatgatggcatcaccctggaccacggcctggccgctgaggtggtgcacggccctgacatcatcacagaaacagatgtggtgacagagggcgtcatcgtgcctgaggccgtgctggaggctgatgtggccatcgaggaggacctggaggaggatgatggagaccacatcctgaccagcgagctgatcacagaaacagtgcgggtgcctgagcaggtgtttgtggccgacctggtgacaggccccaacggccacctggagcacgtggtgcaggactgtgtgtctggagtggacagccccaccatggtgtctgaggaggtgctggtgaccaacagcgacacagaaacagtcatccaggccgccggcggcgtgcccggcagcacagtgaccatcaagacagaagatgatgatgatgatgatgtgaagagcaccagcgaggactacctgatgatcagcctggatgatgtgggggagaagctggagcacatgggcaacacccccctgaagattggaagtgatggcagccaggaggatgccaaggaggatggctttggaagtgaggtgatcaaggtgtacatcttcaaggccgaggccgaggatgatgtggagattggaggaacagagatcgtgacagagagcgagtacaccagcggccacagcgtggccggcgtgctggaccagagcaggatgcagcgggagaagatggtgtacatggctgtgaaggacagcagccaggaggaggatgacatcagagatgaaagaagagtgtccagaagatatgaggactgccaggccagcggcaacaccctggacagcgccctggagagccgcagcagcacagctgcccagtacctgcagatctgtgatggcatcaacaccaacaaggtgctgaagcagaaggccaagaagagaagaagaggagagacccggcagtggcagacagctgtgatcattggaccagatggccagcccctgactgtgtacccctgccacatctgcaccaagaagttcaagagccggggcttcctgaagaggcacatgaagaaccacccagaccacctgatgaggaagaagtaccagtgcacagactgtgacttcaccaccaacaagaaggtgtccttccacaaccacctggagagccacaagctgatcaacaaggtggacaagacccatgagttcacagagtacacccggcgctaccgggaggccagccccctgagcagcaacaagctgatcctgcgggacaaggagcccaagatgcacaagtgcaagtactgtgactatgaaacagctgagcagggcctgctgaacagacacctgctggccgtgcacagcaagaacttcccccacgtgtgtgtggagtgtgggaagggcttccgccaccccagcgagctgaagaagcacatgaggacccacactggagagaagccctaccagtgccagtactgcatcttccgctgtgccgaccagagcaacctgaagacccacatcaagagcaagcacggcaacaacctgccctacaagtgtgagcactgcccccaggcctttggagatgagcgggagctgcagaggcacctggacctcttccagggccacaagacccaccagtgcccccactgtgaccacaagagcaccaacagcagtgacctgaagaggcacatcatctctgtgcacaccaaggacttcccccacaagtgtgaggtgtgtgacaagggcttccaccggcccagcgagctgaagaagcacagcgacatccacaagggcaggaagatccaccagtgccgccactgtgacttcaagaccagtgaccccttcatcctgagcggccacatcctgtctgtgcacaccaaggaccagcccctgaagtgcaagcgctgcaagaggggcttccggcagcagaatgagctgaagaagcacatgaagacccacactggaaggaagatctaccagtgtgagtactgtgagtacagcaccacagatgccagcggcttcaagagacatgtgatcagcatccacaccaaggactacccccaccgctgtgagttctgcaagaagggcttcagaagacccagcgagaagaaccagcacatcatgaggcaccacaaggaggccctgatgtag

SEQ ID NO: 176987 - DNA, 2286 bp, synthetic construct; identical to SEQ ID NO: 176986
  misc_feature 1..2286: note = Description of Artificial Sequence: Synthetic coding sequence
  source 1..2286: mol_type = other DNA

SEQ ID NO: 176988 - DNA, 2310 bp, synthetic construct
  misc_feature 1..2310: note = Description of Artificial Sequence: Synthetic coding sequence
  source 1..2310: mol_type = other DNA
atgcaggactttgtggccggcatggccggcacagcccacattgatggagaccacatcgtggtgtctgtgcctgaggccgtgctggtgtctgatgtggtgacagatgatggcatcaccctggaccacggcctggccgctgaggtggtgcacggccctgacatcatcacagaaacagatgtggtgacagagggcgtcatcgtgcctgaggccgtgctggaggctgatgtggccatcgaggaggacctggaggaggatgatggagaccacatcctgaccagcgagctgatcacagaaacagtgcgggtgcctgagcaggtgtttgtggccgacctggtgacaggccccaacggccacctggagcacgtggtgcaggactgtgtgtctggagtggacagccccaccatggtgtctgaggaggtgctggtgaccaacagcgacacagaaacagtcatccaggccgccggcggcgtgcccggcagcacagtgaccatcaagacagaagatgatgatgatgatgatgtgaagagcaccagcgaggactacctgatgatcagcctggatgatgtgggggagaagctggagcacatgggcaacacccccctgaagattggaagtgatggcagccaggaggatgccaaggaggatggctttggaagtgaggtgatcaaggtgtacatcttcaaggccgaggccgaggatgatgtggagattggaggaacagagatcgtgacagagagcgagtacaccagcggccacagcgtggccggcgtgctggaccagagcaggatgcagcgggagaagatggtgtacatggctgtgaaggacagcagccaggaggaggatgacatcagctgtgccgagattgctgatgaggtgtacatggaggtgattgtgggggaggaggagggcaccagcctgcctgagatccagctggaggacagtgatgtgaacaagacagtggtgcctgtggtgtgggccgccgcctacggcaacaccctggacagcgccctggagagccgcagcagcacagctgcccagtacctgcagatctgtgatggcatcaacaccaacaaggtgctgaagcagaaggccaagaagagaagaagaggagagacccggcagtggcagacagctgtgatcattggaccagatggccagcccctgactgtgtacccctgccacatctgcaccaagaagttcaagagccggggcttcctgaagaggcacatgaagaaccacccagaccacctgatgaggaagaagtaccagtgcacagactgtgacttcaccaccaacaagaaggtgtccttccacaaccacctggagagccacaagctgatcaacaaggtggacaagacccatgagttcacagagtacacccggcgctaccgggaggccagccccctgagcagcaacaagctgatcctgcgggacaaggagcccaagatgcacaagtgcaagtactgtgactatgaaacagctgagcagggcctgctgaacagacacctgctggccgtgcacagcaagaacttcccccacgtgtgtgtggagtgtgggaagggcttccgccaccccagcgagctgaagaagcacatgaggacccacactggagagaagccctaccagtgccagtactgcatcttccgctgtgccgaccagagcaacctgaagacccacatcaagagcaagcacggcaacaacctgccctacaagtgtgagcactgcccccaggcctttggagatgagcgggagctgcagaggcacctggacctcttccagggccacaagacccaccagtgcccccactgtgaccacaagagcaccaacagcagtgacctgaagaggcacatcatctctgtgcacaccaaggacttcccccacaagtgtgaggtgtgtgacaagggcttccaccggcccagcgagctgaagaagcacagcgacatccacaagggcaggaagatccaccagtgccgccactgtgacttcaagaccagtgaccccttcatcctgagcggccacatcctgtctgtgcacaccaaggaccagcccctgaagtgcaagcgctgcaagaggggcttccggcagcagaatgagctgaagaagcacatgaagacccacactggaaggaagatctaccagtgtgagtactgtgagtacagcaccacagatgccagcggcttcaagagacatgtgatcagcatccacaccaaggactacccccaccgctgtgagttctgcaagaagggcttcagaagacccagcgagaagaaccagcacatcatgaggcaccacaaggaggccctgatgtag

SEQ ID NO: 176989 - DNA, 1812 bp, synthetic construct
  misc_feature 1..1812: note = Description of Artificial Sequence: Synthetic coding sequence
  source 1..1812: mol_type = other DNA
atgatcagcctggatgatgtgggggagaagctggagcacatgggcaacacccccctgaagattggaagtgatggcagccaggaggatgccaaggaggatggctttggaagtgaggtgatcaaggtgtacatcttcaaggccgaggccgaggatgatgtggagattggaggaacagagatcgtgacagagagcgagtacaccagcggccacagcgtggccggcgtgctggaccagagcaggatgcagcgggagaagatggtgtacatggctgtgaaggacagcagccaggaggaggatgacatcagctgtgccgagattgctgatgaggtgtacatggaggtgattgtgggggaggaggagggcaccagcctgcctgagatccagctggaggacagtgatgtgaacaagacagtggtgcctgtggtgtgggccgccgcctatggagatgaaagaagagtgtccagaagatatgaggactgccaggccagcggcaacaccctggacagcgccctggagagccgcagcagcacagctgcccagtacctgcagatctgtgatggcatcaacaccaacaaggtgctgaagcagaaggccaagaagagaagaagaggagagacccggcagtggcagacagctgtgatcattggaccagatggccagcccctgactgtgtacccctgccacatctgcaccaagaagttcaagagccggggcttcctgaagaggcacatgaagaaccacccagaccacctgatgaggaagaagtaccagtgcacagactgtgacttcaccaccaacaagaaggtgtccttccacaaccacctggagagccacaagctgatcaacaaggtggacaagacccatgagttcacagagtacacccggcgctaccgggaggccagccccctgagcagcaacaagctgatcctgcgggacaaggagcccaagatgcacaagtgcaagtactgtgactatgaaacagctgagcagggcctgctgaacagacacctgctggccgtgcacagcaagaacttcccccacgtgtgtgtggagtgtgggaagggcttccgccaccccagcgagctgaagaagcacatgaggacccacactggagagaagccctaccagtgccagtactgcatcttccgctgtgccgaccagagcaacctgaagacccacatcaagagcaagcacggcaacaacctgccctacaagtgtgagcactgcccccaggcctttggagatgagcgggagctgcagaggcacctggacctcttccagggccacaagacccaccagtgcccccactgtgaccacaagagcaccaacagcagtgacctgaagaggcacatcatctctgtgcacaccaaggacttcccccacaagtgtgaggtgtgtgacaagggcttccaccggcccagcgagctgaagaagcacagcgacatccacaagggcaggaagatccaccagtgccgccactgtgacttcaagaccagtgaccccttcatcctgagcggccacatcctgtctgtgcacaccaaggaccagcccctgaagtgcaagcgctgcaagaggggcttccggcagcagaatgagctgaagaagcacatgaagacccacactggaaggaagatctaccagtgtgagtactgtgagtacagcaccacagatgccagcggcttcaagagacatgtgatcagcatccacaccaaggactacccccaccgctgtgagttctgcaagaagggcttcagaagacccagcgagaagaaccagcacatcatgaggcaccacaaggaggccctgatgtag

SEQ ID NO: 176990 - DNA, 1611 bp, synthetic construct
  misc_feature 1..1611: note = Description of Artificial Sequence: Synthetic coding sequence
  source 1..1611: mol_type = other DNA
atgggccccctgcagttcagagatgtggccatcgagttcagcctggaggagtggcactgcctggacacagcccagaggaacctgtacagaaatgtgatgctggagaactacagaaacctggtgttcctgggcatcgtggtgtccaagccagacctgatcacctgcctggagcagggcaagaagcccctgaccatgaagaagcatgagatggtggccaaccccagcgtgacctgcagccactttgcccgggacctgtggccagagcagagcatcaaggacagcttccagaaggtgaccctgcggcgctatgagaactacggccatgacaacctgcagttcaagaagggctgtgagagcgtggatgagtgcaaggtgcacaagaggggctacaacggcctgaaccagtacctgaccaccacccagagcaagatcttccagtgtgacaagtatgtgaaggtgatccacaagttcagcaacagcaacagacacaagatccgccacacaggcaagaagcccttcaagtgcattgaatgtgggaaggccttcaaccagagcagcaccctgaccacccacaagaagatccacactggagagaagcccttcaagtgtgaagaatgtgggaaggccttcaactggagcagccacctgaccacccacaagaggatccacactggagagaagcgctacaagtgtgaggactgtgggaaggccttcagccgcttctcctacctgacagcccacaagatcatccacagcggggagaagccctacaagtgtgaagaatgtgggaaggccttcaagaggagcagcaacctgaccacccacaagatcatccacactggagagaagccctacaagtgtgaagaatgtgggaaggccttcaagaggagcagcatcctgacagcccacaagatcatccacagcggggagaagccctacaagtgtgaagaatgtgggaaggccttcaagcaccccagcgtgctgaccacccacaagaggatccacactggagagaagccctacaagtgtgaagaatgtggccgggccttcaagtacttcagcagcctgaccacccacaagatcatccacagcggggagaagccctacaagtgtgaagaatgtgggaaggccttcaactggagcagccacctgaccacccacaagaggatccacactggagagaagccctacaagtgtgaagaatgtggggaggccttcaagtacagcagcagcctgaccacccacaagatcatccacacaggccagcagcccttcaagtgtgaagaatgtgggaaggccttcaagtgcttcagcatcctgaccacccacaagaggatccacactggagagaagccctacaagtgtgaagaatgtgggaaggccttcaacagcagcagccacctgacagcccacaagaggatccacactggagagaagccctacaagtgtgagcgctgtgggaaggccttcaagaggagcttcatcctgaccaggcacaagaggatccacactggagagaagccctacaagtgtgaagaatgtgggaagggcttcaagtgccccagcaccctgaccacccacaaggtgatccacactggagagaagctgtag

SEQ ID NO: 176991 - DNA, 1935 bp, synthetic construct
  misc_feature 1..1935: note = Description of Artificial Sequence: Synthetic coding sequence
  source 1..1935: mol_type = other DNA
atggagatcccagcccctgagcctgagaagacagccctgagcagccaggaccctgccctgagcctgaaggagaacctggaggacatcagcggctggggcctgcctgaggcccggagcaaggagagcgtgtccttcaaggatgtggccgtggacttcacccaggaggagtggggccagctggacagcccccagagggccctgtacagagatgtgatgctggagaactaccagaacctgctggccctgggcccccccctgcacaagccagatgtgatcagccacctggagcggggggaggagccctggagcatgcagcgggaggtgccccggggcccctgcccagagtgggagctgaaggctgtgcccagccagcagcagggcatctgcaaggaggagcccgcccaggagcccatcatggagcggcccctgggcggggcccaggcctggggccggcaggccggggccctgcagaggagccaggccgccccctgggccccagccccagccatggtgtgggatgtgcctgtggaggagttccccctgcgctgccccctgtttgcccagcagagggtgcctgagggcggccccctgctggacaccaggaagaatgtgcaggccacagagggccgcaccaaggccccagcccggctgtgtgctggagaaaatgccagcaccccatctgagcctgagaagttcccccaggtgcggcggcagagaggagctggagctggggagggggagtttgtgtgtggggagtgtgggaaggccttccggcagagcagcagcctgaccctgcaccggcgctggcacagccgggagaaggcctacaagtgtgatgaatgtgggaaggccttcacctggagcaccaacctgctggagcaccggcgcatccacactggagagaagcccttcttctgtggggagtgtgggaaggccttcagctgccacagcagcctgaatgtgcaccagaggatccacactggagagcggccctacaagtgcagcgcctgtgagaaggccttcagctgcagcagcctgctgtccatgcacctgcgggtgcacactggagagaagccctaccgctgtggggagtgtgggaaggccttcaaccagaggacccacctgaccaggcaccaccgcatccacactggagagaagccctaccagtgtggcagctgtgggaaggccttcacctgccacagcagcctgactgtgcatgagaagatccacagcggggacaagcccttcaagtgcagcgactgtgagaaggccttcaacagccgcagccggctgaccctgcaccagaggacccacactggagagaagcccttcaagtgtgccgactgtgggaagggcttcagctgccacgcctacctgctggtgcaccggcgcatccacagcggggagaagcccttcaagtgcaatgaatgtgggaaggccttcagcagccacgcctacctgattgtgcaccggcgcatccacactggagagaagccctttgactgcagccagtgctggaaggccttcagctgccacagcagcctcatcgtgcaccagaggatccacactggagagaagccctacaagtgcagtgaatgtggccgggccttcagccagaaccactgcctgatcaagcaccagaagatccacagcggggagaagagcttcaagtgtgagaagtgtggggagatgttcaactggagcagccacctgacagagcaccagaggctgcacagcgagggcaagcccctggccatccagttcaacaagcacctgctgagcacctactacgtgcccggcagcctgctgggcgctggagatgctggcctgagagatgtggaccccattgatgccctggatgtggccaagctgctgtgtgtggtgcccccccgggccggcaggaacttcagcctgggcagcaagcccagaaattag

SEQ ID NO: 176992 - DNA, 1935 bp, synthetic construct; identical to SEQ ID NO: 176991
  misc_feature 1..1935: note = Description of Artificial Sequence: Synthetic coding sequence
  source 1..1935: mol_type = other DNA

SEQ ID NO: 176993 - DNA, 1839 bp, synthetic construct
  misc_feature 1..1839: note = Description of Artificial Sequence: Synthetic coding sequence
  source 1..1839: mol_type = other DNA
atggagatcccagcccctgagcctgagaagacagccctgagcagccaggaccctgccctgagcctgaaggagaacctggaggacatcagcggctggggcctgcctgaggcccggagcaaggagagcgtgtccttcaaggatgtggccgtggacttcacccaggaggagtggggccagctggacagcccccagagggccctgtacagagatgtgatgctggagaactaccagaacctgctggccctggagtgggagctgaaggctgtgcccagccagcagcagggcatctgcaaggaggagcccgcccaggagcccatcatggagcggcccctgggcggggcccaggcctggggccggcaggccggggccctgcagaggagccaggccgccccctgggccccagccccagccatggtgtgggatgtgcctgtggaggagttccccctgcgctgccccctgtttgcccagcagagggtgcctgagggcggccccctgctggacaccaggaagaatgtgcaggccacagagggccgcaccaaggccccagcccggctgtgtgctggagaaaatgccagcaccccatctgagcctgagaagttcccccaggtgcggcggcagagaggagctggagctggggagggggagtttgtgtgtggggagtgtgggaaggccttccggcagagcagcagcctgaccctgcaccggcgctggcacagccgggagaaggcctacaagtgtgatgaatgtgggaaggccttcacctggagcaccaacctgctggagcaccggcgcatccacactggagagaagcccttcttctgtggggagtgtgggaaggccttcagctgccacagcagcctgaatgtgcaccagaggatccacactggagagcggccctacaagtgcagcgcctgtgagaaggccttcagctgcagcagcctgctgtccatgcacctgcgggtgcacactggagagaagccctaccgctgtggggagtgtgggaaggccttcaaccagaggacccacctgaccaggcaccaccgcatccacactggagagaagccctaccagtgtggcagctgtgggaaggccttcacctgccacagcagcctgactgtgcatgagaagatccacagcggggacaagcccttcaagtgcagcgactgtgagaaggccttcaacagccgcagccggctgaccctgcaccagaggacccacactggagagaagcccttcaagtgtgccgactgtgggaagggcttcagctgccacgcctacctgctggtgcaccggcgcatccacagcggggagaagcccttcaagtgcaatgaatgtgggaaggccttcagcagccacgcctacctgattgtgcaccggcgcatccacactggagagaagccctttgactgcagccagtgctggaaggccttcagctgccacagcagcctcatcgtgcaccagaggatccacactggagagaagccctacaagtgcagtgaatgtggccgggccttcagccagaaccactgcctgatcaagcaccagaagatccacagcggggagaagagcttcaagtgtgagaagtgtggggagatgttcaactggagcagccacctgacagagcaccagaggctgcacagcgagggcaagcccctggccatccagttcaacaagcacctgctgagcacctactacgtgcccggcagcctgctgggcgctggagatgctggcctgagagatgtggaccccattgatgccctggatgtggccaagctgctgtgtgtggtgcccccccgggccggcaggaacttcagcctgggcagcaagcccagaaattag

SEQ ID NO: 176994 - DNA, 210 bp, synthetic construct
  misc_feature 1..210: note = Description of Artificial Sequence: Synthetic coding sequence
  source 1..210: mol_type = other DNA
atggagatcccagcccctgagcctgagaagacagccctgagcagccaggaccctgccctgagcctgaaggagaacctggaggacatcagcggctggggcctgcctgaggcccggagcaagagcctggccctggtgacccaggccggcgtgcagtggaggaacctgggcagcctgcagcccccacccctgggcttcaagcagttctcctag

SEQ ID NO: 176995 - DNA, 1935 bp, synthetic construct
  misc_feature 1..1935: note = Description of Artificial Sequence: Synthetic coding sequence
  source 1..1935: mol_type = other DNA
atggccgaggccgtggccgcccccatcagcccctggaccatggccgccaccatccaggccatggagaggaagattgagagccaggccgcccggctgctgagcctggagggccgcacaggcatggccgagaagaagctggccgactgtgagaagacagctgtggagtttggaaaccagctggagggcaagtgggccgtgctgggcaccctgctgcaggagtatggcctgctgcagaggcggctggagaatgtggagaacctgctgaggaacagaaacttctggatcctgcggctgcccccaggcagcaaaggagagagccccaaggagtggggcaagctggaggactggcagaaggagctgtacaagcacgtgatgaggggcaactatgagaccctggtgtccctggactatgccatcagcaagccagaggtgctgagccagatcgagcagggcaaggagccctgcaactggaggcggcccggccccaagatcccagatgtgcctgtggaccccagccctggcagcggcccccctgtgcctgccccagacctgctgatgcagatcaagcaggagggggagctgcagctgcaggagcagcaggccctgggcgtggaggcctgggccgccggccagcctgacatcggggaggagccctggggcctgagccagctggacagcggggccggggacatcagcacagatgccaccagcggcgtgcacagcaacttcagcaccaccatcccccccacctcctggcagacagacctgcccccccaccaccccagcagcgcctgcagtgatggcaccctgaagctgaacacagctgccagcacagaagatgtgaagatcgtcatcaagacagaggtgcaggaggaggaggtggtggccacccctgtgcaccccacagacctggaggcccacggcaccctgtttggacctggccaggccacccgcttcttccccagccctgcccaggagggcgcctgggagagccagggcagcagcttccccagccaggaccctgtgctgggcctgcgggagcccgcccggcctgagcgggacatgggagagctgagccctgctgtggcccaggaggagaccccacctggggactggctgtttggaggagtgcgctggggctggaacttccgctgcaagccccctgtgggcctgaaccccaggactggacctgagggcctgccctacagcagcccagacaatggagaggccatcctggaccccagccaggccccccggcccttcaatgagccctgcaagtacccaggccgcaccaagggcttcggccacaagccaggcctgaagaagcaccctgctgcccctcctgggggccggcccttcacctgtgccacctgtgggaagagcttccagctgcaggtgtccctgagcgcccaccagaggagctgtggggccccagatggcagcggccctggcactggaggcggcggcagcggcagcggcggcggcggcggcggcagcggcggcggcagcgccagagatggcagcgccctgcgctgtggggagtgtggccgctgcttcaccaggcctgcccacctgatccgccacaggatgctgcacactggagagcggcccttcccctgcacagaatgtgagaagcgcttcacagagaggagcaagctgattgaccactaccgcacccacactggagtgcggcccttcacctgcaccgtgtgtgggaagagcttcatcaggaaggaccacctgaggaagcaccagaggaaccacgccgccggggccaagaccccagcccggggccagcccctgcccaccccaccagcccccccagaccccttcaagagccctgccagcaagggccccctggccagcacagacctggtgacagactggacctgtggcctgtctgtgctgggccccacagatggaggagacatgtag

SEQ ID NO: 176996 - DNA, 1938 bp, synthetic construct
  misc_feature 1..1938: note = Description of Artificial Sequence: Synthetic coding sequence
  source 1..1938: mol_type = other DNA
atggccgaggccgtggccgcccccatcagcccctggaccatggccgccaccatccaggccatggagaggaagattgagagccaggccgcccggctgctgagcctggagggccgcacaggcatggccgagaagaagctggccgactgtgagaagacagctgtggagtttggaaaccagctggagggcaagtgggccgtgctgggcaccctgctgcaggagtatggcctgctgcagaggcggctggagaatgtggagaacctgctgaggaacagaaacttctggatcctgcggctgcccccaggcagcaaaggagagagccccaaggagtggggcaagctggaggactggcagaaggagctgtacaagcacgtgatgaggggcaactatgagaccctggtgtccctggactatgccatcagcaagccagaggtgctgagccagatcgagcagggcaaggagccctgcaactggaggcggcccggccccaagatcccagatgtgcctgtggaccccagccctggcagcggcccccctgtgcctgccccagacctgctgatgcagatcaagcaggagggggagctgcagctgcaggagcagcaggccctgggcgtggaggcctgggccgccggccagcctgacatcggggaggagccctggggcctgagccagctggacagcggggccggggacatcagcacagatgccaccagcggcgtgcacagcaacttcagcaccaccatcccccccacctcctggcagacagacctgcccccccaccaccccagcagcgcctgcagtgatggcaccctgaagctgaacacagctgccagcacagaagcagatgtgaagatcgtcatcaagacagaggtgcaggaggaggaggtggtggccacccctgtgcaccccacagacctggaggcccacggcaccctgtttggacctggccaggccacccgcttcttccccagccctgcccaggagggcgcctgggagagccagggcagcagcttccccagccaggaccctgtgctgggcctgcgggagcccgcccggcctgagcgggacatgggagagctgagccctgctgtggcccaggaggagaccccacctggggactggctgtttggaggagtgcgctggggctggaacttccgctgcaagccccctgtgggcctgaaccccaggacaggccctgagggcctgccctacagcagcccagacaacggggaggccatcctggaccccagccaggccccccggcccttcaatgagccctgcaagtacccaggccgcaccaagggcttcggccacaagccaggcctgaagaagcaccctgctgcccctcctgggggccggcccttcacctgtgccacctgtgggaagagcttccagctgcaggtgtccctgagcgcccaccagaggagctgtggggccccagatggcagcggccctggcaccggcggcggcggcagcggcagcggcggcggcggcggcggcagcggcggcggcagcgccagagatggcagcgccctgcgctgtggagaatgtggccgctgcttcaccaggcctgcccacctgatccgccacaggatgctgcacactggagagcggcccttcccctgcacagaatgtgagaagcgcttcacagagaggagcaagctgattgaccactaccgcacccacactggagtgcggcccttcacctgcaccgtgtgtgggaagagcttcatcaggaaggaccacctgaggaagcaccagagaaatcatgctgctggggccaagaccccagcccggggccagcccctgcccaccccaccagcccccccagaccccttcaagagccctgccagcaagggccccctggccagcacagacctggtgacagactggacctgtggcctgtctgtgctgggccccacagatggaggagacatgtag

SEQ ID NO: 176997 - DNA, 2172 bp, synthetic construct
  misc_feature 1..2172: note = Description of Artificial Sequence: Synthetic coding sequence
  source 1..2172: mol_type = other DNA
atgagcctgctgaaggagaggaagcccaagaagccccactacatcccccggcccccaggcaagcccttcaagtacaagtgcttccagtgccccttcacctgcaatgagaagagccacctgttcaaccacatgaagtatggcctgtgcaagaacagcatcaccctggtgtctgagcaggacagagtgcccaagtgccccaagagcaacagcctggaccccaagcagaccaaccagccagatgccacagccaagccagccagcagcaagtctgtggccaacggcctgagcgcctttgacagcaagctgcagcacagcagcgcccgggaggacatcaaggagaacctggagctgcaggcccggggcacccaccgctgcctgggccagaagccagccctgcaccgggccagcccctgcaagagccctgcccctgaggccgccctgggcgcccagcctgccctggagggcgccgcccggcccagcgcctttgtgcctgtgggggagcaccggctgaagggccctgacaatgctgaggcccctgagaccctggccctgcacaaccccacagccaaggctgtgtccttccacaccaagagcgccttccacaccccaggctacccctggaaggccggcagccccttcctgcccccagagttcccccacaagatcagcagcaccaagggcctgggcgccatcagcccctacatgcaccccaccatccctgagtacccaccccacttctacacagagcacggcctggccaccatctacagcccctacctgctggccggcagcagcccagaatgtgatgcccccctgctgtctgtgtatggcacccaggaccccaggcacttcctgccccaccctggccccatccccaagcacctggcccccagccctgccacctatgaccactaccgcttcttccagcagtaccccagcaacctgcccatcccctacggcttctacagacctgagagcgccttcagcagctatggcctgcggctgccccctgtgacaggcctgacccgggaccagagcagccacctgctggaggaggccaccctggtgtacccagccagcagccccagccggctgaaccccagcgaccccaacaggaagcacgtggagtttgagagccccatccctgaggccaaggacagcagcaaggccggccagagggacacagagggcagcaagatgagcccccgggccggcagcgctgccaccggcagccctggccggcccagccccacagacttcatgcagaccagccagacctgtgagggcctgtatgacctgagcaacaaggccgccagcagcgccctgggccgcctgtacccacctgagcagagcctgacagccttccggcctgtgaagaagagcacagaatgtctgcctgcccaggccgctgagaccacagctgagagccctgtgtccctgaatgtggtgaatggagaccccccagcccccactggaagtgccagcctggtgtctgaggccgcccccagcagcccagatgacagcagcggcatgggccccctgaacctgagcaagaagtctgagatcaacctggccgccacccatgagcccacctaccagggcagcccccaggccgagacagccagcttcagcgagctgcaggacctgcccctgaacctgtctgtgaaggacccctgcaacacccaggcccccaggcctgccttccctggccggcccagggctgctgagcctgctgctgctgtgccccagaagacaggaacagagggctctgaagatggccccagccaccctgagaccaagccaggcagcctggatggagatggagccccacccaccggccctggagaggaggccccagatgcctgtgctgtggacagcagcgaggagcagaagcagacagctgctgtggccctgtgccagctggccgcctacagccccaggaacatccgggtgggagatggagatgctgctgcccctgagcccgcctgccggcaggacacccccaccctgagctccatggagagccaggaggcccagtgtgacctgcggcccaagggccagaagaggaccagcctgagagatgctgggaagagccagcagggcgccaagaaggccaagctgcaggacacagcccgggtcttcaccctgcggcggcgggcccgggtgtcctag

SEQ ID NO: 176998 - DNA, 951 bp, synthetic construct
  misc_feature 1..951: note = Description of Artificial Sequence: Synthetic coding sequence
  source 1..951: mol_type = other DNA
atgagccccagggctggcagcgctgccaccggcagccctggccggcccagccccacagacttcatgcagaccagccagacctgtgagggcctgtatgacctgagcaacaaggccgccagcagcgccctgggccgcctgtacccacctgagcagagcctgacagccttccggcctgtgaagaagagcacagagtgcctgcctgcccaggccgctgagaccacagctgagagccctgtgtccctgaatgtggtgaatggagaccccccagcccccaccggcagcgccagcctggtgtctgaggccgcccccagcagcccagatgacagcagcggcaagtctgagatcaacctggccgccacccatgagcccacctaccagggcagcccccaggccgagacagccagcttcagcgagctgcaggacctgcccctgaacctgtctgtgaaggacccctgcaacacccaggcccccaggcctgccttccctggccggcccagggctgctgagcctgctgctgctgtgccccagaagacaggaacagagggctctgaagatggccccagccaccctgagaccaagccaggcagcctggatggagatggagcccccccaactggacctggagaggaggccccagatgcctgtgctgtggacagcagcgaggagcagaagcagacagctgctgtggccctgtgccagctggccgcctacagccccaggaacatccgggtgggagatggagatgctgctgcccctgagcccgcctgccggcaggacacccccaccctgagctccatggagagccaggaggcccagtgtgacctgcggcccaagggccagaagaggaccagcctgagagatgctgggaagagccagcagggcgccaagaaggccaagctgcaggacacagcccgggtcttcaccctgcggcggcgggcccgggtgtcctag

SEQ ID NO: 176999 - DNA, 891 bp, synthetic construct
  misc_feature 1..891: note = Description of Artificial Sequence: Synthetic coding sequence
  source 1..891: mol_type = other DNA
atgtacttcagccaggaggagtgggagctgctggaccccacccagaaggccctgtacaatgatgtgatgcaggagaactatgaaacagtcatcagcctggccctgtttgtgctgcccaagcccaaggtgatcagctgcctggagcagggcgaggagccctgggtgcaggtgtccccagagttcaaggacagcgctgggaagagccccaccggcctgaagctgaagaatgacacagagaaccaccagcctgtgtccctgagtgacctggagatccaggccagcgctggggtcatcagcaagaaggccaaggtgaaggtgccccagaagacagctgggaaggagaaccactttgacatgcaccgggtgggcaagtggcaccaggacttccctgtgaagaagaggaagaagctgagcacctggaagcaggagctgctgaagctgatggacagacacaagaaggactgtgcccgggagaagcccttcaagtgccaggagtgtgggaagaccttccgggtgtccagtgacctgatcaagcaccagaggatccacacagaggagaagccctacaagtgccagcagtgtgacaagcgcttccgctggagcagtgacctgaacaagcacctgaccacccaccagggcatcaagccctacaagtgctcctggtgtgggaagagcttcagccagaacaccaacctgcacacccaccagaggacccacactggagagaagcccttcacctgccatgaatgtgggaagaagttcagccagaacagccacctgatcaagcacaggaggacccacactggagagcagccctacacctgcagcatctgcagaagaaacttcagccgccgcagcagcctgctgcggcaccagaagctgcacctgtag

SEQ ID NO: 177000 - DNA, 891 bp, synthetic construct; identical to SEQ ID NO: 176999
  misc_feature 1..891: note = Description of Artificial Sequence: Synthetic coding sequence
  source 1..891: mol_type = other DNA

SEQ ID NO: 177001 - DNA, 1248 bp, synthetic construct
  misc_feature 1..1248: note = Description of Artificial Sequence: Synthetic coding sequence
  source 1..1248: mol_type = other DNA
atggccatgagggagctgaatgctgacagctgcagcagcccccagatgggcgccatgtgggagaccagcggctctgtgaaggagaacagcagccagagcaagaagtacagcaccaagattgagaacctgggccctgagagcgcctgccgccacttctggagcttccgctaccacgaggccaccggccccctggagaccatcagccagctgcagaagctgtgccaccagtggctgcggcctgagatccacagcaaggagcagatcctggagatgctggtgctggagcagttcctgagcatcctgcccaaggagacccagaactgggtgcagaagcaccacccccagaatgtgaagcaggccctggtgctggtggagttcctgcagcgggagccagatggcaccaagaatgaaagcctgctgacctttgaagatgtggccgtgtacttcagcgaggaggagtggcagctgctgaaccccctggagaagaccctgtacaatgatgtgatgcaggacatctatgaaacagtcatcagcctgggcctgaagctgaagaatgacacaggaaatgaccaccccatctctgtgtccaccagcgagatccagaccagcggctgtgaggtgtccaagaagaccaggatgaagatcgcccagaagaccatgggcagagaaaatcctggggacacccacagcgtgcagaagtggcaccgggccttccccaggaagaagaggaagaagccagccacctgcaagcaggagctgcccaagctgatggacctgcacggcaagggccccactggagagaagcccttcaagtgccaggagtgtgggaagagcttccgggtgtccagtgacctgatcaagcaccaccgcatccacactggagagaagccctacaagtgccagcagtgtgaccggcgcttccgctggagcagtgacctgaacaagcacttcatgacccaccagggcatcaagccctaccgctgctcctggtgtgggaagagcttcagccacaacaccaacctgcacacccaccagaggatccacactggagagaagcccttcaagtgtgatgaatgtgggaagcgcttcatccagaacagccacctgatcaagcaccagaggacccacactggagagcagccctacacctgcagcctgtgcaagaggaacttcagcagaagaagcagcctgctgcggcaccagaagctgcacagaagaagagaggcctgcctggtgagccccaactag

SEQ ID NO: 177002 - DNA, 1533 bp, synthetic construct
  misc_feature 1..1533: note = Description of Artificial Sequence: Synthetic coding sequence
  source 1..1533: mol_type = other DNA
atggccatgagggagctgaatgctgacagctgcagcagcccccagatgggcgccatgtgggagaccagcggctctgtgaaggagaacagcagccagagcaagaagtacagcaccaagattgagaacctgggccctgagagcgcctgccgccacttctggagcttccgctaccacgaggccaccggccccctggagaccatcagccagctgcagaagctgtgccaccagtggctgcggcctgagatccacagcaaggagcagatcctggagatgctggtgctggagcagttcctgagcatcctgcccaaggagacccagaactgggtgcagaagcaccacccccagaatgtgaagcaggccctggtgctggtggagttcctgcagcgggagccagatggcaccaagaatgaggtgacagcccacgagctgggcaaggaggccgtgctgctgggcggcacagctgtggcccctggcttcaagtggaagccagctgagccccagcccatgggcgtcttccagaaggagtactggaacacctacagagtgctgcaggagcagctgggctggaacacccacaaggagacccagcctgtgtatgaaagagctgtgcatgaccagcagatgctggccctgtctgagcagaagaggatcaagcactggaagatggccagcaagctgatcctgcctgagagcctgagcctgctgacctttgaagatgtggccgtgtacttcagcgaggaggagtggcagctgctgaaccccctggagaagaccctgtacaatgatgtgatgcaggacatctatgagaccgtcatcagcctgggcctgaagctgaagaatgacacaggaaatgaccaccccatctctgtgtccaccagcgagatccagaccagcggctgtgaggtgtccaagaagaccaggatgaagatcgcccagaagaccatgggccgggagaaccctggggacacccacagcgtgcagaagtggcaccgggccttccccaggaagaagaggaagaagccagccacctgcaagcaggagctgcccaagctgatggacctgcacggcaagggccccaccggggagaagcccttcaagtgccaggagtgtgggaagagcttccgggtgtccagtgacctgatcaagcaccaccgcatccacactggagagaagccctacaagtgccagcagtgtgaccggcgcttccgctggagcagtgacctgaacaagcacttcatgacccaccagggcatcaagccctaccgctgctcctggtgtgggaagagcttcagccacaacaccaacctgcacacccaccagaggatccacactggagagaagcccttcaagtgtgatgaatgtgggaagcgcttcatccagaacagccacctgatcaagcaccagaggacccacactggagagcagccctacacctgcagcctgtgcaagaggaacttcagccgccgcagcagcctgctgcggcaccagaagctgcacagaagaagagaggcctgcctggtgagccccaactag

SEQ ID NO: 177003 - DNA, 1548 bp, synthetic construct
  misc_feature 1..1548: note = Description of Artificial Sequence: Synthetic coding sequence
  source 1..1548: mol_type = other DNA
atggagagcctgggcctgcacacagtgaccctgagtgatggcaccacagcctacgtgcagcaggccgtgaagggggagaagctgctggagggccaggtgatccagctggaggatggcaccacagcctacatccaccaggtgacagtgcagaaggaggccctgagctttgaagatggccagcctgtgcagctggaggatggctccatggcctacatccacaggaccccccgggagggctatgaccccagcaccctggaggccgtgcagctggaggatggcagcacagcctacatccaccaccctgtggccgtgcccagcgagagcaccatcctggccgtgcagacagaggtgggcctggaggacctggccgcagaagatgatgagggcttcagcgcagatgctgtggtggccctggagcagtatgccagcaaggtgctgcatgacagccagatccccagaaatggcaagggccagcaggtgggggaccgggccttccgctgtggctacaagggctgcggccgcctgtacaccacagcccaccacctgaaggtgcatgagcgggcccacactggagaccggccctaccgctgtgacttccccagctgtgggaaggcctttgccaccggctacggcctgaagagccacgtgaggacccacactggagagaagccctacaagtgcccagaggagctgtgcagcaaggccttcaagaccagcggggacctgcagaagcacgtgaggacccacactggagagcggcccttccagtgcccctttgagggctgcggccgctccttcaccaccagcaacatcaggaaggtgcacgtgaggacccacactggagagcggccctacacctgcccagagccccactgcggccggggcttcaccagcgccaccaactacaagaaccacgtgcgcatccacactggagagaagccctacgtgtgcaccgtgcccggctgtgggaagcgcttcacagagtacagcagcctgtacaagcaccacgtggtgcacacccactgcaagccctacacctgcagcacctgtgggaagacctaccggcagaccagcaccctggccatgcacaagaggtctgcccacggggagctggaggccacagaggagagcgagcaggccctgtatgagcagcagcagctggaggccgccagcgctgctgaggagagccccccacccaagaggccccgcatcgcctacctgtctgaggtgaaggaggagagagatgacatcccagcccaggtggccatggtgacagaagaagatggagccccccaggtggccctgatcacccaggatggagcccagcaggtgaccatcatcaccagcggggctgtggtggccgaggacagctctgtggccagcctgcggcaccagcaggtggccctgctggccacagccaacggcacccacatcgctgtgcagctggaggagcagcagaccctggaggaggccatcaacgtggccacagctgccatgcagcagggcgctgtgaccctggagaccaccgtgtctgagagcggctgctag

SEQ ID NO: 177004 - DNA, 1713 bp, synthetic construct
  misc_feature 1..1713: note = Description of Artificial Sequence: Synthetic coding sequence
  source 1..1713: mol_type = other DNA
atggagagcctgggcctgcacacagtgaccctgagtgatggcaccacagcctacgtgcagcaggccgtgaagggggagaagctgctggagggccaggtgatccagctggaggatggcaccacagcctacatccaccaggtgacagtgcagaaggaggccctgagctttgaagatggccagcctgtgcagctggaggatggctccatggcctacatccacaggaccccccgggagggctatgaccccagcaccctggaggccgtgcagctggaggatggcagcacagcctacatccaccaccctgtggccgtgcccagcgagagcaccatcctggccgtgcagacagaggtgggcctggaggacctggccgcagaagatgatgagggcttcagcgcagatgctgtggtggccctggagcagtatgccagcaaggtgctgcatgacagccagatccccagaaatggcaagggccagcaggtgggggaccgggccttccgctgtggctacaagggctgcggccgcctgtacaccacagcccaccacctgaaggtgcatgagcgggcccacactggagaccggccctaccgctgtgacttccccagctgtgggaaggcctttgccaccggctacggcctgaagagccacgtgaggacccacactggagagaagccctacaagtgcccagaggagctgtgcagcaaggccttcaagaccagcggggacctgcagaagcacgtgaggacccacactggagagcggcccttccagtgcccctttgagggctgcggccgctccttcaccaccagcaacatcaggaaggtgcacgtgaggacccacactggagagcggccctacacctgcccagagccccactgcggccggggcttcaccagcgccaccaactacaagaaccacgtgcgcatccacactggagagaagccctacgtgtgcaccgtgcccggctgtgggaagcgcttcacagagtacagcagcctgtacaagcaccacgtggtgcacacccactgcaagccctacacctgcagcacctgtgggaagacctaccggcagaccagcaccctggccatgcacaagaggtctgcccacggggagctggaggccacagaggagagcgagcaggccctgtatgagcagcagcagctggaggccgccagcgctgctgaggagagccccccacccaagaggccccgcatcgcctacctgtctgaggtgaaggaggagagagatgacatcccagcccaggtggccatggtgacagaagaagatggagccccccaggtggccctgatcacccaggatggagcccagcaggtgtccctgagccctgaggacctgcaggccctgggcagcgccatctccatggtgacccagcacggcagcaccaccctgaccatccccagcccagatgctgacctggccaccagcggcacccacacagtgaccatggtgtctgcagatggcacccagacccagcctgtgaccatcatcaccagcggggctgtggtggccgaggacagctctgtggccagcctgcggcaccagcaggtggccctgctggccacagccaacggcacccacatcgctgtgcagctggaggagcagcagaccctggaggaggccatcaacgtggccacagctgccatgcagcagggcgctgtgaccctggagaccaccgtgtctgagagcggctgctag

SEQ ID NO: 177005 - DNA, 1287 bp, synthetic construct
  misc_feature 1..1287: note = Description of Artificial Sequence: Synthetic coding sequence
  source 1..1287: mol_type = other DNA
atggagagcctgggcctgcacacagtgaccctgagtgatggcaccacagcctacgtgcagcaggccgtgaagggggagaagctgctggagggccaggtgatccagctggaggatggcaccacagcctacatccaccaggtgacagtgcagaaggaggccctgagctttgaagatggccagcctgtgcagctggaggatggctccatggcctacatccacaggaccccccgggagggctatgaccccagcaccctggaggccgtgcagctggaggatggcagcacagcctacatccaccaccctgtggccgtgcccagcgagagcaccatcctggccgtgcagacagaggtgggcctggaggacctggccgcagaagatgatgagggcttcagcgcagatgctgtggtggccctggagcagtatgccagcaaggtgctgcatgacagccagatccccagaaatggcaagggccagcaggtgggggaccgggccttccgctgtggctacaagggctgcggccgcctgtacaccacagcccaccacctgaaggtgcatgagcgggcccacactggagaccggccctaccgctgtgacttccccagctgtgggaaggcctttgccaccggctacggcctgaagagccacgtgaggacccacactggagagaagccctacaagtgcccagaggagctgtgcagcaaggccttcaagaccagcggggacctgcagaagcacgtgaggacccacactggagagcggcccttccagtgcccctttgagggctgcggccgctccttcaccaccagcaacatcaggaaggtgcacgtgaggacccacactggagagcggccctacacctgcccagagccccactgcggccggggcttcaccagcgccaccaactacaagaaccacgtgcgcatccacactggagagaagccctacgtgtgcaccgtgcccggctgtgggaagcgcttcacagagtacagcagcctgtacaagcaccacgtggtgcacacccactgcaagccctacacctgcagcacctgtgggaagacctaccggcagaccagcaccctggccatgcacaagaggagcggccactgcggccacgccgcccggggctgtgaccccggggacaacagcgtgggggagtggctgctgagcccccggggcctgggccccaccccctgctggaggaagtgccacctgcacggccacagctgcccccagggcccccggctgtggctgacccaccggcgctggccccacaggagcctgggctag

SEQ ID NO: 177006 - DNA, 1635 bp, synthetic construct
  misc_feature 1..1635: note = Description of Artificial Sequence: Synthetic coding sequence
  source 1..1635: mol_type = other DNA
atggagagcctgggcctgcacacagtgaccctgagtgatggcaccacagcctacgtgcagcaggccgtgaagggggagaagctgctggagggccaggtgatccagctggaggatggcaccacagcctacatccaccaggtgacagtgcagaaggagggctatgaccccagcaccctggaggccgtgcagctggaggatggcagcacagcctacatccaccaccctgtggccgtgcccagcgagagcaccatcctggccgtgcagacagaggtgggcctggaggacctggccgcagaagatgatgagggcttcagcgcagatgctgtggtggccctggagcagtatgccagcaaggtgctgcatgacagccagatccccagaaatggcaagggccagcaggtgggggaccgggccttccgctgtggctacaagggctgcggccgcctgtacaccacagcccaccacctgaaggtgcatgagcgggcccacactggagaccggccctaccgctgtgacttccccagctgtgggaaggcctttgccaccggctacggcctgaagagccacgtgaggacccacactggagagaagccctacaagtgcccagaggagctgtgcagcaaggccttcaagaccagcggggacctgcagaagcacgtgaggacccacactggagagcggcccttccagtgcccctttgagggctgcggccgctccttcaccaccagcaacatcaggaaggtgcacgtgaggacccacactggagagcggccctacacctgcccagagccccactgcggccggggcttcaccagcgccaccaactacaagaaccacgtgcgcatccacactggagagaagccctacgtgtgcaccgtgcccggctgtgggaagcgcttcacagagtacagcagcctgtacaagcaccacgtggtgcacacccactgcaagccctacacctgcagcacctgtgggaagacctaccggcagaccagcaccctggccatgcacaagaggtctgcccacggggagctggaggccacagaggagagcgagcaggccctgtatgagcagcagcagctggaggccgccagcgctgctgaggagagccccccacccaagaggccccgcatcgcctacctgtctgaggtgaaggaggagagagatgacatcccagcccaggtggccatggtgacagaagaagatggagccccccaggtggccctgatcacccaggatggagcccagcaggtgtccctgagccctgaggacctgcaggccctgggcagcgccatctccatggtgacccagcacggcagcaccaccctgaccatccccagcccagatgctgacctggccaccagcggcacccacacagtgaccatggtgtctgcagatggcacccagacccagcctgtgaccatcatcaccagcggggctgtggtggccgaggacagctctgtggccagcctgcggcaccagcaggtggccctgctggccacagccaacggcacccacatcgctgtgcagctggaggagcagcagaccctggaggaggccatcaacgtggccacagctgccatgcagcagggcgctgtgaccctggagaccaccgtgtctgagagcggctgctag

SEQ ID NO: 177007 - DNA, 1209 bp, synthetic construct
  misc_feature 1..1209: note = Description of Artificial Sequence: Synthetic coding sequence
  source 1..1209: mol_type = other DNA
atggagagcctgggcctgcacacagtgaccctgagtgatggcaccacagcctacgtgcagcaggccgtgaagggggagaagctgctggagggccaggtgatccagctggaggatggcaccacagcctacatccaccaggtgacagtgcagaaggaggccctgagctttgaagatggccagcctgtgcagctggaggatggctccatggcctacatccacaggaccccccgggagggctatgaccccagcaccctggaggccgtgcagctggaggatggcagcacagcctacatccaccaccctgtggccgtgcccagcgagagcaccatcctggccgtgcagacagaggtgggcctggaggacctggccgcagaagatgatgagggcttcagcgcagatgctgtggtggccctggagcagtatgccagcaaggtgctgcatgacagccagatccccagaaatggcaagggccagcaggtgggggaccgggccttccgctgtggctacaagggctgcggccgcctgtacaccacagcccaccacctgaaggtgcatgagcgggcccacactggagaccggccctaccgctgtgacttccccagctgtgggaaggcctttgccaccggctacggcctgaagagccacgtgaggacccacactggagagaagccctacaagtgcccagaggagctgtgcagcaaggccttcaagaccagcggggacctgcagaagcacgtgaggacccacactggagagcggcccttccagtgcccctttgagggctgcggccgctccttcaccaccagcaacatcaggaaggtgcacgtgaggacccacactggagagcggccctacacctgcccagagccccactgcggccggggcttcaccagcgccaccaactacaagaaccacgtgcgcatccacactggagagaagccctacgtgtgcaccgtgcccggctgtgggaagcgcttcacagagtacagcagcctgtacaagcaccacgtggtgcacacccaccactgcggccacgccgcccggggctgtgaccccggggacaacagcgtgggggagtggctgctgagcccccggggcctgggccccaccccctgctggaggaagtgccacctgcacggccacagctgcccccagggcccccggctgtggctgacccaccggcgctggccccacaggagcctgggctag

SEQ ID NO: 177008 - DNA, 1023 bp, synthetic construct
  misc_feature 1..1023: note = Description of Artificial Sequence: Synthetic coding sequence
  source 1..1023: mol_type = other DNA
atggagagcctgggcctgcacacagtgaccctgagtgatggcaccacagcctacgtgcagcaggccgtgaagggggagaagctgctggagggccaggtgatccagctggaggatggcaccacagcctacatccaccaggtgacagtgcagaaggaggccctgagctttgaagatggccagcctgtgcagctggaggatggctccatggcctacatccacaggaccccccgggagggctatgaccccagcaccctggaggccgtgcagctggaggatggcagcacagcctacatccaccaccctgtggccgtgcccagcgagagcaccatcctggccgtgcagacagaggtgggcctggaggacctggccgcagaagatgatgagggcttcagcgcagatgctgtggtggccctggagcagtatgccagcaaggtgctgcatgacagccagatccccagaaatggcaagggccagcaggtgggggaccgggccttccgctgtggctacaagggctgcggccgcctgtacaccacagcccaccacctgaaggtgcatgagcgggcccacactggagaccggccctaccgctgtgacttccccagctgtgggaaggcctttgccaccggctacggcctgaagagccacgtgaggacccacactggagagaagccctacaagtgcccagaggagctgtgcagcaaggccttcaagaccagcggggacctgcagaagcacgtgaggacccacactggagagcggcccttccagtgcccctttgagggctgcggccgctccttcaccaccagcaacatcaggaaggtgcacgtgaggacccacactggagagcggccctacacctgcccagagccccactgcggccggggcttcaccagcgccaccaactacaagaaccacgtgcgcatccacactggagagaagccctacgtgtgcaccgtgcccggctgtgggaagcgcttcacagagtacagcagcctgtacaagcaccacgtggtgcacacctag

SEQ ID NO: 177009 - DNA, 1638 bp, synthetic construct
  misc_feature 1..1638: note = Description of Artificial Sequence: Synthetic coding sequence
  source 1..1638: mol_type = other DNA
atggactgtgtgatctttgaggaggtggccgtgaacttcaccccagaggagtgggccctgctggaccacgcccagaggagcctgtacagagatgtgatgctggagacctgcaggaacctggccagcctggactgctacatctacgtgaggaccagcggcagcagcagccagagagatgtgtttggaaatggcatcagcaatgatgaggagatcgtgaagttcaccggcagtgacagctggagcatctttggagagaactggaggtttgacaacacaggagaccagcaccagatcccccagaggcacctgcggagccagctgggccgcctgtgtgagagcaatgaaggccaccagtgtggggagaccctgagccagacagccaacctgctggtgcacaagagctaccccacagaggccaagcccagtgaatgtaccaagtgtgggaaggcctttgagaaccggcagaggagccacacaggccagaggccctgcaaggaatgtggccaggcctgcagctgcctgagctgccagagcccccccatgaagacccagacagtggagaagccctgcaactgccaggacagcaggacagcctctgtgacctacgtgaagagcctgagcagcaagaagagctatgagtgccagaagtgtgggaaggccttcatctgccccagcagcttccggggccacgtgaacagccaccacggccagaagacccacgcctgcaaggtgtgtgggaagaccttcatgtactacagctacctgaccaggcatgtgaggacccacactggagagaagccctatgagtgcaaggaatgtgggaaggccttcagctgccccagctacttccgggagcacgtgaggacccacactggagagaagccctatgagtgcaagcactgcggcaagagcttcagctgctacagcagcttccgggaccacgtgaggacccacactggagagaagccctgccagtgcaagcactgcggcaaggccttcacctgctacagcagcctgcgggagcacggccgcacccacagcggggagaagccctatgagtgcaaggaatgtgggaaggccttccgctaccccagcagcctgcgggcccacatgaggatgcacactggagagaagccctacgtgtgcaagcagtgtgggaaggccttcggctgccccacctacttccgccgccacgtgaagacccacagcggcgtgaagccctaccagtgcaaggaatgtgggaaggcctacagcttcagcagcagcctgcgcatccacgtgaggacccacactggagagaagccctttgagtgcaagcactgcggcaaggccttcagctgccacagcagcctgcgggagcacgtgaggacccacagcggggagaagccctatgagtgcaaccagtgtgggaaggccttcagccacgcccagtacttccagaagcacgtgcgcagccacagcggcgtgaagccctatgaatgtacagaatgtgggaaggcctacagctgcagcagcagcctgcgggtgcacgtgaggacccacactggagagcggccctatgagtgcaagcagtgtgggaagaccttccgctacctggccagcctgcaggcccacgtgaggacccatgctggggcctag

SEQ ID NO: 177010 - DNA, 1308 bp, synthetic construct
  misc_feature 1..1308: note = Description of Artificial Sequence: Synthetic coding sequence
  source 1..1308: mol_type = other DNA
cggctgtgtgagagcaatgaaggccaccagtgtggggagaccctgagccagacagccaacctgctggtgcacaagagctaccccacagaggccaagcccagtgaatgtaccaagtgtgggaagaccttcatgtactacagctacctgaccaggcatgtgaggacccacactggagagaagccctatgagtgcaaggaatgtgggaaggccttcagctgccccagctacttccgggagcacgtgaggacccacactggagagaagccctatgagtgcaagcactgcggcaagagcttcagctgctacagcagcttccgggaccacgtgaggacccacactggagagaagccctgccagtgcaagcactgcggcaaggccttcacctgctacagcagcctgcgggagcacggccgcacccacagcggggagaagccctatgagtgcaaggaatgtgggaaggccttccgctaccccagcagcctgcgggcccacatgaggatgcacactggagagaagccctacgtgtgcaagcagtgtgggaaggccttcggctgccccacctacttccgccgccacgtgaagacccacagcggcgtgaagccctaccagtgcaaggaatgtgggaaggcctacagcttcagcagcagcctgcgcatccacgtgaggacccacactggagagaagccctttgagtgcaagcactgcggcaaggccttcagctgccacagcagcctgcgggagcacgtgaggacccacagcggggagaagccctatgagtgcaaccagtgtgggaaggccttcagccacgcccagtacttccagaagcacgtgcgcagccacagcggcgtgaagccctatgaatgtacagaatgtgggaaggcctacagctgcagcagcagcctgcgggtgcacgtgaggacccacactggagagcggccctatgagtgcaagcagtgtgggaagaccttctcctggcccagcgacctgcgggtgcacatgaggacccacagcggggagaagagatgtggctgcaagcagtgtgggaagagcttcagcagccccagcagcttcaagggccacatccgcacccacactggagagaagctgtacacctgccgggagtgtgggaaggtgttcagcagccccagctacttccgcacccaggtgcgcatccacatcggggagaagccctacgtgtgtgagcagaggggcaaggtgttctcctggagcagcagcttccggggccacctgcggacccacagccgggagaagccctatgagtgcaaggagtgcaccaaggccttctag

SEQ ID NO: 177011 - DNA, 1497 bp, synthetic construct
  misc_feature 1..1497: note = Description of Artificial Sequence: Synthetic coding sequence
  source 1..1497: mol_type = other DNA
atgctggaggagggcgtgctgcccagccctggccctgccctgccccaggaggagaacacaggagaggagggcatggctgctggcctgctgacagctggcccccggggcagcaccttcttcagctctgtgacagtggcctttgcccaggagcgctggcgctgcctggtgtccaccccccgggaccgcttcaaggagggcatccctgggaagagccgcagcctggtgctgctgggcctgcctgtgtcccagcccggcatgaacagccagctggagcagcgggagggcgcctggatgctggagggggaggacctgcggagccccagccctggctggaagatcatcagcggcagccccccagagcaggccctgtctgaggccagcttccaggacccctgtgtggagatgcctcctggggacagcgaccacggcaccagtgacctggagaagagcttcaacctgcggcctgtgctgagcccccagcagagggtgcctgtggaggcccggcccaggaaatgtgagacccacacagagagcttcaagaacagcgagatcctgaagccccaccgggccaagccctatgcctgcaatgaatgtgggaaggccttctcctactgcagcagcctgagccagcaccagaagagccacactggagagaagccctatgagtgcagtgaatgtgggaaggccttcagccagagcagcagcctcatccagcaccagaggatccacactggagagaagccctacaagtgcagtgaatgtggccgggccttcagccagaatgccaacctgaccaagcaccagaggacccacactggagagaagccctaccgctgcagtgaatgtgagaaggccttcagtgactgcagcgccctggtgcagcaccagaggatccacactggagagaagccctatgagtgcagcgactgtgggaaggccttccgccacagcgccaacctgaccaaccaccagaggacccacactggagagaagccctacaagtgcagtgaatgtgggaaggccttctcctactgtgccgccttcatccagcaccagaggatccacactggagagaagccctaccgctgtgccgcctgtgggaaggccttcagccagagcgccaacctgaccaaccaccagaggacccacactggagagaagccctacaagtgcagtgaatgtgggaaggccttcagccagagcaccaacctgatcatccaccagaagacccacactggagagaagccctacaagtgcaatgaatgtgggaagttcttcagcgagagcagcgccctgatccgccaccacatcatccacactggagagaagccctatgagtgcaatgaatgtgggaaggccttcaaccagagcagcagcctgagccagcaccagaggatccacactggagtgaagccctatgagtgcagtgaatgtgggaaggccttccgctgcagcagcgcctttgtgcgccaccagaggctgcacgccggggagtag

SEQ ID NO: 177012 - DNA, 1425 bp, synthetic construct
  misc_feature 1..1425: note = Description of Artificial Sequence: Synthetic coding sequence
  source 1..1425: mol_type = other DNA
atggctgctggcctgctgacagctggcccccggggcagcaccttcttcagctctgtgacagtggcctttgcccaggagcgctggcgctgcctggtgtccaccccccgggaccgcttcaaggagggcatccctgggaagagccgcagcctggtgctgctgggcctgcctgtgtcccagcccggcatgaacagccagctggagcagcgggagggcgcctggatgctggagggggaggacctgcggagccccagccctggctggaagatcatcagcggcagccccccagagcaggccctgtctgaggccagcttccaggacccctgtgtggagatgcctcctggggacagcgaccacggcaccagtgacctggagaagagcttcaacctgcggcctgtgctgagcccccagcagagggtgcctgtggaggcccggcccaggaaatgtgagacccacacagagagcttcaagaacagcgagatcctgaagccccaccgggccaagccctatgcctgcaatgaatgtgggaaggccttctcctactgcagcagcctgagccagcaccagaagagccacactggagagaagccctatgagtgcagtgaatgtgggaaggccttcagccagagcagcagcctcatccagcaccagaggatccacactggagagaagccctacaagtgcagtgaatgtggccgggccttcagccagaatgccaacctgaccaagcaccagaggacccacactggagagaagccctaccgctgcagtgaatgtgagaaggccttcagtgactgcagcgccctggtgcagcaccagaggatccacactggagagaagccctatgagtgcagcgactgtgggaaggccttccgccacagcgccaacctgaccaaccaccagaggacccacactggagagaagccctacaagtgcagtgaatgtgggaaggccttctcctactgtgccgccttcatccagcaccagaggatccacactggagagaagccctaccgctgtgccgcctgtgggaaggccttcagccagagcgccaacctgaccaaccaccagaggacccacactggagagaagccctacaagtgcagtgaatgtgggaaggccttcagccagagcaccaacctgatcatccaccagaagacccacactggagagaagccctacaagtgcaatgaatgtgggaagttcttcagcgagagcagcgccctgatccgccaccacatcatccacactggagagaagccctatgagtgcaatgaatgtgggaaggccttcaaccagagcagcagcctgagccagcaccagaggatccacactggagtgaagccctatgagtgcagtgaatgtgggaaggccttccgctgcagcagcgcctttgtgcgccaccagaggctgcacgccggggagtag

SEQ ID NO: 177013 - DNA, 1728 bp, synthetic construct
  misc_feature 1..1728: note = Description of Artificial Sequence: Synthetic coding sequence
  source 1..1728: mol_type = other DNA
atggaccctgaagatgaaggagtggccggcgtgatgtctgtgggccccccagctgcccggctgcaggagcctgtgaccttcagagatgtggccgtggacttcacccaggaggagtggggccagctggaccccacccagaggatcctgtacagagatgtgatgctggagaccttcggccacctgctgagcatcggccctgagctgcccaagccagaggtgatcagccagctggagcagggcacagagctgtgggtggccgagcggggcaccacccagggctgccacccagcctgggagcccaggtctgagagccaggccagcaggaaggaggagggcctgcctgaggaggagcccagccacgtgacaggccgggagggcttccccacagatgccccctaccccaccaccctgggcaaggaccgggagtgccagagccagagcctggccctgaaggagcagaacaacctgaagcagctggagtttggcctgaaggaggcccctgtgcaggaccagggctacaagaccctgcggctgcgggagaactgtgtgctgagcagcagccccaaccccttccctgagatcagcagaggagagtacctgtacacctatgacagccagatcacagacagcgagcacaacagcagcctggtgtcccagcagacaggcagccctgggaagcagcccggggagaacagcgactgccaccgggacagcagccaggccatccccatcacagagctgaccaagagccaggtgcaggacaagccctacaagtgcacagactgtgggaagagcttcaaccacaatgcccacctgactgtgcacaagaggatccacactggagagcggccctacatgtgcaaggaatgtgggaaggccttcagccagaacagcagcctggtgcagcacgagcgcatccacactggagacaagccctacaagtgtgctgaatgtgggaagagcttctgccacagcacccacctgactgtgcaccggcgcatccacactggagagaagccctatgagtgccaggactgtggccgggccttcaaccagaacagcagcctgggccgccacaagaggacccacactggagagaagccctacacctgcagcgtgtgtgggaagagcttcagcaggaccacctgcctcttcctgcacctgcggacccacacagaggagcggccctatgagtgcaaccactgtgggaagggcttccgccacagcagcagcctggcccagcaccagaggaagcacgccggggagaagccctttgagtgccggcagaggctcatctttgagcagaccccagccctgaccaagcatgagtggacagaggccctgggctgtgacccccccctgagccaggatgagaggacccacagaagtgaccggcccttcaagtgcaaccagtgtgggaagtgcttcatccagagcagccacctgatccgccaccagatcacccacacccgggaggagcagccccacggccgcagcagaagaagagagcagagcagcagcaggaacagccacctggtgcagcaccagcaccccaacagcaggaagagcagcgctggaggagccaaggccggccagcctgagagccgggccctggccctgtttgacatccagaagatcatgcaggagaagaaccctgtgcacgtgattggagtggaggagcccagcgtgggcgcctccatgctgtttgacatccgggagagcacctag

SEQ ID NO: 177014 - DNA, 519 bp, synthetic construct
  misc_feature 1..519: note = Description of Artificial Sequence: Synthetic coding sequence
  source 1..519: mol_type = other DNA
atggaccctgaagatgaaggagtggccggcgtgatgtctgtgggccccccagctgcccggctgcaggtgaccatcaccaccatcaccacagctgctggcagcggccaggccagccctgcccagacagaccccttcaccagcagaagagatgagagcggcacagctgtgaatgccctggacacctggggcaacagtgatgctggccggggcgtggtgacagtgctggccggccagaggggcggccgggacagcaaccaggcccctggccccaggatgaggatgctgcatgctgccctgagcagccctgcccccaggagcccctgccctggggcctgggcccagcccctgggcggcaatgatggcagccccaggacagaatgtgatgaaagtgaccaccagggccggcccctgcgggactgtggccgcacagctgtgcagggcggccagtgcctgcagggccacctggccatccgggcccccctgagccggcagagcggctgcggcctgtgcagcccctag

SEQ ID NO: 177015 - DNA, 873 bp, synthetic construct
  misc_feature 1..873: note = Description of Artificial Sequence: Synthetic coding sequence
  source 1..873: mol_type = other DNA
atgtgcaaggaatgtgggaaggccttcagccagaacagcagcctggtgcagcacgagcgcatccacactggagacaagccctacaagtgtgccgagtgtgggaagagcttctgccacagcacccacctgactgtgcaccggcgcatccacactggagagaagccctatgagtgccaggactgtggccgggccttcaaccagaacagcagcctgggccgccacaagaggacccacactggagagaagccctacacctgcagcgtgtgtgggaagagcttcagcaggaccacctgcctcttcctgcacctgcggacccacacagaggagcggccctatgagtgcaaccactgtgggaagggcttccgccacagcagcagcctggcccagcaccagaggaagcatgctggggagaagccctttgaatgtcggcagaggctcatctttgagcagaccccagccctgaccaagcatgagtggacagaggccctgggctgtgacccccccctgagccaggatgagaggacccacagaagtgaccggcccttcaagtgcaaccagtgtgggaagtgcttcatccagagcagccacctgatccgccaccagatcacccacacccgggaggagcagccccacggccgcagcagaagaagagagcagagcagcagcaggaacagccacctggtgcagcaccagcaccccaacagcaggaagagcagcgctgggggcgccaaggccggccagcctgagagccgggccctggccctgtttgacatccagaagatcatgcaggagaagaaccctgtgcacgtgattggagtggaggagcccagcgtgggcgcctccatgctgtttgacatccgggagagcacctag

SEQ ID NO: 177016 - DNA, 822 bp, synthetic construct
  misc_feature 1..822: note = Description of Artificial Sequence: Synthetic coding sequence
  source 1..822: mol_type = other DNA
atgagccccaagagagatggcctgggcactggagatggcctgcacagccaggtgctgcaggagcaggtgtccactggagacaacctgcatgaatgtgacagccagggccccagcaaggacaccctggtgcgggagggcaagacctacaagtgcaaggaatgtggcagcgtcttcaacaagaacagcctgctggtgcgccaccagcagatccacactggagtgaagccctatgagtgccaggagtgtgggaaggccttccctgagaaggtggactttgtgcggcccatgaggatccacactggagagaagccctgcaagtgtgtggagtgtgggaaggtgttcaacagaagaagccacctgctgtgctaccggcagatccacactggagagaagccctatgagtgcagtgaatgtgggaagaccttctcctaccacagcgtcttcatccagcaccgggtgacccacactggagagaagctgtttggctgcaaggaatgtgggaagaccttctactacaacagcagcctgaccaggcacatgaagatccacactggagagaagccctgcaagtgcagtgaatgtgggaagaccttcacctaccgcagcgtcttcttccgccacagcatgacccacacagctgggaagccctatgagtgcaaggaatgtgggaagggcttctactacagctacagcctgaccaggcacaccaggagccacactggagagaagccctatgagtgcctggagcacaggaaggactttggctaccacagcgcctttgcccagcagagcaagatccacagcggcggcaagaacctgtag

SEQ ID NO: 177017 - DNA, 822 bp, synthetic construct; identical to SEQ ID NO: 177016
  misc_feature 1..822: note = Description of Artificial Sequence: Synthetic coding sequence
  source 1..822: mol_type = other DNA

SEQ ID NO: 177018 - DNA, 3630 bp, synthetic construct
  misc_feature 1..3630: note = Description of Artificial Sequence: Synthetic coding sequence
  source 1..3630: mol_type = other DNA
atggagtgctactacatcgtcatcagcagcacccacctgagcaatggccacttcaggaacatcaagggcgtcttccggggccccctgagcaagaatggaaacaagaccctggactatgcagagaaggagaacaccatcgccaaggccctggaggacctgaaggccaacttctactgtgagctgtgtgacaagcagtactacaagcaccaggagtttgacaaccacatcaacagctatgaccacgcccacaagcagaggctgaaggagctgaagcagcgggagtttgccagaaatgtggccagcaagagcaggaaggatgagaggaagcaggagaaggccctgcagaggctgcacaagctggccgagctgaggaaggagaccgtgtgtgcccctggcagcggccccatgttcaagagcaccaccgtgacagtgcgggagaactgcaatgagatcagccagagggtggtggtggacagcgtgaacaaccagcaggacttcaagtacaccctcatccacagcgaggagaacaccaaggatgccaccaccgtggctgaagatcctgagagcgccaacaactacacagccaagaacaaccaggtgggggaccaggcccagggcatccaccgccacaagattggcttctcctttgccttccccaagaaggcctctgtgaagctggagagcagcgctgctgccttcagcgagtacagtgatgatgcctctgtgggcaagggcttcagcaggaagagcagatttgtgcccagcgcctgccacctgcagcagagcagccccacagatgtgctgctgagcagcgaggagaagaccaacagcttccaccccccagaggccatgtgccgggacaaggagaccgtgcagacccaggagatcaaggaggtgtcctctgagaaggatgccctgctgctgcccagcttctgcaagttccagctgcagctgagcagtgatgctgacaactgccagaacagcgtgcccctggccgaccagatccccctggagagcgtggtgatcaatgaagacatccctgtgtctggcaacagctttgagctgctgggcaacaagagcacagtgctggacatgagcaatgactgcatctctgtgcaggccaccacagaggagaatgtgaagcacaatgaggccagcaccacagaggtggagaacaagaatggacctgagaccctggcccccagcaacacagaggaggtgaacatcaccatccacaagaagaccaacttctgcaagaggcagtgtgagccctttgtgcctgtgctgaacaagcacaggagcacagtgctgcagtggcccagcgagatgctggtgtacaccaccaccaagcccagcatctcctacagctgcaaccccctgtgctttgacttcaagagcaccaaggtgaacaacaacctggacaagaacaagccagacctgaaggacctgtgcagccagcagaagcaggaggacatctgcatgggccccctgagtgactacaaggatgtgtccacagagggcctgacagattatgaaattggcagcagcaagaacaagtgcagccaggtgacccccctgctggctgatgacatcctgagcagcagctgtgacagcggcaagaatgaaaatacaggccagcgctacaagaacatcagctgcaagatccgggagacagagaagtacaacttcaccaagagccagatcaagcaggacaccctggatgagaagtacaacaagatccggctgaaggagacccatgagtactggttccacaagagcaggaggaagaagaagaggaagaagctgtgccagcaccaccacatggagaagaccaaggagagcgagacccgctgcaagatggaggctgaaaattcctacacagaaaatgctgggaagtacctgctggagcccatcagcgagaagcagtacctggccgctgagcagctgctggacagccaccagctgctggacaagaggcccaagtctgagagcatcagcctgagtgacaatgaggagatgtgcaagacctggaacacagagtacaacacctatgacaccatcagcagcaagaaccactgcaagaagaacaccatcctgctgaatggccagagcaatgccaccatgatccacagcggcaagcacaacctgacctacagcaggacctactgctgctggaagaccaagatgagcagctgcagccaggaccacaggagcctggtgctgcagaatgacatgaagcacatgagccagaaccaggccgtgaagaggggctacaacagcgtgatgaatgaaagtgagcgcttctacaggaagaggcggcagcacagccacagctacagcagtgatgagagcctgaaccggcagaaccacctgcctgaggagttcctgcggccccccagcacctctgtggccccctgcaagcccaagaagaagagaagaaggaagaggggccgcttccaccctggctttgagaccctggagctgaaggagaacacagactaccctgtgaaggacaacagcagcctgaaccccctggacaggctcatcagcgaggacaagaaggagaagatgaagccccaggaggtggccaagattgaaagaaattctgagcagaccaaccagctgaggaacaagctgtccttccaccccaacaacctgctgcccagcgagaccaacggggagacagagcacctggagatggagaccaccagcggggagctgagtgatgtgtccaatgaccccaccacctctgtgtgtgtggccagcgcccccaccaaggaggccatcgacaacaccctgctggagcacaaggagaggtctgagaacatcaacctgaatgagaagcagatccccttccaggtgcccaacattgaaagaaacttccggcagagccagcccaagagctacctgtgccactatgagctggccgaggccctgccccagggcaagatgaatgagacccccacagagtggctgcgctacaacagcggcatcctgaacacccagccccccctgcccttcaaggaggcccacgtgtctggccacacctttgtgacagctgagcagatcctggcccccctggccctgcctgagcaggccctgctgatccccctggagaaccacgacaagttcaagaatgtgccctgtgaggtgtaccagcacatcctgcagcccaacatgctggccaacaaggtgaagttcaccttccccccagctgccctgcccccacccagcacccccctgcagcccctgcccctgcagcagagcctgtgcagcacctctgtgaccaccatccaccacacagtgctgcagcagcacgccgctgctgctgctgctgctgctgctgctgctgctgctggcaccttcaaggtgctgcagccccaccagcagttcctgagccagatcccagccctgaccaggaccagcctgccccagctgtctgtgggccctgtgggcccccggctgtgccccggcaaccagcccacctttgtggccccaccccagatgcccatcatcccagcctctgtgctgcaccccagccacctggccttccccagcctgccccacgccctcttccccagcctgctgagcccccaccccaccgtcatccccctgcagcccctcttctag

SEQ ID NO: 177019 - DNA, 210 bp, synthetic construct
  misc_feature 1..210: note = Description of Artificial Sequence: Synthetic coding sequence
  source 1..210: mol_type = other DNA
atgcctgccaatgaagatgccccccagcccggggagcacggcagcgcctgtgaggtgtctgtgtcctttgaagatgtgacagtggacttcagccgggaggagtggcagcagctggacagcacccagaggcggctgtaccaggatgtgatgctggagaactacagccacctgctgtctgtgggcaaggacaaccaccctgtgaagctgtag

SEQ ID NO: 177020 - DNA, 1986 bp, synthetic construct
  misc_feature 1..1986: note = Description of Artificial Sequence: Synthetic coding sequence
  source 1..1986: mol_type = other DNA
atgcctgccaatgaagatgccccccagcccggggagcacggcagcgcctgtgaggtgtctgtgtcctttgaagatgtgacagtggacttcagccgggaggagtggcagcagctggacagcacccagaggcggctgtaccaggatgtgatgctggagaactacagccacctgctgtctgtgggctttgaggtgcccaagccagaggtgatcttcaagctggagcagggcgagggcccctggaccctggagggggaggccccccaccagagctgcagtgatggcaagtttggcatcaagcccagccagaggcgcatcagcggcaagagcaccttccacagcgagatggagggggaggacaccagagatgacagcctgtacagcatcctggaggagctgtggcaggatgctgagcagatcaagcgctgccaggagaagcacaacaagctgctgagcaggaccaccttcctgaacaagaagatcctgaacacagagtgggactatgagtacaaggactttgggaagtttgtgcaccccagccccaacctgatcctgagccagaagaggccccacaagagggacagctttgggaagagcttcaagcacaacctggacctgcacatccacaacaagagcaatgctgccaagaacctggacaagaccatcggccacggccaggtgttcacccagaacagcagctacagccaccacgagaacacccacactggagtgaagttctgtgagaggaaccagtgtgggaaggtgctgagcctgaagcacagcctgagccagaatgtgaagttccccatcggggagaaggccaacacctgcacagaatttgggaagatcttcacccagaggagccacttctttgccccccagaagatccacacagtggagaagccccatgagctgagcaaatgtgtgaatgtgttcacccagaagcccctgctgagcatctacctgcgggtgcacagagatgagaagctgtacatctgcaccaagtgtgggaaggccttcatccagaacagcgagctgatcatgcatgagaagacccacacccgggagaagccctacaagtgcaatgaatgtgggaagagcttcttccaggtgagcagcctgctgcggcaccagaccacccacactggagagaagctgtttgaatgttctgaatgtgggaagggcttcagcctgaacagcgccctgaacatccaccagaagatccacactggagagcggcaccacaagtgcagtgaatgtgggaaggccttcacccagaagagcaccctgaggatgcaccagaggatccacactggagagaggagctacatctgcacccagtgtggccaggccttcatccagaaggcccacctgattgcccaccagaggatccacactggagagaagccctatgaatgtagtgactgtgggaagagcttccccagcaagagccagctgcagatgcacaagaggatccacactggagagaagccctacatctgcacagaatgtgggaaggccttcaccaacagaagcaacctgaacacccaccagaagagccacactggagagaagagctacatctgtgccgagtgtgggaaggccttcacagacaggagcaacttcaacaagcaccagaccatccacactggagagaagccctacgtgtgtgccgactgtggccgggccttcatccagaagtctgagctgatcacccaccagaggatccacaccacagagaagccctacaagtgcccagactgtgagaagagcttcagcaagaagccccacctgaaggtgcaccagaggatccacactggagagaagccctacatctgtgccgagtgtgggaaggccttcacagacaggagcaacttcaacaagcaccagaccatccacactggagacaagccctacaagtgcagcgactgtgggaagggcttcacccagaagtctgtgctgtccatgcacaggaacatccacacctag

SEQ ID NO: 177021 - DNA, 312 bp, synthetic construct
  misc_feature 1..312: note = Description of Artificial Sequence: Synthetic coding sequence
  source 1..312: mol_type = other DNA
atgcctgccaatgaagatgccccccagcccggggagcacggcagcgcctgtgaggtgtctgtgtcctttgaagatgtgacagtggacttcagccgggaggagtggcagcagctggacagcacccagaggcggctgtaccaggatgtgatgctggagaactacagccacctgctgtctgtgggctttgaggtgcccaagccagaggtgatcttcaagctggagcagggcgagggcccctggaccctggagggggaggccccccaccagagctgcagcggcatcagcacctactttgtgaccagcacagtgtag

SEQ ID NO: 177022 - DNA, 1986 bp, synthetic construct; identical to SEQ ID NO: 177020
  misc_feature 1..1986: note = Description of Artificial Sequence: Synthetic coding sequence
  source 1..1986: mol_type = other DNA

SEQ ID NO: 177023 - DNA, 369 bp, synthetic construct
  misc_feature 1..369: note = Description of Artificial Sequence: Synthetic coding sequence
  source 1..369: mol_type = other DNA
atgcctgccaatgaagatgccccccagcccggggagcacggcagcgcctgtgaggtgtctgtgtcctttgaagatgtgacagtggacttcagccgggaggagtggcagcagctggacagcacccagaggcggctgtaccaggatgtgatgctggagaactacagccacctgctgtctgtgggctttgaggtgcccaagccagaggtgatcttcaagctggagcagggcgagggcccctggaccctggagggggaggccccccaccagagctgcagtgatggcaagtttggcatcaagcccagccagaggcgcatcagcggcaagagcaccttccacagcgagatggagggggaggacaccctgtgctag

SEQ ID NO: 177024 - DNA, 1551 bp, synthetic construct
  misc_feature 1..1551: note = Description of Artificial Sequence: Synthetic coding sequence
  source 1..1551: mol_type = other DNA
atgcacggcaggaaggatgatgcccagaagcagcctgtgaagaaccagctgggcctgaacccccagagccacctgcctgagctgcagctgttccaggccgagggcaagatctacaagtatgaccacatggagaagtctgtgaacagcagcagcctggtgtccccaccccagaggatcagcagcacagtgaagacccacatcagccacacctatgagtgcaactttgtggacagcctcttcacccagaaggagaaggccaacatcggcacagagcactacaagtgcagcgagcggggcaaggccttccaccagggcctgcacttcaccatccaccagatcatccacaccaaggagacccagttcaagtgtgacatctgtgggaagatcttcaacaagaagagcaacctggccagccaccagaggatccacactggagagaagccctacaagtgcaatgaatgtgggaaggtgttccacaacatgagccacctggcccagcaccggcgcatccacactggagagaagccctacaagtgcaatgaatgtgggaaggtgttcaaccagatcagccacctggcccagcaccagaggatccacactggagagaagccctacaagtgcaatgaatgtgggaaggtgttccaccagatcagccacctggcccagcacaggaccatccacactggagagaagccctatgagtgcaacaagtgtgggaaggtgttcagcaggaacagctacctggtgcagcacctgatcatccacactggagagaagccctaccgctgcaatgtgtgtgggaaggtgttccaccacatcagccacctggcccagcaccagaggatccacactggagagaagccctacaagtgcaatgaatgtgggaaggtgttcagccacaagagcagcctggtgaaccactggaggatccacactggagagaagccctacaagtgcaatgaatgtgggaaggtgttcagccacaagagcagcctggtgaaccactggaggatccacactggagagaagccctacaagtgcaatgaatgtgggaaggtgttcagcaggaacagctacctggcccagcacctgatcatccacgccggggagaagccctacaagtgtgatgaatgtgacaaggccttcagccagaacagccacctggtgcagcaccaccgcatccacactggagagaagccctacaagtgtgatgaatgtgggaaggtgttcagccagaacagctacctggcctaccactggaggatccacactggagagaaggcctacaagtgcaatgaatgtgggaaggtgtttggcctgaacagcagcctggcccaccacaggaagatccacactggagagaagcccttcaagtgcaatgaatgtgggaaggccttctccatgaggagcagcctgaccaaccaccacgccatccacactggagagaagcacttcaagtgcaatgaatgtgggaagctgttccgggacaacagctacctggtgcgccaccagcgcttccacgccggcaagaagagcaacacctgcaactag

SEQ ID NO: 177025 - DNA, 1467 bp, synthetic construct
  misc_feature 1..1467: note = Description of Artificial Sequence: Synthetic coding sequence
  source 1..1467: mol_type = other DNA
atgcacggcaggaaggatgatgcccagaagcagcctgtgaagaaccagctgggcctgaacccccagagccacctgcctgagctgcagctgttccaggccgagggcaagatctacaagtatgaccacatggagaagtctgtgaacagcagcagcctggtgtccccaccccagaggatcagcagcacagtgaagacccacatcagccacacctatgagtgcaactttgtggacagcctcttcacccagaaggagaaggccaacatcggcacagagcactacaagtgcagcgagcggggcaaggccttccaccagggcctgcacttcaccatccaccagatcatccacaccaaggagacccagttcaagtgtgacatctgtgggaagatcttcaacaagaagagcaacctggccagccaccagaggatccacactggagagaagccctacaagtgcaatgaatgtgggaaggtgttccacaacatgagccacctggcccagcaccggcgcatccacactggagagaagccctacaagtgcaatgaatgtgggaaggtgttcaaccagatcagccacctggcccagcaccagaggatccacactggagagaagccctacaagtgcaatgaatgtgggaaggtgttccaccagatcagccacctggcccagcacaggaccatccacactggagagaagccctatgagtgcaacaagtgtgggaaggtgttcagcaggaacagctacctggtgcagcacctgatcatccacactggagagaagccctaccgctgcaatgtgtgtgggaaggtgttcagccacaagagcagcctggtgaaccactggaggatccacactggagagaagccctacaagtgcaatgaatgtgggaaggtgttcagccacaagagcagcctggtgaaccactggaggatccacactggagagaagccctacaagtgcaatgaatgtgggaaggtgttcagcaggaacagctacctggcccagcacctgatcatccacgccggggagaagccctacaagtgtgatgaatgtgacaaggccttcagccagaacagccacctggtgcagcaccaccgcatccacactggagagaagccctacaagtgtgatgaatgtgggaaggtgttcagccagaacagctacctggcctaccactggaggatccacactggagagaaggcctacaagtgcaatgaatgtgggaaggtgtttggcctgaacagcagcctggcccaccacaggaagatccacactggagagaagcccttcaagtgcaatgaatgtgggaaggccttctccatgaggagcagcctgaccaaccaccacgccatccacactggagagaagcacttcaagtgcaatgaatgtgggaagctgttccgggacaacagctacctggtgcgccaccagcgcttccacgccggcaagaagagcaacacctgcaactag

SEQ ID NO: 177026 - DNA, 1467 bp, synthetic construct; identical to SEQ ID NO: 177025
  misc_feature 1..1467: note = Description of Artificial Sequence: Synthetic coding sequence
  source 1..1467: mol_type = other DNA

SEQ ID NO: 177027 - DNA, 1551 bp, synthetic construct; identical to SEQ ID NO: 177024
  misc_feature 1..1551: note = Description of Artificial Sequence: Synthetic coding sequence
  source 1..1551: mol_type = other DNA

SEQ ID NO: 177028 - DNA, 1551 bp, synthetic construct; identical to SEQ ID NO: 177024
  misc_feature 1..1551: note = Description of Artificial Sequence: Synthetic coding sequence
  source 1..1551: mol_type = other DNA

SEQ ID NO: 177029 - DNA, 1551 bp, synthetic construct; identical to SEQ ID NO: 177024
  misc_feature 1..1551: note = Description of Artificial Sequence: Synthetic coding sequence
  source 1..1551: mol_type = other DNA

SEQ ID NO: 177030 - DNA, 1551 bp, synthetic construct; identical to SEQ ID NO: 177024
  misc_feature 1..1551: note = Description of Artificial Sequence: Synthetic coding sequence
  source 1..1551: mol_type = other DNA

SEQ ID NO: 177031 - DNA, 5034 bp, synthetic construct
  misc_feature 1..5034: note = Description of Artificial Sequence: Synthetic coding sequence
  source 1..5034: mol_type = other DNA
atggaggtgcctgagcccacctgcccagcccccccagcccgggaccagcctgcccccaccccaggccccccaggggcccctgggggccaggccagcccccacctgaccctgggccctgtgctgctgcccccagagcagggcctggccccacccaccgtcttcctgaaggccctgcccatccccctgtaccacacagtgcccccaggcggcctgcagccccgggcccccctggtgacaggcagcctggatggcggcaatgtgcccttcatcctgagccctgtgctgcagcctgagggccctggccccacccaggtgggcaagccagctgcccccaccctgactgtgaacatcgtgggcaccctgcctgtgctgagccctggcctgggccccaccctgggcagccctgggaaggtgagaaatgccggcaagtacctgtgcccccactgcggccgggactgcctgaagcccagcgtgctggagaagcacatccgcagccacactggagagcggcccttcccctgtgccacctgtggcatcgccttcaagacccagagcaacctgtacaagcacaggaggacccagacccacctgaacaacagccggctgagcagcgagagcgagggcgccggcggcggcctgctggaggagggggacaaggccggggagccccccaggcctgagggccgcggggagagccgctgccagggcatgcatgagggcgccagcgagcggcccctgagccctggggcccacgtgcccctgctggccaagaacctggatgtgaggacagaagctgccccctgccccggcagcgcctttgctgaccgggaggccccctgggacagcgcccccatggccagccctggcctgcctgctgccagcacccagccctggaggaagctgcctgagcagaagagccccacagctgggaagccctgtgccctgcagaggcagcaggccacagctgctgagaagccctgggatgccaaggcccctgagggccgcctgaggaaatgtgagagcacagacagcggctacctgagcagaagtgacagcgctgagcagccccacgccccctgcagccccctgcacagcctgtctgagcacagcgctgagagcgagggggagggcggccctggccctggccctggggtggccggggctgagcccggggcccgggaggccggcctggagctggagaagaagaggctggaggagcgcatcgcccagctgatcagccacaaccaggccgtggtggatgatgcccagctggacaacgtgcggcccaggaagacaggcctgagcaagcagggcagcattgacctgcccaccccctacacctacaaggacagcttccactttgacatccgggccctggagcctggaagaagaagagcccctggccctgtgcgcagcacctggaccccaccagacaagagccggcccctcttcttccacagcgtgcccacccagctgagcaccaccgtggagtgtgtgcctgtgaccaggagcaacagcctgccctttgtggagggcagcaggacctggctggagccccgggagccccgggacccctggagcaggacccagaagcccctgagccccaggcctggccctgcccggctgggctgccgcagcggcctgagcagcacagatgtgcccagcggccacccccgggccctggtgcggcaggccgctgtggaggacctgcccggcacccccatcggagatgccctggtgcctgctgaggacacagatgccaagaggacagctgcccgggaggccatggccggcaagggccgggccggcggcaggaaatgtggccagaggcggctgaagatgttcagccaggagaagtggcaggtgtatggagatgagaccttcaagaggatctaccagaagatgaaggccagcccccacggcggcaagaaggcccgggaggtgggcatgggcagcggggctgagctgggcttccccctgcagaaggaggccgccggcagcagcggcaccgtgcccacccaggacaggaggacccctgtgcatgaggacatctctgctggggccaccccagagccctggggcaaccccccagccctggaggccagcctggtgacagagcccaccaagcacggggagaccgtggcccggcggggggacagcgaccggccccgggtggaggaggccgtgagcagccctgccctgggcggccgggacagcccctgcagcggcagccgcagccccctggtgagccccaacggccgcctggagctgggctggcagatgcccccagcccctggccccctgaagggaggagatgtggaggcccccaggcctgtgtggccagaccccaagctggagggcggggcccggggcgtgggagatgtgcaggagacctgcctgtgggcccagacagtgctgcgctggcccagccggggcagcggggaggacaagctgcccagcgagaggaagaagctgaaggtggaggacctgcacagctggaagcagcctgagcctgtgtctgctgagacccctgggggccccacccagcctgccagcctgagcagccagaagcaggatgctgaccccggggaggtgcctgggggcagcaaggagagcgcccggcaggtgggggagcccctggagagcagcggggccagcctggccgccgcctctgtggccctgaagagggtgggcccccgggacaaggccacccccctgcaccctgctgccccagccccagctgagcaccccagcctggccaccccaccccaggccccccgggtgctgagcgccctggccgacaatgccttcagccccaagtacctgctgcggctgccccaggccgagacccccctgcccctgcccatcccctggggccccaggcacagccaggacagcctgtgcagcagcggctggccagaggagcgggccagctttgtgggcagcggcctgggcacccccctgagccccagccctgccagcggccccagccctggagaggccgacagcatcctggaggaccccagctgcagccggccccaggacggcaggaagggggcccagctgggcggggacaagggggacaggatggccaccagcaggcctgctgcccgggagctgcccatcagcgcccctggggccccccgggaggccaccagcagcccccccacccccacctgtgaggcccacctggtgcaggacatggagggggacagccaccgcatccaccggctgtgcatgggcagcaccctggcccgggcccggctgtctggagatgtgctgaacccctgggtgcccaactgggagctgggggagcccccaggaaatgcccctgaggaccccagcagcggccccctggtgggccctgacccctgcagccccctgcagcccggcagcttcctgacagccctgacccggccccagggcgtgcccccaggctggccagagctggccctgagcagccacagcggcaccagccgcagccacagcaccaggagcccccacagcacccagaaccccttccccagcctgaaggccgagccccggctgacctggtgctgcctgagccgctctgtgcccctgcctgctgagcagaaggccaaggccgcctctgtgtacctggccgtgcacttccctggcagcagcctgagagatgagggccccaacggccccccaggcagcaatggaggctggacctggaccagccctggagagggcggccctgcccagatgagcaagttctcctaccccaccgtgcctggggtgatgccccagcaccaggtgtctgagcctgagtggaagaagggcctgccctggagggccaagatgagccggggcaacagcaagcagaggaagctgaagatcaaccccaagcgctacaagggcaacttcctgcagagctgtgtgcagctgcgggccagccggctgcggacccccacctgggtgagaagaagaagccgccaccccccagccctggagggcctgaagccctgcaggaccccaggccagaccagcagcgagattgctggcctgaacctgcaggaggagcccagctgtgccaccagcgagagccccccctgctgcggcaaggaggagaagaaggagggggactgccggcagaccctgggcaccctgagcctgggcaccagcagccgcatcgtgcgggagatggacaagaggacagtgaaggacatcagccccagcgctggggagcacggggactgcaccacccacagcacagctgccaccagcggcctgagcctgcagagcgacacctgcctggccgtggtgaatgatgtgcccctgcccccaggcaagggcctggacctgggcctgctggagacccagctgctggccagccaggacagcgtgtccacagaccccaagccctacatcttcagtgatgcccagaggcccagcagctttggcagcaagggcaccttcccccaccacgacatcgccacctctgtggccgctgtgtgcatcagcctgcctgtgaggacagaccacatcgcccaggagatccacagcgctgagagccgggaccacagccagacagctggccgcaccctgaccagcagcagcccagacagcaaggtgacagaggagggccgggcccagaccctgctgcccggccggcccagcagcggccagaggatcagtgacagcgtgcccctggagagcacagagaagacccacctggagatcccagccagcggccccagcagcgccagcagccaccacaaggagggccgccacaagaccttcttccccagccggggccagtatggctgtggggagatgacagtgccctgccccagcctgggcagtgatggcaggaagaggcaggtgtctggcctcatcaccaggaaggacagcgtggtgcccagcaagccagagcagcccatcgagatccctgaggcccccagcaagagcctgaagaagaggagcctggagggcatgaggaagcagaccagggtggagttcagtgacaccagcagtgatgatgaggaccggctggtgattgagatctag

SEQ ID NO: 177032 - DNA, 264 bp, synthetic construct
  misc_feature 1..264: note = Description of Artificial Sequence: Synthetic coding sequence
  source 1..264: mol_type = other DNA
atgggccccctgaccttcagagatgtggccatcgagttcagcctgaaggagtggcagtgcctggacacagcccagaggaacctgtacagaaatgtgatgctggagaactacagaaacctggtgttcctgggcatcaccgtgtccaagccagacctgatcacctgcctggagcagggcaaggaggcctggagcatgaagagacatgagatcatggtggccaagcccacagagagctacagcgtgacccagagcggcatgcagtag

SEQ ID NO: 177033 - DNA, 1788 bp, synthetic construct
  misc_feature 1..1788: note = Description of Artificial Sequence: Synthetic coding sequence
  source 1..1788: mol_type = other DNA
atgggccccctgaccttcagagatgtggccatcgagttcagcctgaaggagtggcagtgcctggacacagcccagaggaacctgtacagaaatgtgatgctggagaactacagaaacctggtgttcctgggcatcaccgtgtccaagccagacctgatcacctgcctggagcagggcaaggaggcctggagcatgaagagacatgagatcatggtggccaagcccaccgtgatgtgcagccactttgcccaggacctgtggccagagcagaacatcaaggacagcttccagaaggtgaccctgaagagatatggcaagtgcagacatgagaacctgcccctgaggaagggctgtgagagcatggatgagtgcaagatgcacaagggcggctgcaatggcctgaaccagtgcctgacagccacccagagcaagatcttccagtgtgacaagtatgtgaaggtggcccacaagttcagcaacagcaacagacatgagatccgccacaccaagaagaagcccttcaagtgcaccaagtgtgggaagagctttggcatgatcagctgcctgacagagcacagccgcatccacaccagggtgaacttctacaagtgtgaggagtgtgggaaggccttcaactggagcagcaccctgaccaagcacaagaggatccacactggagagaagccctacaagtgtgaggagtgtgggaaggccttcaaccagagcagcaacctgatcaagcacaagaagatccacactggagagaagccctacaagtgtgaggagtgtgggaagaccttcaaccgcttcagcaccctgaccacccacaagatcatccacactggagagaagccctacaagtgcaaggaatgtgggaaggccttcaacagaagcagcaccctgaccacccacaggaagatccacactggagagaagccctacaagtgtgaggagtgtgggaaggccttcaagcagagcagcaacctgaccacccacaagatcatccacactggagagaagccctacaagtgcaagaagtgtgggaaggccttcaaccagagcgcccacctgaccacccatgaggtgatccacactggagagaagccctacaagtgtgagaagtgtgggaaggccttcaaccacttcagccacctgaccacccacaagatcatccacactggagagaagccctacaagtgcaaggaatgtgggaaggccttcaagcacagcagcaccctgaccaagcacaagatcatccacactggagagaagccctacaagtgcaaggaatgtgagaaggccttcaaccagagcagcaagctgacagagcacaagaagatccacactggagagaagccctatgaatgtgagaagtgtgggaaggccttcaaccagagcagcaacctgaccaggcacaagaagagccacacagaggagaagccctacaagtgtgaggagtgtgggaagggcttcaagtggcccagcaccctgaccatccacaagatcatccacactggagagaagccctacaagtgtgaggagtgtgggaaggccttcaaccagagcagcaagctgaccaagcacaagaagatccacactggagagaagccctacacctgtgaggagtgtgggaaggccttcaaccagagcagcaacctgaccaagcacaagaggatccacactggagagaagccctacaagtgtgaggagtgtgacaaggccttcaagtggagctctgtgctgaccaagcacaagatcatccacactggagagaagctgcagatctag

SEQ ID NO: 177034 - DNA, 1689 bp, synthetic construct
  misc_feature 1..1689: note = Description of Artificial Sequence: Synthetic coding sequence
  source 1..1689: mol_type = other DNA
atgggccccctgaccttcagagatgtggccatcgagttcagcctgaaggagtggcagtgcctggacacagcccagaggaacctgtacagaaatgtgatgctggagaactacagaaacctggtgttcctggtgatgtgcagccactttgcccaggacctgtggccagagcagaacatcaaggacagcttccagaaggtgaccctgaagagatatggaaaatgtagacatgagaacctgcccctgaggaagggctgtgagagcatggatgagtgcaagatgcacaagggcggctgcaatggcctgaaccagtgcctgacagccacccagagcaagatcttccagtgtgacaagtatgtgaaggtggcccacaagttcagcaacagcaacagacatgagatccgccacaccaagaagaagcccttcaagtgcaccaagtgtgggaagagctttggcatgatcagctgcctgacagagcacagccgcatccacaccagggtgaacttctacaagtgtgaagaatgtgggaaggccttcaactggagcagcaccctgaccaagcacaagaggatccacactggagagaagccctacaagtgtgaagaatgtgggaaggccttcaaccagagcagcaacctgatcaagcacaagaagatccacactggagagaagccctacaagtgtgaagaatgtgggaagaccttcaaccgcttcagcaccctgaccacccacaagatcatccacactggagagaagccctacaagtgcaaggaatgtgggaaggccttcaacagaagcagcaccctgaccacccacaggaagatccacactggagagaagccctacaagtgtgaagaatgtgggaaggccttcaagcagagcagcaacctgaccacccacaagatcatccacactggagagaagccctacaagtgcaagaagtgtgggaaggccttcaaccagagcgcccacctgaccacccatgaagtcatccacactggagagaagccctacaagtgtgagaagtgtgggaaggccttcaaccacttcagccacctgaccacccacaagatcatccacactggagagaagccctacaagtgcaaggaatgtgggaaggccttcaagcacagcagcaccctgaccaagcacaagatcatccacactggagagaagccctacaagtgcaaggaatgtgagaaggccttcaaccagagcagcaagctgacagagcacaagaagatccacactggagagaagccctatgaatgtgagaagtgtgggaaggccttcaaccagagcagcaacctgaccaggcacaagaagagccacacagaggagaagccctacaagtgtgaagaatgtgggaagggcttcaagtggcccagcaccctgaccatccacaagatcatccacactggagagaagccctacaagtgtgaagaatgtgggaaggccttcaaccagagcagcaagctgaccaagcacaagaagatccacactggagagaagccctacacctgtgaagaatgtgggaaggccttcaaccagagcagcaacctgaccaagcacaagaggatccacactggagagaagccctacaagtgtgaagaatgtgacaaggccttcaagtggagctctgtgctgaccaagcacaagatcatccacactggagagaagctgcagatctag

SEQ ID NO: 177035 - DNA, 1413 bp, synthetic construct
  misc_feature 1..1413: note = Description of Artificial Sequence: Synthetic coding sequence
  source 1..1413: mol_type = other DNA
atgcacaagggcggctgcaatggcctgaaccagtgcctgacagccacccagagcaagatcttccagtgtgacaagtatgtgaaggtggcccacaagttcagcaacagcaacagacatgagatccgccacaccaagaagaagcccttcaagtgcaccaagtgtgggaagagctttggcatgatcagctgcctgacagagcacagccgcatccacaccagggtgaacttctacaagtgtgaagaatgtgggaaggccttcaactggagcagcaccctgaccaagcacaagaggatccacactggagagaagccctacaagtgtgaagaatgtgggaaggccttcaaccagagcagcaacctgatcaagcacaagaagatccacactggagagaagccctacaagtgtgaagaatgtgggaagaccttcaaccgcttcagcaccctgaccacccacaagatcatccacactggagagaagccctacaagtgcaaggaatgtgggaaggccttcaacagaagcagcaccctgaccacccacaggaagatccacactggagagaagccctacaagtgtgaagaatgtgggaaggccttcaagcagagcagcaacctgaccacccacaagatcatccacactggagagaagccctacaagtgcaagaagtgtgggaaggccttcaaccagagcgcccacctgaccacccatgaagtcatccacactggagagaagccctacaagtgtgagaagtgtgggaaggccttcaaccacttcagccacctgaccacccacaagatcatccacactggagagaagccctacaagtgcaaggaatgtgggaaggccttcaagcacagcagcaccctgaccaagcacaagatcatccacactggagagaagccctacaagtgcaaggaatgtgagaaggccttcaaccagagcagcaagctgacagagcacaagaagatccacactggagagaagccctatgaatgtgagaagtgtgggaaggccttcaaccagagcagcaacctgaccaggcacaagaagagccacacagaggagaagccctacaagtgtgaagaatgtgggaagggcttcaagtggcccagcaccctgaccatccacaagatcatccacactggagagaagccctacaagtgtgaagaatgtgggaaggccttcaaccagagcagcaagctgaccaagcacaagaagatccacactggagagaagccctacacctgtgaagaatgtgggaaggccttcaaccagagcagcaacctgaccaagcacaagaggatccacactggagagaagccctacaagtgtgaagaatgtgacaaggccttcaagtggagctctgtgctgaccaagcacaagatcatccacactggagagaagctgcagatctag

SEQ ID NO: 177036 - DNA, 1806 bp, synthetic construct
  misc_feature 1..1806: note = Description of Artificial Sequence: Synthetic coding sequence
  source 1..1806: mol_type = other DNA
atgggccccctggagttcagagatgtggccatcgagttcagcctggaggagtggcactgcctggacacagcccagcagaacctgtacagagatgtgatgctggagaactaccgccacctggtgttcctgggcatcgtggtgaccaagccagacctgatcacctgcctggagcagggcaagaagcccttcaccgtgaagagacatgagatgattgccaagagccctgtgatgtgcttccactttgcccaggacctgtgcccagagcagagcctgaaggacagcttccagaaggtgattgtgaccaggtatgagaagcgggagtatggcaacctggagctgaagaagggctgtgagagcgtggatgagggcaaggtgcacaagaggggctacaacggcctgaaccagtgcctgacagccacccagagcaaggtgttccagtgtgacacctacgtgaaggtgagccacatcttcagcaacagcaacagacacaagatccgggacaccgggaagaagcccttcaagtgcattgaatgtgggaaggccttcaaccagagcagcaccctggccacccacaagaagatccacactggagagatcacctgcaagtgtgaagaatgtgggaaggccttcaacagaagcagccacctgaccagccacaagaggatccacactggagagaagcgctacaagtgtgaggactgtgggaaggagctgaagtacagcagcaccctgacagcccacaagaggatccacactggagagaagcgctacaagtgtgaggactgtgggaaggagctgaagtacagcagcaccctgacagcccacaagaggatccacactggagagaagccctacaagtgtgacaagtgtggccgggccttcatcagcagcagcatcctgtatgtgcacaagatcagccacacagaggagaagccctacaagtgtgaagaatgtgggaaggccttcaagctgagcagcatcctgagcacccacaagaggatccacactggagagaagccctacaagtgtgaagaatgtgggaaggccttcagaagaagcctggtgctgcggacccacaagaggatccacactggagagaagccctacaagtgtgacaagtgtgggaaggccttcatcagcagcagcctgctgtacaagcacaagatcagccacagcgagaagaagccctacaagtgtgaagaatgtgggaaggccttcaagaggagcagcaccctgaccatccacaagatcagccacacagaggagaagccctacaagtgccaggagtgtgacaaggtgttcaagaggagcagcgccctgagcacccacaagatcatccacagcggggagaagccctacaagtgtgaagaatgtgggaaggccttcaagaggagcagcaacctgaccacccacaagatcagccacacagaggagaagctgtacaagtgccaggagtgtgacaaggccttcaagtacagcagcgccctgagcacccacaagatcatccacagcggggagaacccctacaagtgtgaagaatgtgggaaggccttcaagaggagctctgtgctgagcaagcacaagatcatccacactggagccaagccctacaagtgtgaagaatgtgggaaggccttcaagaggagcagccagctgaccagccacaagatcagccacactggagagaagccctacaagtgtgaagaatgtgggaaggccttcaacctgagcagtgacctgaacacccacaagaggatccacatcggccagaaggcctacatcgtgaagaacatggccaacctgtag

SEQ ID NO: 177037 - DNA, 369 bp, synthetic construct
  misc_feature 1..369: note = Description of Artificial Sequence: Synthetic coding sequence
  source 1..369: mol_type = other DNA
atgaggaagcacatcaaggagcgggagctgagcctgatggagcagatcaaggagttcatcctggagaggaacaccatgaatgtgcccaccgtgggcaagcccttcagcggccgccacagcctgctgagcatccgggagttcaccctgggccgcagccccatgaatgtgatgaatgtgggggagcccagcgagaagaagcccacctgcatgatcatccgggagttcatcctggagaagaaccccatcctggtgagaaatgtgggcaagaccagcgctgaggtgcagctgctgctgaacacccgggagttcatcctggagatcaacagcaggaaccgggagatcaaggagtttgctgagtgcttctcctag

SEQ ID NO: 177038 - DNA, 1911 bp, synthetic construct
  misc_feature 1..1911: note = Description of Artificial Sequence: Synthetic coding sequence
  source 1..1911: mol_type = other DNA
atggcccccaggcctcccacagctgccccccaggagagcgtgaccttcaaggatgtgtctgtggacttcacccaggaggagtggtaccacgtggaccctgcccagaggagcctgtacagagatgtgatgctggagaactacagccacctggtgtccctgggctaccaggtgtccaagccagaggtgatcttcaagctggagcagggcgaggagccctggatcagcgagggggagatccagaggcccttctacccagactggaagaccaggcctgaggtgaagagcagccacctgcagcaggatgtgtctgaggtgagccactgcacccatgacctgctgcacgccaccctggaggacagctgggatgtgagcagccagctggaccggcagcaggagaactggaagaggcacctgggcagcgaggccagcacccagaagaagatcatcaccccccaggagaactttgagcagaacaagtttggagagaacagccggctgaacaccaacctggtgacccagctgaacatcccagcccgcatccggcccagtgaatgtgagaccctgggcagcaacctgggccacaatgctgacctgctgaatgaaaacaacatcctggccaagaagaagccctacaagtgtgacaagtgcaggaaggccttcatccacaggagcagcctgaccaagcatgagaagacccacaagggggagggcgccttccccaatggaacagaccagggcatctacccaggcaagaagcaccatgaatgtacagactgtgggaagaccttcctgtggaagacccagctgacagagcaccagaggatccacactggagagaagccctttgaatgtaatgtgtgtgggaaggccttccgccacagcagcagcctgggccagcatgaaaatgcccacactggagagaagccctaccagtgcagcctgtgtgggaaggccttccagaggagcagcagcctggtgcagcaccagaggatccacactggagagaagccctaccgctgcaacctgtgtggccgctccttcagacatggcaccagcctgacccagcacgaggtgacccacagcggggagaagcccttccagtgcaaggaatgtgggaaggccttcagccgctgcagcagcctggtgcagcacgagaggacccacactggagagaagccctttgaatgttccatctgtggccgggccttcggccagagccccagcctgtacaagcacatgaggatccacaagaggggcaagccctaccagagcagcaactacagcattgacttcaagcacagcaccagcctgacccaggatgagagcaccctgacagaggtgaagagctaccactgcaatgactgtggggaggacttcagccacatcacagacttcacagaccaccagaggatccacacagctgagaacccctatgactgtgagcaggccttcagccagcaggccatcagccaccctggagagaagccctaccagtgcaatgtgtgtgggaaggccttcaagaggagcaccagcttcatcgagcaccaccgcatccacactggagagaagccctatgagtgcaatgaatgtggggaggccttcagccgccgcagcagcctgacccagcacgagaggacccacactggagagaagccctatgagtgcatcgactgtgggaaggccttcagccagagcagcagcctcatccagcacgagaggacccacactggagagaagccctatgagtgcaatgaatgtggccgggccttcaggaagaagaccaacctgcatgaccaccagaggatccacactggagagaagccctacagctgcaaggaatgtgggaagaacttcagccgcagcagcgccctgaccaagcaccagaggatccacaccaggaacaagctgtag

SEQ ID NO: 177039 - DNA, 3576 bp, synthetic construct
  misc_feature 1..3576: note = Description of Artificial Sequence: Synthetic coding sequence
  source 1..3576: mol_type = other DNA
atgcctggcaccccaggcagcctggagatgggcctgctgaccttcagagatgtggccatcgagttcagccctgaggagtggcagtgcctggacacagcccagcagaacctgtacagaaatgtgatgctggagaactacagaaacctggccttcctgggcatcgccctgagcaagccagacctgatcacctacctggagcagggcaaggagccctggaacatgaagcagcacgagatggtggatgagcccaccggcatctgcccccacttcccccaggacttctggccagagcagagcatggaggacagcttccagaaggtgctgctgaggaaatatgagaagtgtggccacgagaacctgcagctgaggaagggctgcaagtctgtggatgagtgcaaggtgcacaaggagggctacaacaagctgaaccagtgcctgaccacagcccagagcaaggtgttccagtgtgggaagtacctgaaggtgttctacaagttcctgaacagcaacagacacaccatccgccacacaggcaagaagtgcttcaagtgcaagaagtgtgtgaagagcttctgcatccggctgcacaagacccagcacaagtgtgtgtacatcacagagaagagctgcaagtgcaaggaatgtgagaagaccttccactggagcagcaccctgaccaaccacaaggagatccacacagaggacaagccctacaagtgtgaggagtgtgggaaggccttcaagcagctgagcaccctgaccacccacaagatcatctgtgccaaggagaagatctacaagtgtgaggagtgtgggaaggccttcctgtggagcagcaccctgaccaggcacaagaggatccacactggagagaagccctacaagtgtgaggagtgtgggaaggccttcagccacagcagcaccctggccaagcacaagaggatccacactggagagaagccctacaagtgtgaggagtgtgggaaggccttcagccgcagcagcaccctggccaagcacaagaggatccacactggagagaagccctacaagtgcaaggaatgtgggaaggccttcagcaacagcagcaccctggccaaccacaagatcacccacacagaggagaagccctacaagtgcaaggaatgtgacaaggccttcaagaggctgagcaccctgaccaagcacaagatcatccatgctggggagaagctgtacaagtgtgaggagtgtgggaaggccttcaacagaagcagcaacctgaccatccacaagttcatccacactggagagaagccctacaagtgtgaggagtgtgggaaggccttcaactggagcagcagcctgaccaagcacaagcgcttccacacccgggagaagcccttcaagtgcaaggaatgtgggaaggccttcatctggagcagcaccctgaccaggcacaagaggatccacactggagagaagccctacaagtgtgaggagtgtgggaaggccttccggcagagcagcaccctgaccaagcacaagatcatccacactggagagaagccctacaagtttgaggagtgtgggaaggccttccggcagagcctgaccctgaacaagcacaagatcatccacagccgggagaagccctacaagtgcaaggaatgtgggaaggccttcaagcagttcagcaccctgaccacccacaagatcatccatgctgggaagaagctgtacaagtgtgaggagtgtgggaaggccttcaaccacagcagcagcctgagcacccacaagatcatccacactggagagaagagctacaagtgtgaggagtgtgggaaggccttcctgtggagcagcaccctgcggcggcacaagaggatccacactggagagaagccctacaagtgtgaggagtgtgggaaggccttcagccacagcagcgccctggccaagcacaagaggatccacactggagagaagccctacaagtgcaaggaatgtgggaaggccttcagcaacagcagcaccctggccaaccacaagatcacccacacagaggagaagccctacaagtgcaaggaatgtgacaagaccttcaagaggctgagcaccctgaccaagcacaagatcatccatgctggggagaagctgtacaagtgtgaggagtgtgggaaggccttcaacagaagcagcaacctgaccatccacaagttcatccacactggagagaagccctacaagtgtgaggagtgtgggaaggccttcaactggagcagcagcctgaccaagcacaagaggatccacacccgggagaagcccttcaagtgcaaggaatgtgggaaggccttcatctggagcagcaccctgaccaggcacaagaggatccacactggagagaagccctacaagtgtgaggagtgtgggaaggccttcagccgcagcagcaccctgaccaagcacaagaccatccacactggagagaagccctacaagtgcaaggaatgtgggaaggccttcaagcacagcagcgccctggccaagcacaagatcatccatgctggggagaagctgtacaagtgtgaggagtgtgggaaggccttcaaccagagcagcaacctgaccacccacaagatcatccacaccaaggagaagcccagcaagtctgaggagtgtgacaaggccttcatctggagcagcaccctgacagagcacaagaggatccacacccgggagaagacctacaagtgtgaggagtgtgggaaggccttcagccagcccagccacctgaccacccacaagaggatgcacactggagagaagccctacaagtgtgaggagtgtgggaaggccttcagccagagcagcaccctgaccacccacaagatcatccacactggagagaagccctacaagtgtgaggagtgtgggaaggccttcaggaagagcagcaccctgacagagcacaagatcatccacactggagagaagccctacaagtgtgaggagtgtgggaaggccttcagccagagcagcaccctgaccaggcacaccaggatgcacactggagagaagccctacaagtgtgaggagtgtgggaaggccttcaacagaagcagcaagctgaccacccacaagatcatccacactggagagaagccctacaagtgtgaggagtgtgggaaggccttcatcagcagcagcaccctgaatggccacaagaggatccacacccgggagaagccctacaagtgtgaggagtgtgggaaggccttcagccagagcagcaccctgaccaggcacaagaggctgcacactggagagaagccctacaagtgtggggagtgtgggaaggccttcaaggagagcagcgccctgaccaagcacaagatcatccacactggagagaagccctacaagtgtgagaagtgtgggaaggccttcaaccagagcagcatcctgaccaaccacaagaagatccacaccatcacccctgtgatccccctgctgtgggaggccgaggccggcggcagccggggccaggagatggagaccatcctggccaacacagtgaagcccctgctgtactag

SEQ ID NO: 177040 - DNA, 3480 bp, synthetic construct
  misc_feature 1..3480: note = Description of Artificial Sequence: Synthetic coding sequence
  source 1..3480: mol_type = other DNA
atgcctggcaccccaggcagcctggagatgggcctgctgaccttcagagatgtggccatcgagttcagccctgaggagtggcagtgcctggacacagcccagcagaacctgtacagaaatgtgatgctggagaactacagaaacctggccttcctgggcatctgcccccacttcccccaggacttctggccagagcagagcatggaggacagcttccagaaggtgctgctgaggaaatatgagaagtgtggccacgagaacctgcagctgaggaagggctgcaagtctgtggatgagtgcaaggtgcacaaggagggctacaacaagctgaaccagtgcctgaccacagcccagagcaaggtgttccagtgtgggaagtacctgaaggtgttctacaagttcctgaacagcaacagacacaccatccgccacacaggcaagaagtgcttcaagtgcaagaagtgtgtgaagagcttctgcatccggctgcacaagacccagcacaagtgtgtgtacatcacagagaagagctgcaagtgcaaggaatgtgagaagaccttccactggagcagcaccctgaccaaccacaaggagatccacacagaggacaagccctacaagtgtgaggagtgtgggaaggccttcaagcagctgagcaccctgaccacccacaagatcatctgtgccaaggagaagatctacaagtgtgaggagtgtgggaaggccttcctgtggagcagcaccctgaccaggcacaagaggatccacactggagagaagccctacaagtgtgaggagtgtgggaaggccttcagccacagcagcaccctggccaagcacaagaggatccacactggagagaagccctacaagtgtgaggagtgtgggaaggccttcagccgcagcagcaccctggccaagcacaagaggatccacactggagagaagccctacaagtgcaaggaatgtgggaaggccttcagcaacagcagcaccctggccaaccacaagatcacccacacagaggagaagccctacaagtgcaaggaatgtgacaaggccttcaagaggctgagcaccctgaccaagcacaagatcatccatgctggggagaagctgtacaagtgtgaggagtgtgggaaggccttcaacagaagcagcaacctgaccatccacaagttcatccacactggagagaagccctacaagtgtgaggagtgtgggaaggccttcaactggagcagcagcctgaccaagcacaagcgcttccacacccgggagaagcccttcaagtgcaaggaatgtgggaaggccttcatctggagcagcaccctgaccaggcacaagaggatccacactggagagaagccctacaagtgtgaggagtgtgggaaggccttccggcagagcagcaccctgaccaagcacaagatcatccacactggagagaagccctacaagtttgaggagtgtgggaaggccttccggcagagcctgaccctgaacaagcacaagatcatccacagccgggagaagccctacaagtgcaaggaatgtgggaaggccttcaagcagttcagcaccctgaccacccacaagatcatccatgctgggaagaagctgtacaagtgtgaggagtgtgggaaggccttcaaccacagcagcagcctgagcacccacaagatcatccacactggagagaagagctacaagtgtgaggagtgtgggaaggccttcctgtggagcagcaccctgcggcggcacaagaggatccacactggagagaagccctacaagtgtgaggagtgtgggaaggccttcagccacagcagcgccctggccaagcacaagaggatccacactggagagaagccctacaagtgcaaggaatgtgggaaggccttcagcaacagcagcaccctggccaaccacaagatcacccacacagaggagaagccctacaagtgcaaggaatgtgacaagaccttcaagaggctgagcaccctgaccaagcacaagatcatccatgctggggagaagctgtacaagtgtgaggagtgtgggaaggccttcaacagaagcagcaacctgaccatccacaagttcatccacactggagagaagccctacaagtgtgaggagtgtgggaaggccttcaactggagcagcagcctgaccaagcacaagaggatccacacccgggagaagcccttcaagtgcaaggaatgtgggaaggccttcatctggagcagcaccctgaccaggcacaagaggatccacactggagagaagccctacaagtgtgaggagtgtgggaaggccttcagccgcagcagcaccctgaccaagcacaagaccatccacactggagagaagccctacaagtgcaaggaatgtgggaaggccttcaagcacagcagcgccctggccaagcacaagatcatccatgctggggagaagctgtacaagtgtgaggagtgtgggaaggccttcaaccagagcagcaacctgaccacccacaagatcatccacaccaaggagaagcccagcaagtctgaggagtgtgacaaggccttcatctggagcagcaccctgacagagcacaagaggatccacacccgggagaagacctacaagtgtgaggagtgtgggaaggccttcagccagcccagccacctgaccacccacaagaggatgcacactggagagaagccctacaagtgtgaggagtgtgggaaggccttcagccagagcagcaccctgaccacccacaagatcatccacactggagagaagccctacaagtgtgaggagtgtgggaaggccttcaggaagagcagcaccctgacagagcacaagatcatccacactggagagaagccctacaagtgtgaggagtgtgggaaggccttcagccagagcagcaccctgaccaggcacaccaggatgcacactggagagaagccctacaagtgtgaggagtgtgggaaggccttcaacagaagcagcaagctgaccacccacaagatcatccacactggagagaagccctacaagtgtgaggagtgtgggaaggccttcatcagcagcagcaccctgaatggccacaagaggatccacacccgggagaagccctacaagtgtgaggagtgtgggaaggccttcagccagagcagcaccctgaccaggcacaagaggctgcacactggagagaagccctacaagtgtggggagtgtgggaaggccttcaaggagagcagcgccctgaccaagcacaagatcatccacactggagagaagccctacaagtgtgagaagtgtgggaaggccttcaaccagagcagcatcctgaccaaccacaagaagatccacaccatcacccctgtgatccccctgctgtgggaggccgaggccggcggcagccggggccaggagatggagaccatcctggccaacacagtgaagcccctgctgtactag

SEQ ID NO: 177041 - DNA, 1761 bp, synthetic construct
  misc_feature 1..1761: note = Description of Artificial Sequence: Synthetic coding sequence
  source 1..1761: mol_type = other DNA
atgggccccctgaccttcagagatgtgaagattgagttcagcctggaggagtggcagtgcctggacacagcccagaggaacctgtacagagatgtgatgctggagaactacagaaacctggtgttcctgggcattgctgtgtccaagccagacctgatcacctggctggagcagggcaaggagccctggaacctgaagagacatgagatggtggacaagacccctgtgatgtgcagccactttgcccaggatgtgtggccagagcacagcatcaaggacagcttccagaaggtgatcctgcggacctacggcaagtatggccacgagaacctgcagctgaggaaggaccacaagtctgtggatgcctgcaaggtgtacaagggcggctacaacggcctgaaccagtgcctgaccaccacagacagcaagatcttccagtgtgacaagtatgtgaaggtgttccacaagttccccaacgtgaacagaaacaagatccgccacacaggcaagaagcccttcaagtgcaagaacagaggcaagagcttctgcatgctgagccagctgacccagcacaagaagatccacacccgggagtacagctacaagtgtgaagaatgtgggaaggccttcaactggagcagcaccctgaccaagcacaagatcatccacactggagagaagccctacaagtgtgaagaatgtgggaaggccttcaacagaagcagcaacctgaccaagcacaagatcatccacactggagagaagccctacaagtgtgaagaatgtgggaaggccttcaacagaagcagcaccctgaccaagcacaagaggatccacacagaggagaagccctacaagtgtgaagaatgtgggaaggccttcaaccagttcagcatcctgaacaagcacaagaggatccacatggaggacaagccctacaagtgtgaagaatgtgggaaggccttccgggtcttcagcatcctgaagaagcacaagatcatccacactggagagaagccctacaagtgtgaagaatgtgggaaggccttcaaccagttcagcaacctgaccaagcacaagatcatccacactggagagaagccctacaagtgtgatgaatgtgggaaggccttcaaccagagcagcaccctgaccaagcacaagaggatccacactggagagaagccctacaagtgtgaagaatgtgggaaggccttcaagcagagcagcaccctgacagagcacaagatcatccacactggagagaagccctacaagtgtgagaagtgtgggaaggccttctcctggagcagcgccttcaccaagcacaagaggaaccacatggaggacaagccctacaagtgtgaagaatgtgggaaggccttctctgtgttcagcaccctgaccaagcacaagatcatccacacccgggagaagccctacaagtgtgaagaatgtgggaaggccttcaaccagagcagcatcttcaccaagcacaagatcatccacacagagggcaagagctacaagtgtgagaagtgtggaaatgccttcaaccagagcagcaacctgacagccaggaagatcatctacaccggggagaagccctacaagtatgaagaatgtgacaaggccttcaacaagttcagcaccctcatcacccaccagatcatctacaccggggagaagccctgcaagcatgaatgtggccgggccttcaacaagagcagcaactacaccaaggagaagctgcagacctag

SEQ ID NO: 177042 - DNA, 1665 bp, synthetic construct
  misc_feature 1..1665: note = Description of Artificial Sequence: Synthetic coding sequence
  source 1..1665: mol_type = other DNA
atgggccccctgaccttcagagatgtgaagattgagttcagcctggaggagtggcagtgcctggacacagcccagaggaacctgtacagagatgtgatgctggagaactacagaaacctggtgttcctggtgatgtgcagccactttgcccaggatgtgtggccagagcacagcatcaaggacagcttccagaaggtgatcctgcggacctacggcaagtatggccacgagaacctgcagctgaggaaggaccacaagtctgtggatgcctgcaaggtgtacaagggcggctacaacggcctgaaccagtgcctgaccaccacagacagcaagatcttccagtgtgacaagtatgtgaaggtgttccacaagttccccaacgtgaacagaaacaagatccgccacacaggcaagaagcccttcaagtgcaagaacagaggcaagagcttctgcatgctgagccagctgacccagcacaagaagatccacacccgggagtacagctacaagtgtgaagaatgtgggaaggccttcaactggagcagcaccctgaccaagcacaagatcatccacactggagagaagccctacaagtgtgaagaatgtgggaaggccttcaacagaagcagcaacctgaccaagcacaagatcatccacactggagagaagccctacaagtgtgaagaatgtgggaaggccttcaacagaagcagcaccctgaccaagcacaagaggatccacacagaggagaagccctacaagtgtgaagaatgtgggaaggccttcaaccagttcagcatcctgaacaagcacaagaggatccacatggaggacaagccctacaagtgtgaagaatgtgggaaggccttccgggtcttcagcatcctgaagaagcacaagatcatccacactggagagaagccctacaagtgtgaagaatgtgggaaggccttcaaccagttcagcaacctgaccaagcacaagatcatccacactggagagaagccctacaagtgtgatgaatgtgggaaggccttcaaccagagcagcaccctgaccaagcacaagaggatccacactggagagaagccctacaagtgtgaagaatgtgggaaggccttcaagcagagcagcaccctgacagagcacaagatcatccacactggagagaagccctacaagtgtgagaagtgtgggaaggccttctcctggagcagcgccttcaccaagcacaagaggaaccacatggaggacaagccctacaagtgtgaagaatgtgggaaggccttctctgtgttcagcaccctgaccaagcacaagatcatccacacccgggagaagccctacaagtgtgaagaatgtgggaaggccttcaaccagagcagcatcttcaccaagcacaagatcatccacacagagggcaagagctacaagtgtgagaagtgtggaaatgccttcaaccagagcagcaacctgacagccaggaagatcatctacaccggggagaagccctacaagtatgaagaatgtgacaaggccttcaacaagttcagcaccctcatcacccaccagatcatctacaccggggagaagccctgcaagcatgaatgtggccgggccttcaacaagagcagcaactacaccaaggagaagctgcagacctag

SEQ ID NO: 177043 - DNA, 1554 bp, synthetic construct
  misc_feature 1..1554: note = Description of Artificial Sequence: Synthetic coding sequence
  source 1..1554: mol_type = other DNA
atggtggacaagacccctgtgatgtgcagccactttgcccaggatgtgtggccagagcacagcatcaaggacagcttccagaaggtgatcctgcggacctacggcaagtatggccacgagaacctgcagctgaggaaggaccacaagtctgtggatgcctgcaaggtgtacaagggcggctacaacggcctgaaccagtgcctgaccaccacagacagcaagatcttccagtgtgacaagtatgtgaaggtgttccacaagttccccaacgtgaacagaaacaagatccgccacacaggcaagaagcccttcaagtgcaagaacagaggcaagagcttctgcatgctgagccagctgacccagcacaagaagatccacacccgggagtacagctacaagtgtgaggagtgtgggaaggccttcaactggagcagcaccctgaccaagcacaagatcatccacactggagagaagccctacaagtgtgaggagtgtgggaaggccttcaacagaagcagcaacctgaccaagcacaagatcatccacactggagagaagccctacaagtgtgaggagtgtgggaaggccttcaacagaagcagcaccctgaccaagcacaagaggatccacacagaggagaagccctacaagtgtgaggagtgtgggaaggccttcaaccagttcagcatcctgaacaagcacaagaggatccacatggaggacaagccctacaagtgtgaggagtgtgggaaggccttccgggtcttcagcatcctgaagaagcacaagatcatccacactggagagaagccctacaagtgtgaggagtgtgggaaggccttcaaccagttcagcaacctgaccaagcacaagatcatccacactggagagaagccctacaagtgtgatgaatgtgggaaggccttcaaccagagcagcaccctgaccaagcacaagaggatccacactggagagaagccctacaagtgtgaggagtgtgggaaggccttcaagcagagcagcaccctgacagagcacaagatcatccacactggagagaagccctacaagtgtgagaagtgtgggaaggccttctcctggagcagcgccttcaccaagcacaagaggaaccacatggaggacaagccctacaagtgtgaggagtgtgggaaggccttcagcgtcttcagcaccctgaccaagcacaagatcatccacacccgggagaagccctacaagtgtgaggagtgtgggaaggccttcaaccagagcagcatcttcaccaagcacaagatcatccacacagagggcaagagctacaagtgtgagaagtgtggaaatgccttcaaccagagcagcaacctgacagccaggaagatcatctacacaggagagaagccctacaagtatgaggagtgtgacaaggccttcaacaagttcagcaccctcatcacccaccagatcatctacacaggagagaagccctgcaagcatgaatgtggccgggccttcaacaagagcagcaactacaccaaggagaagctgcagacctag

SEQ ID NO: 177044 - DNA, 1863 bp, synthetic construct
  misc_feature 1..1863: note = Description of Artificial Sequence: Synthetic coding sequence
  source 1..1863: mol_type = other DNA
atgggccccctgcagttcagagatgtggccatcgagttcagcctggaggagtggcactgcctggacacagcccagaggaacctgtacagaaatgtgatgctggagaactacagcaacctggtgttcctgggcatcgtggtgtccaagccagacctgattgcccacctggagcagggcaagaagcccctgaccatgaagagacatgagatggtggccaaccccagcgtcatctgcagccactttgcccaggacctgtggccagagcagaacatcaaggacagcttccagaaggtgatcctgcggcgctatgagaagaggggccacggcaacctgcagctgatcaagagatgtgagagcgtggatgagtgcaaggtgcacactggaggctacaacggcctgaaccagtgcagcaccaccacccagagcaaggtgttccagtgtgacaagtatggcaaggtgttccacaagttcagcaacagcaacagacacaacatccgccacacagagaagaagcccttcaagtgcattgaatgtgggaaggccttcaaccagttcagcaccctcatcacccacaagaagatccacactggagagaagccctacatctgtgaagaatgtgggaaggccttcaagtacagcagcgccctgaacacccacaagaggatccacactggagagaagccctacaagtgtgacaagtgtgacaaggccttcatcgccagcagcaccctgagcaagcatgagatcatccacacaggcaagaagccctacaagtgtgaagaatgtgggaaggccttcaaccagagcagcaccctgaccaagcacaagaagatccacactggagagaagccctacaagtgtgaagaatgtgggaaggccttcaaccagagcagcaccctgaccaagcacaagaagatccacactggagagaagccctacgtgtgtgaagaatgtgggaaggccttcaagtacagccgcatcctgaccacccacaagaggatccacactggagagaagccctacaagtgcaacaagtgtgggaaggccttcatcgccagcagcaccctgagcagacatgagttcatccacatgggcaagaagcactacaagtgtgaagaatgtgggaaggccttcatctggagctctgtgctgaccaggcacaagagggtgcacactggagagaagccctacaagtgtgaagaatgtgggaaggccttcaagtacagcagcaccctgagcagccacaagaggagccacactggagagaagccctacaagtgtgaagaatgtgggaaggcctttgtggccagcagcaccctgagcaagcatgagatcatccacacaggcaagaagccctacaagtgtgaagaatgtgggaaggccttcaaccagagcagcagcctgaccaagcacaagaagatccacactggagagaagccctacaagtgtgaagaatgtgggaaggccttcaaccagagcagcagcctgaccaagcacaagaagatccacactggagagaagccctacaagtgtgaagaatgtgggaaggccttcaaccagagcagcaccctcatcaagcacaagaagatccacacccgggagaagccctacaagtgtgaagaatgtgggaaggccttccacctgagcacccacctgaccacccacaagatcctgcacactggagagaagccctaccgctgcagagaatgtgggaaggccttcaaccacagcgccaccctgagcagccacaagaagatccacagcggggagaagccctatgaatgtgacaagtgtgggaaggccttcatcagccccagcagcctgagcagacatgagatcatccacactggagagaagccctag

SEQ ID NO: 177045 - DNA, 1779 bp, synthetic construct
  misc_feature 1..1779: note = Description of Artificial Sequence: Synthetic coding sequence
  source 1..1779: mol_type = other DNA
atgggccccctgcagttcagagatgtggccatcgagttcagcctggaggagtggcactgcctggacacagcccagaggaacctgtacagaaatgtgatgctggagaactacagcaacctggtgttcctgggcatcgtggtgtccaagccagacctgattgcccacctggagcagggcaagaagcccctgaccatgaagagacatgagatggtggccaaccccagcgtcatctgcagccactttgcccaggacctgtggccagagcagaacatcaaggacagcttccagaaggtgatcctgcggcgctatgagaagaggggccacggcaacctgcagctgatcaagagatgtgagagcgtggatgagtgcaaggtgcacactggaggctacaacggcctgaaccagtgcagcaccaccacccagagcaaggtgttccagtgtgacaagtatggcaaggtgttccacaagttcagcaacagcaacagacacaacatccgccacacagagaagaagcccttcaagtgcattgaatgtgggaaggccttcaaccagttcagcaccctcatcacccacaagaagatccacactggagagaagccctacatctgtgaagaatgtgggaaggccttcaagtacagcagcgccctgaacacccacaagaggatccacactggagagaagccctacaagtgtgacaagtgtgacaaggccttcatcgccagcagcaccctgagcaagcatgagatcatccacacaggcaagaagccctacaagtgtgaagaatgtgggaaggccttcaaccagagcagcaccctgaccaagcacaagaagatccacactggagagaagccctacaagtgtgaagaatgtgggaaggccttcaaccagagcagcaccctgaccaagcacaagaagatccacactggagagaagccctacgtgtgtgaagaatgtgggaaggccttcaagtacagccgcatcctgaccacccacaagaggatccacactggagagaagccctacaagtgcaacaagtgtgggaaggccttcatcgccagcagcaccctgagcagacatgagttcatccacatgggcaagaagcactacaagtgtgaagaatgtgggaaggccttcatctggagctctgtgctgaccaggcacaagagggtgcacactggagagaagccctacaagtgtgaagaatgtgggaaggcctttgtggccagcagcaccctgagcaagcatgagatcatccacacaggcaagaagccctacaagtgtgaagaatgtgggaaggccttcaaccagagcagcagcctgaccaagcacaagaagatccacactggagagaagccctacaagtgtgaagaatgtgggaaggccttcaaccagagcagcagcctgaccaagcacaagaagatccacactggagagaagccctacaagtgtgaagaatgtgggaaggccttcaaccagagcagcaccctcatcaagcacaagaagatccacacccgggagaagccctacaagtgtgaagaatgtgggaaggccttccacctgagcacccacctgaccacccacaagatcctgcacactggagagaagccctaccgctgcagagaatgtgggaaggccttcaaccacagcgccaccctgagcagccacaagaagatccacagcggggagaagccctatgaatgtgacaagtgtgggaaggccttcatcagccccagcagcctgagcagacatgagatcatccacactggagagaagccctag

SEQ ID NO: 177046 - DNA, 183 bp, synthetic construct
  misc_feature 1..183: note = Description of Artificial Sequence: Synthetic coding sequence
  source 1..183: mol_type = other DNA
atggtggccaaccccagcgtcatctgcagccactttgcccaggacctgtggccagagcagaacatcaaggacagcttccagaaggtgatcctgcggcgctatgagaagaggggccacggcaacctgcagctgatcaagagatgtgagagcaccccatctgagaaggagaagaagaagaagtag

SEQ ID NO: 177047 - DNA, 1719 bp, synthetic construct
  misc_feature 1..1719: note = Description of Artificial Sequence: Synthetic coding sequence
  source 1..1719: mol_type = other DNA
atgcctggccccctgggcagcctggagatgggcgtgctgaccttcagagatgtggccctggagttcagcctggaggagtggcagtgcctggacacagcccagcagaacctgtacagaaatgtgatgctggagaactacagaaacctggtgtttgtgggcattgctgccagcaagccagacctgatcacctgcctggagcagggcaaggagccctggaatgtgaagagacatgagatggtgacagagccccctgtggtgtacagctactttgcccaggacctgtggcccaagcagggcaagaagaactacttccagaaggtgatcctgcggacctacaagaagtgtggccgggagaacctgcagctgaggaagtactgcaagtccatggatgagtgcaaggtgcacaaggagtgctacaacggcctgaaccagtgcctgaccaccacccagaacaagatcttccagtatgacaagtatgtgaaggtgttccacaagttcagcaacagcaacagacacaagattggccacacaggcaagaagagcttcaagtgcaaggaatgtgagaagagcttctgcatgctgagccacctggcccagcacaagaggatccacagcggggagaagccctacaagtgcaaggaatgtgggaaggcctacaatgaggccagcaacctgagcacccacaagaggatccacacaggcaagaagccctacaagtgtgaggagtgtgggaaggccttcaaccggctgagccacctgaccacccacaagatcatccacacaggcaagaagccctacaagtgtgaggagtgtgggaaggccttcaaccagagcgccaacctgaccacccacaagaggatccacactggagagaagccctacaagtgtgaggagtgtggccgggccttcagccagagcagcaccctgacagcccacaagatcatccatgctggggagaagccctacaagtgtgaggagtgtgggaaggccttcagccagagcagcaccctgaccacccacaagatcatccacactggagagaagttctacaagtgtgaggagtgtgggaaggccttcagccggctgagccacctgaccacccacaagaggatccacagcggggagaagccctacaagtgtgaggagtgtgggaaggccttcaagcagagcagcaccctgaccacccacaagagaattcatgctggggagaagttctacaagtgtgaggtgtgcagcaaggccttcagccgcttcagccacctgaccacccacaagaggatccacactggagagaagccctacaagtgtgaggagtgtgggaaggccttcaacctgagcagccagctgaccacccacaagatcatccacactggagagaagccctacaagtgtgaggagtgtgggaaggccttcaaccagagcagcaccctgagcaagcacaaggtgatccacactggagagaagccctacaagtgtgaggagtgtgggaaggccttcaaccagagcagccacctgaccacccacaagatgatccacactggagagaagccctacaagtgtgaggagtgtgggaaggccttcaacaacagcagcatcctgaacagacacaagatgatccacactggagagaagctgtacaagccagagagctgcaacaatgcctgtgacaacatcgccaagatcagcaagtacaagaggaactgtgccggggagaagtag

SEQ ID NO: 177048 - DNA, 3114 bp, synthetic construct
  misc_feature 1..3114: note = Description of Artificial Sequence: Synthetic coding sequence
  source 1..3114: mol_type = other DNA
atgtccttctggagcgagaagtgcaccaggctcatcctgtatgacctgaagatcgccctgaagaatggcagcctgaccttctgggatgtgaccatcgagtttgccctggaggagtggcagtgcctggacatggcccagcagaacctgtacagaaatgtgatgctggagaactacagaaacctggtgttcctgggcattgctgtgtccaagctggacctgatcacctgcctgaagcagggcaaggagccctggaacatgaagagacatgagatggtgaccaagccccctgtgatcagcagccacttcacccaggacttctggccagaccagagcatcaaggacagcttccaggagatcatcctgcggacctacgcccgctgtggccacaagaacctgcggctgaggaaggactgtgagagcgtgaatgaaggcaagatgcatgaggaggcctacaacaagctgaaccagtgctggaccaccacccagggcaagatcttccagtgcaacaagtatgtgaaggtgttccacaagtacagcaacagcaaccgctacaagatcatccacacaggcaagaagccctacaagtgtgaggagtgtgggaaggccttcaagcagagcagccacctgaccaggcacaaggccatccacactggagagaagccctacaagtgtgaggagtgtgggaaggccttcaaccacttcagcgccctgaggaagcaccagatcatccacacaggcaagaagccctacaagtgtgaggagtgtgggaaggccttcagccagagcagcaccctgaggaagcatgagatcatccacacagaggagaagccctacaagtatgaggagtgtgggaaggccttcagcaacctgagcgccctgaggaagcatgagatcatccacacaggccagaagccctacaagtgtgaggagtgtgggaaggccttcaagtggagcagcaagctgactgtgcacaaggtgatccacacagctgagaagccctgcaagtgtgaggagtgtgggaaggccttcaagcgcttcagcgccctgaggaagcacaagatcatccacacaggcaagcagccctacaagtgtgaggagtgcagcaaggccttcagcaacttcagcgccctgaggaagcatgagatcatccacactggagagaagccctacaagtgtgaggagtgtgggaaggccttcaagtggagcagcaagctgactgtgcacaaggtgatccacatggaggagaagccctgcaagtgtgaggagtgtgggaaggccttcaagcacttcagcgccctgaggaagcacaagatcatccacacaggcaagaagccctacaagtgtgaggagtgtgggaaggccttcaacaacagcagcaccctgatgaagcacaagatcatccacacaggcaagaagccctacaagtgtgaggagtgtgggaaggccttcaagcagagcagccacctgaccaggcacaaggccatccacactggagagaagccctacaagtgtgaggagtgtgggaaggccttcaaccacttcagcgccctgaggaagcaccagatcatccacacaggcaagaagccctacaagtgtgaggagtgtgggaaggccttcagccagagcagcaccctgaggaagcatgagatcatccacactggagagaagccctacaagtgtgaggagtgtgggaaggccttcaagtggagcagccacctgaccaggcacaaggtgatccacacagaggagaagccctacaagtgtgaggagtgtgggaaggccttcaaccacttcagcgccctgaggaagcacaagatcatccacacaggcaagaagccctacaagtgtgaggagtgtgggaaggccttcagccagagcagcaccctgaggaagcatgagatcatccacactggagagaagccctacaagtgtgaggagtgtgggaaggccttcaagtggagcagcaagctgactgtgcacaaggtgatccacacagctgagaagccctgcaagtgtgaggagtgtgggaaggccttcaagcacttcagcgccctgaggaagcacaagatcatccacacaggcaagaagccctacaagtgtgaggagtgtgggaaggccttcaacaacagcagcaccctgaggaagcatgagatcatccacactggagagaagagctacaagtgtgaggagtgtgccctgaggaagcatgagatcatccacacaggcaagaagccctacaagtgtgaggagtgtgggaaggccttcaacaacagcagcaccctgaggaagcacaagatcatctacacaggcaagaagccctacaagtgtgaggagtgtgggaaggccttcaagcagagcagccacctgaccaggcacaaggctgtgcacactggagagaagccctacaagtgtggggagtgtgggaaggccttcaacaacagcagcaccctgaagaagcacaagctgatccacacccgggagaagagctacaagtgtgaggagtgtgggaaggccttcagcaacttcagcgccctgaggaagcacaagatcatccacactggagagaagccctacaagtgtgaggagtgtgaatgtgggaaggccttcaacaacagcagcaccctgatgaagcacaagatcatccacactggagagaagccctacaagtgtgaggagtgtgggaagggcttcaacaacttcagcaccctgatgaagcacaagatcatccacactggagagaagccctacaagtgtgaggagtgtgggaaggccttcaagcagagcagccacctgaccaagcacaagagcatccacactggagagaagccctacaagtgtgaggagcggggcaaggccttcagccacttcagccggctgaccaagcaccgcatcatccacacaggcaagaagccctacaagtgtgaggagtgtggggagaagccctacaagtgtgaggagtgtgggaaggccttcaaccagagcagccacctgacccagcacaagaccatccacactggaggcaagacctacaagtgtgaggagtgtgggaaggccttcaaccacctgagcgccctgaccaagcacaagatcatccacactggagagaagccctag

SEQ ID NO: 177049 - DNA, 3021 bp, synthetic construct
  misc_feature 1..3021: note = Description of Artificial Sequence: Synthetic coding sequence
  source 1..3021: mol_type = other DNA
atgagcaggaggaagcagagcaacccccggcagatcaagaggagcctgggggacatggaggcccgggaggaggtgcagctggtgggcgccagccacatggagcagaaggccacagcccctgaggcccccagccccccatctgcagatgtgaacagccccccacccctgcccccacccaccagccctgggggccccaaggagctggagggccaggagcctgagccccggcccacagaggaggagcccggcagcccctggagcggcccagatgagctggagcctgtggtgcaggacggccagaggcgcatccgggcccggctgagcctggccaccggcctgtcctggggccccttccacggctctgtgcagacccgggccagcagcccccggcaggccgagcccagccctgccctgaccctgctgctggtggatgaggcctgctggctgcggaccctgccccaggccctgacagaagctgaggccaacacagagatccacaggaaggatgatgccctgtggtgccgggtgaccaagcctgtgcctgctgggggcctgctgtctgtgctgctgacagctgagccccacagcaccccaggccaccctgtgaagaaggagcctgctgagcccacctgcccagccccagcccatgacctgcagctgctgccccagcaggccggcatggccagcatcctggccacagctgtgatcaacaaggatgtgttcccctgcaaggactgtggcatctggtacagaagtgagaggaacctgcaggcccacctgctgtactactgtgccagccggcagggcaccggcagccctgctgctgctgccacagatgagaagcccaaggagacctacccaaatgaaagagtgtgccccttcccccagtgcaggaagagctgccccagcgccagcagcctggagatccacatgaggagccacagcggggagcggccctttgtgtgcctgatctgcctgagcgccttcaccaccaaggccaactgtgagcggcacctgaaggtgcacacagacaccctgtctggagtgtgccacagctgtggcttcatcagcaccacccgggacatcctgtacagccacctggtgaccaaccacatggtgtgccagcccggcagcaaaggagagatctacagccctggagctggccacccagccaccaagctgcccccagacagcctgggcagcttccagcagcagcacacagccctgcagggccccctggccagcgctgacctgggcctggcccccacccccagccctggcctggacaggaaggccctggccgaggccaccaacggggaggcccgggcagagcccctggcccagaatggaggcagcagcgagcccccagctgcccccaggagcatcaaggtggaggccgtggaggagcctgaggccgcccccatcctgggccctggagagcccggcccccaggcccccagcaggacccccagccccaggagccctgccccagcccgggtgaaggccgagctgagcagccccaccccaggcagcagccctgtgcctggagagctgggcctggccggggccctcttcctgccccagtatgtgtttggaccagatgctgcccccccagccagcgagatcctggccaagatgtctgagctggtgcacagccggctgcagcagggcgctggggccggggccggcggggcccagacaggcctcttccctggggcccccaagggggccacctgctttgaatgtgagatcaccttcagcaatgtgaacaactactacgtgcacaagaggctgtactgcagcggcagaagagccccagaagatgccccagctgcccggcggcccaaggcccctcctggccctgcccgggcccctcctggccagcctgctgagccagatgcccccaggagcagccctggccctggggcccgggaggagggcgctgggggcgccgccaccccagaagatggagctgggggccggggcagcgagggcagccagagccctggcagctctgtggatgatgctgaagatgaccccagcaggaccctgtgtgaggcctgcaacatccgcttcagcagacatgagacctacacagtgcacaagcgctactactgtgccagcagacatgaccccccaccaagaagacctgctgcccctcctggccccccaggccctgctgcccccccagcccccagccctgctgcccctgtgaggaccaggagaagaaggaagctgtatgagctgcatgctgctggggcccctcctcctcctcctcctggccacgccccagcccctgagagccccaggcctggcagcggcagcggcagcggccctggcctggccccagcccggagccctggccctgctgctgatggccccatcgacctgagcaagaagccccggcggcccctgcccggggccccagccccagccctggccgactaccacgagtgcacagcctgccgggtgtccttccacagcctggaggcctacctggcccacaagaagtacagctgcccagctgcccctcctcctggggccctgggcctgcctgctgctgcctgcccctactgcccccccaacggccctgtgcggggggacctgctggagcacttccggctggcccacggcctgctgctgggcgcccccctggccggccctggggtggaggcccggaccccagctgaccggggccccagccctgccccagccccagctgccagcccccagcccggcagccggggccccagagatggcctgggccctgagccccaggagcccccacctggccccccacccagccctgctgctgcccctgaggccgtgcccccacctccagcccctccttcctacagcgacaagggcgtgcagacccccagcaagggcaccccagcccccctgcccaacggcaaccaccgctactgccgcctgtgcaacatcaagttcagcagcctgagcaccttcatcgcccacaagaagtactactgcagcagccatgctgctgagcacgtgaagtag

SEQ ID NO: 177050 - DNA, 2649 bp, synthetic construct
  misc_feature 1..2649: note = Description of Artificial Sequence: Synthetic coding sequence
  source 1..2649: mol_type = other DNA
atgtactactgcagcggccggcagcgggaggccgcccctgtgtctgaagaaaatgaagattctgcccaccagatcagcagcctgtgccccttcccccagtgcaccaagagcttcagcaatgcccgggccctggagatgcacctgaacagccacagcggcgtgaagatggaggagttcctgcccccaggggccagcctgaagtgcaccgtgtgcagctacacagctgacagcgtcatcaacttccaccagcacctgttcagccacctgacccaggccgccttccgctgcaaccactgccacttcggcttccagacccagcgggagctgctgcagcaccaggagctgcacgtgcccagcggcaagctgccccgggagagtgacatggagcacagccccagcgccacagaggacagcctgcagcctgccacagacctgctgaccaggtctgagctgccccagagccagaaggccatgcagaccaaggatgccagcagtgacacagagctggacaagtgtgagaagaagacccagctgttcctgaccaaccagaggcctgagatccagcccaccaccaacaagcagagcttctcctacaccaagatcaagtctgagcccagcagcccccggctggccagcagccctgtgcagcccaacatcggccccagcttccctgtgggccccttcctgagccagttctccttcccccaggacatcaccatggtgccccaggccagcgagatcctggccaagatgtctgagctggtgcaccggcggctgcggcacggcagcagcagctacccacctgtgatctacagccccctgatgcccaagggggccacctgctttgagtgcaacatcaccttcaacaacctggacaactacctggtgcacaagaagcactactgcagcagccgctggcagcagatggccaagagccctgagttccccagcgtgtctgagaagatgcctgaggccctgagccccaacacaggccagaccagcatcaacctgctgaacccagctgcccacagcgctgaccctgagaaccccctgctgcagaccagctgcatcaacagcagcacagtgctggacctgattggccccaatggaaaaggacatgacaaggacttcagcacccagaccaagaagctgagcaccagcagcaacaatgatgacaagatcaatggcaagcctgtggatgtgaagaaccccagcgtgcccctggtggatggagagagtgaccccaacaagaccacctgtgaggcctgcaacatcaccttcagcagacatgagacctacatggtgcacaagcagtactactgtgccaccaggcatgacccccccctgaagaggtctgccagcaacaaggtgcctgccatgcagaggaccatgaggaccaggaagaggaggaagatgtatgagatgtgcctgcctgagcaggagcagaggcctcccctggtgcagcagcgcttcctggatgtggccaacctgaacaacccctgcaccagcacccaggagcccacagagggcctgggggagtgctaccacccccgctgtgacatcttccctggcatcgtgtccaagcacctggagaccagcctgaccatcaacaagtgtgtgcctgtgtccaaatgtgacaccacccacagctctgtgtcctgcctggagatggatgtgcccatcgacctgagcaagaagtgcctgagccagagcgagaggaccaccaccagccccaagaggctgctggactaccacgagtgcaccgtgtgcaagatctccttcaacaaggtggagaactacctggcccacaagcagaacttctgccctgtgacagcccaccagagaaatgacctgggccagctggatggcaaggtgttccccaaccctgagagcgagaggaacagcccagatgtgtcctatgaaagaagcatcatcaagtgtgagaagaatggaaacctgaagcagcccagccccaatggaaacctcttcagcagccacctggccaccctgcagggcctgaaggtgttttctgaggccgcccagctgattgccaccaaggaggagaacagacacctgttcctgccccagtgcctgtacccaggggccatcaagaaggccaagggagctgaccagctgagcccctactacggcatcaagcccagcgactacatcagcggcagcctggtgatccacaacacagacatcgagcagagcagaaatgcagaaaatgaaagccccaagggccaggccagcagcaatggctgtgccgccctgaagaaggacagcctgcccctgctgcccaagaacagaggcatggtgattgtgaatggaggcctgaagcaggatgagaggcctgctgccaacccccagcaggagaacatcagccagaacccccagcatgaagatgaccacaagagccccagctggatcagcgagaaccccctggccgccaatgaaaatgtgtccccaggcatccccagcgctgaggagcagctgagcagcatcgccaagggcgtgaatggcagcagccaggcccccaccagcggcaagtactgccgcctgtgtgacatccagttcaacaacctgagcaacttcatcacccacaagaagttctactgcagcagccatgctgctgagcacgtgaagtag

SEQ ID NO: 177051 - DNA, 3456 bp, synthetic construct
  misc_feature 1..3456: note = Description of Artificial Sequence: Synthetic coding sequence
  source 1..3456: mol_type = other DNA
atgagcaggaggaagcagagcaagccccggcagatcaagaggcccctggaggatgccattgaagatgaggaggaggagtgccccagcgaggagacagacatcatcagcaaaggagacttccccctggaggagagcttcagcacagaatttggacctgagaacctgagctgtgaggaggtggagtacttctgcaacaagggagatgatgagggcatccaggagacagctgagagtgatggagacacccagagcgagaagccaggccagcccggggtggagacagatgactgggatggccctggagagctggaggtgttccagaaggatggagagaggaagatccagagccggcagcagctgcctgtgggcaccacctggggccccttccctgggaagatggacctgaacaacaacagcctgaagaccaaggcccaggtgcccatggtgctgacagctggccccaagtggctgctggatgtgacctggcagggcgtggaggacaacaagaacaactgcatcgtgtacagcaaaggaggccagctgtggtgcaccaccaccaaggccatcagcgagggggaggagctgattgcctttgtggtggactttgacagccggctgcaggccgccagccagatgaccctgacagagggcatgtacccagcccggctgctggacagcatccagctgctgccccagcaggccgccatggccagcatcctgcccacagccatcgtgaacaaggacatcttcccctgcaagagctgtggcatctggtacagaagtgaaagaaacctgcaggcccacctgatgtactactgcagcggccggcagcgggaggccgcccctgtgtctgaggagaatgaagacagcgcccaccagatcagcagcctgtgccccttcccccagtgcaccaagagcttcagcaatgcccgggccctggagatgcacctgaacagccacagcggcgtgaagatggaggagttcctgcccccaggggccagcctgaagtgcaccgtgtgcagctacacagctgacagcgtcatcaacttccaccagcacctgttcagccacctgacccaggccgccttccgctgcaaccactgccacttcggcttccagacccagcgggagctgctgcagcaccaggagctgcacgtgcccagcggcaagctgccccgggagagtgacatggagcacagccccagcgccacagaggacagcctgcagcctgccacagacctgctgaccaggtctgagctgccccagagccagaaggccatgcagaccaaggatgccagcagtgacacagagctggacaagtgtgagaagaagacccagctgttcctgaccaaccagaggcctgagatccagcccaccaccaacaagcagagcttctcctacaccaagatcaagtctgagcccagcagcccccggctggccagcagccctgtgcagcccaacatcggccccagcttccctgtgggccccttcctgagccagttctccttcccccaggacatcaccatggtgccccaggccagcgagatcctggccaagatgtctgagctggtgcaccggcggctgcggcacggcagcagcagctacccacctgtgatctacagccccctgatgcccaagggggccacctgctttgagtgcaacatcaccttcaacaacctggacaactacctggtgcacaagaagcactactgcagcagccgctggcagcagatggccaagagccctgagttccccagcgtgtctgagaagatgcctgaggccctgagccccaacacaggccagaccagcatcaacctgctgaacccagctgcccacagcgctgaccctgagaaccccctgctgcagaccagctgcatcaacagcagcacagtgctggacctgattggccccaacgggaagggccatgacaaggacttcagcacccagaccaagaagctgagcaccagcagcaacaatgatgacaagatcaacgggaagcctgtggatgtgaagaaccccagcgtgcccctggtggatggagagagtgaccccaacaagaccacctgtgaggcctgcaacatcaccttcagcagacatgagacctacatggtgcacaagcagtactactgtgccaccaggcatgacccccccctgaagaggtctgccagcaacaaggtgcctgccatgcagaggaccatgaggaccaggaagaggaggaagatgtatgagatgtgcctgcctgagcaggagcagaggcctcccctggtgcagcagcgcttcctggatgtggccaacctgaacaacccctgcaccagcacccaggagcccacagagggcctgggggagtgctaccacccccgctgtgacatcttccctggcatcgtgtccaagcacctggagaccagcctgaccatcaacaagtgtgtgcctgtgtccaaatgtgacaccacccacagctctgtgtcctgcctggagatggatgtgcccatcgacctgagcaagaagtgcctgagccagagcgagaggaccaccaccagccccaagaggctgctggactaccatgaatgtactgtgtgcaagatctccttcaacaaggtggagaactacctggcccacaagcagaacttctgccctgtgacagcccaccagagaaatgacctgggccagctggatggcaaggtgttccccaaccctgagagcgagaggaacagcccagatgtgtcctatgaaagaagcatcatcaagtgtgagaagaatggaaacctgaagcagcccagccccaacggcaacctcttcagcagccacctggccaccctgcagggcctgaaggtgttcagcgaggccgcccagctgattgccaccaaggaggagaacagacacctgttcctgccccagtgcctgtacccaggggccatcaagaaggccaagggagctgaccagctgagcccctactacggcatcaagcccagcgactacatcagcggcagcctggtgatccacaacacagacatcgagcagagcagaaatgcagaaaatgaaagccccaagggccaggccagcagcaatggctgtgccgccctgaagaaggacagcctgcccctgctgcccaagaacagaggcatggtgattgtgaatggaggcctgaagcaggatgagaggcctgctgccaacccccagcaggagaacatcagccagaacccccagcatgaagatgaccacaagagccccagctggatcagcgagaaccccctggccgccaatgaaaatgtgtccccaggcatccccagcgctgaggagcagctgagcagcatcgccaagggcgtgaatggcagcagccaggcccccaccagcggcaagtactgccgcctgtgtgacatccagttcaacaacctgagcaacttcatcacccacaagaagttctactgcagcagccacgccgctgagcacgtgaagtag

SEQ ID NO: 177052 - DNA, 3060 bp, synthetic construct
  misc_feature 1..3060: note = Description of Artificial Sequence: Synthetic coding sequence
  source 1..3060: mol_type = other DNA
atggacctgaacaacaacagcctgaagaccaaggcccaggtgcccatggtgctgacagctggccccaagtggctgctggatgtgacctggcagggcgtggaggacaacaagaacaactgcatcgtgtacagcaaaggaggccagctgtggtgcaccaccaccaaggccatcagcgagggggaggagctgattgcctttgtggtggactttgacagccggctgcaggccgccagccagatgaccctgacagagggcatgtacccagcccggctgctggacagcatccagctgctgccccagcaggccgccatggccagcatcctgcccacagccatcgtgaacaaggacatcttcccctgcaagagctgtggcatctggtacagaagtgaaagaaacctgcaggcccacctgatgtactactgcagcggccggcagcgggaggccgcccctgtgtctgaggagaatgaagacagcgcccaccagatcagcagcctgtgccccttcccccagtgcaccaagagcttcagcaatgcccgggccctggagatgcacctgaacagccacagcggcgtgaagatggaggagttcctgcccccaggggccagcctgaagtgcaccgtgtgcagctacacagctgacagcgtcatcaacttccaccagcacctgttcagccacctgacccaggccgccttccgctgcaaccactgccacttcggcttccagacccagcgggagctgctgcagcaccaggagctgcacgtgcccagcggcaagctgccccgggagagtgacatggagcacagccccagcgccacagaggacagcctgcagcctgccacagacctgctgaccaggtctgagctgccccagagccagaaggccatgcagaccaaggatgccagcagtgacacagagctggacaagtgtgagaagaagacccagctgttcctgaccaaccagaggcctgagatccagcccaccaccaacaagcagagcttctcctacaccaagatcaagtctgagcccagcagcccccggctggccagcagccctgtgcagcccaacatcggccccagcttccctgtgggccccttcctgagccagttctccttcccccaggacatcaccatggtgccccaggccagcgagatcctggccaagatgtctgagctggtgcaccggcggctgcggcacggcagcagcagctacccacctgtgatctacagccccctgatgcccaagggggccacctgctttgagtgcaacatcaccttcaacaacctggacaactacctggtgcacaagaagcactactgcagcagccgctggcagcagatggccaagagccctgagttccccagcgtgtctgagaagatgcctgaggccctgagccccaacacaggccagaccagcatcaacctgctgaacccagctgcccacagcgctgaccctgagaaccccctgctgcagaccagctgcatcaacagcagcacagtgctggacctgattggccccaacgggaagggccatgacaaggacttcagcacccagaccaagaagctgagcaccagcagcaacaatgatgacaagatcaacgggaagcctgtggatgtgaagaaccccagcgtgcccctggtggatggagagagtgaccccaacaagaccacctgtgaggcctgcaacatcaccttcagcagacatgagacctacatggtgcacaagcagtactactgtgccaccaggcatgacccccccctgaagaggtctgccagcaacaaggtgcctgccatgcagaggaccatgaggaccaggaagaggaggaagatgtatgagatgtgcctgcctgagcaggagcagaggcctcccctggtgcagcagcgcttcctggatgtggccaacctgaacaacccctgcaccagcacccaggagcccacagagggcctgggggagtgctaccacccccgctgtgacatcttccctggcatcgtgtccaagcacctggagaccagcctgaccatcaacaagtgtgtgcctgtgtccaaatgtgacaccacccacagctctgtgtcctgcctggagatggatgtgcccatcgacctgagcaagaagtgcctgagccagagcgagaggaccaccaccagccccaagaggctgctggactaccatgaatgtactgtgtgcaagatctccttcaacaaggtggagaactacctggcccacaagcagaacttctgccctgtgacagcccaccagagaaatgacctgggccagctggatggcaaggtgttccccaaccctgagagcgagaggaacagcccagatgtgtcctatgaaagaagcatcatcaagtgtgagaagaatggaaacctgaagcagcccagccccaacggcaacctcttcagcagccacctggccaccctgcagggcctgaaggtgttcagcgaggccgcccagctgattgccaccaaggaggagaacagacacctgttcctgccccagtgcctgtacccaggggccatcaagaaggccaagggagctgaccagctgagcccctactacggcatcaagcccagcgactacatcagcggcagcctggtgatccacaacacagacatcgagcagagcagaaatgcagaaaatgaaagccccaagggccaggccagcagcaatggctgtgccgccctgaagaaggacagcctgcccctgctgcccaagaacagaggcatggtgattgtgaatggaggcctgaagcaggatgagaggcctgctgccaacccccagcaggagaacatcagccagaacccccagcatgaagatgaccacaagagccccagctggatcagcgagaaccccctggccgccaatgaaaatgtgtccccaggcatccccagcgctgaggagcagctgagcagcatcgccaagggcgtgaatggcagcagccaggcccccaccagcggcaagtactgccgcctgtgtgacatccagttcaacaacctgagcaacttcatcacccacaagaagttctactgcagcagccacgccgctgagcacgtgaagtag

SEQ ID NO: 177053 - DNA, 3060 bp, synthetic construct; identical to SEQ ID NO: 177052
  misc_feature 1..3060: note = Description of Artificial Sequence: Synthetic coding sequence
  source 1..3060: mol_type = other DNA

SEQ ID NO: 177054 - DNA, 2418 bp, synthetic construct
  misc_feature 1..2418: note = Description of Artificial Sequence: Synthetic coding sequence
  source 1..2418: mol_type = other DNA
atggatgaagatggcctggagctgcagcaggagcccaacagcttctttgatgccactggagcagatggcacccacatggatggagaccagatcgtggtggaggtgcaggagaccgtgtttgtgtctgatgtggtggacagcgacatcaccgtgcacaactttgtgcctgatgatcctgattctgtggtgatccaggatgtgattgaagatgtggtgattgaagatgtgcagtgcccagacatcatggaggaggctgatgtgtctgagaccgtcatcatccctgagcaggtgctggacagtgatgtgacagaggaggtgtccctggcccactgcaccgtgcctgatgatgtgctggccagtgacatcaccagcgcctccatgtccatgcctgagcacgtgctgactggagacagcatccacgtgtctgatgtgggccacgtgggccacgtgggccacgtggagcacgtggtgcatgacagcgtggtggaggccgagatcgtgacagaccccctgaccacagatgtggtgtctgaggaggtgctggtggccgactgtgccagcgaggccgtgattgatgccaacggcatccctgtggaccagcaggatgatgacaagggcaactgtgaggactacctgatgatcagcctggatgatgctgggaagattgaacatgatggcagcagcggcatgaccatggacacagagagcgagattgacccctgcaaggtggatggcacctgcccagaggtgatcaaggtgtacatcttcaaggctgaccccggggaggatgacctgggcggcaccgtggacatcgtggagagcgagccagaaaatgaccacggcgtggagctgctggaccagaacagcagcatccgggtgccccgggagaagatggtgtacatgacagtgaatgacagccagccagaagatgaggacctgaatgtggccgagattgctgatgaggtgtacatggaggtgattgtgggggaggaggatgctgctgctgctgctgctgctgctgctgtgcatgagcagcagatggatgacaatgagatcaagaccttcatgcccatcgcctgggccgccgcctacggcaacaacagtgatggcatcgagaacagaaatggaacagccagcgccctgctgcacattgatgaatctgctggcctgggccgcctggccaagcagaagcccaagaagagaagaagaccagacagccggcagtaccagacagccatcatcattggaccagatggccaccccctgactgtgtacccctgcatgatctgtgggaagaagttcaagagccggggcttcctgaagaggcacatgaagaaccaccctgagcacctggccaagaagaagtaccgctgcacagactgtgactacaccaccaacaagaagatcagcctgcacaaccacctggagagccacaagctgaccagcaaggccgagaaggccattgaatgtgatgaatgtgggaagcacttcagccacgccggggccctcttcacccacaagatggtgcacaaggagaagggggccaacaagatgcacaagtgcaagttctgtgaatatgaaacagctgagcagggcctgctgaacagacacctgctggccgtgcacagcaagaacttcccccacatctgtgtggagtgtgggaagggcttccgccaccccagcgagctgaagaagcacatgaggatccacactggagagaagccctaccagtgccagtactgtgagtacagatctgctgacagcagcaacctgaagacccacgtgaagaccaagcacagcaaggagatgcccttcaagtgtgacatctgcctgctgaccttcagtgacaccaaggaggtgcagcagcacgccctgatccaccaggagagcaagacccaccagtgcctgcactgtgaccacaagagcagcaacagcagtgacctgaagaggcacatcatctctgtgcacaccaaggactacccccacaagtgtgacatgtgtgacaagggcttccaccggcccagcgagctgaagaagcacgtggccgcccacaagggcaagaagatgcaccagtgccgccactgtgacttcaagattgctgacccctttgtgctgagccgccacatcctgtctgtgcacaccaaggacctgcccttccgctgcaagcgctgcaggaagggcttccggcagcagagcgagctgaagaagcacatgaagacccacagcggcaggaaggtgtaccagtgtgagtactgtgagtacagcaccacagatgccagcggcttcaagagacatgtgatcagcatccacaccaaggactacccccaccgctgtgagtactgcaagaagggcttccggcggcccagcgagaagaaccagcacatcatgaggcaccacaaggaggtgggcctgccctag

SEQ ID NO: 177055 - DNA, 2268 bp, synthetic construct
  misc_feature 1..2268: note = Description of Artificial Sequence: Synthetic coding sequence
  source 1..2268: mol_type = other DNA
atggatgaagatggcctggagctgcagcaggagcccaacagcttctttgatgccactggagcagatggcacccacatggatggagaccagatcgtggtggaggtgcaggagaccgtgtttgtgtctgatgtggtggacagcgacatcaccgtgcacaactttgtgcctgatgatcctgattctgtggtgatccaggatgtgattgaagatgtggtgattgaagatgtgcagtgcccagacatcatggaggaggctgatgtgtctgagaccgtcatcatccctgagcaggtgctggacagtgatgtgacagaggaggtgtccctggcccactgcaccgtgcctgatgatgtgctggccagtgacatcaccagcgcctccatgtccatgcctgagcacgtgctgactggagacagcatccacgtgtctgatgtgggccacgtgggccacgtgggccacgtggagcacgtggtgcatgacagcgtggtggaggccgagatcgtgacagaccccctgaccacagatgtggtgtctgaggaggtgctggtggccgactgtgccagcgaggccgtgattgatgccaacggcatccctgtggaccagcaggatgatgacaagggcaactgtgaggactacctgatgatcagctgtggcaccgtggacatcgtggagagcgagccagaaaatgaccacggcgtggagctgctggaccagaacagcagcatccgggtgccccgggagaagatggtgtacatgacagtgaatgacagccagccagaagatgaggacctgaatgtggccgagattgctgatgaggtgtacatggaggtgattgtgggggaggaggatgctgctgctgctgctgctgctgctgctgtgcatgagcagcagatggatgacaatgagatcaagaccttcatgcccatcgcctgggccgccgcctacggcaacaacagtgatggcatcgagaacagaaatggaacagccagcgccctgctgcacattgatgaatctgctggcctgggccgcctggccaagcagaagcccaagaagagaagaagaccagacagccggcagtaccagacagccatcatcattggaccagatggccaccccctgactgtgtacccctgcatgatctgtgggaagaagttcaagagccggggcttcctgaagaggcacatgaagaaccaccctgagcacctggccaagaagaagtaccgctgcacagactgtgactacaccaccaacaagaagatcagcctgcacaaccacctggagagccacaagctgaccagcaaggccgagaaggccattgaatgtgatgaatgtgggaagcacttcagccacgccggggccctcttcacccacaagatggtgcacaaggagaagggggccaacaagatgcacaagtgcaagttctgtgaatatgaaacagctgagcagggcctgctgaacagacacctgctggccgtgcacagcaagaacttcccccacatctgtgtggagtgtgggaagggcttccgccaccccagcgagctgaagaagcacatgaggatccacactggagagaagccctaccagtgccagtactgtgagtacagatctgctgacagcagcaacctgaagacccacgtgaagaccaagcacagcaaggagatgcccttcaagtgtgacatctgcctgctgaccttcagtgacaccaaggaggtgcagcagcacgccctgatccaccaggagagcaagacccaccagtgcctgcactgtgaccacaagagcagcaacagcagtgacctgaagaggcacatcatctctgtgcacaccaaggactacccccacaagtgtgacatgtgtgacaagggcttccaccggcccagcgagctgaagaagcacgtggccgcccacaagggcaagaagatgcaccagtgccgccactgtgacttcaagattgctgacccctttgtgctgagccgccacatcctgtctgtgcacaccaaggacctgcccttccgctgcaagcgctgcaggaagggcttccggcagcagagcgagctgaagaagcacatgaagacccacagcggcaggaaggtgtaccagtgtgagtactgtgagtacagcaccacagatgccagcggcttcaagagacatgtgatcagcatccacaccaaggactacccccaccgctgtgagtactgcaagaagggcttccggcggcccagcgagaagaaccagcacatcatgaggcaccacaaggaggtgggcctgccctag

SEQ ID NO: 177056 - DNA, 2418 bp, synthetic construct; identical to SEQ ID NO: 177054
  misc_feature 1..2418: note = Description of Artificial Sequence: Synthetic coding sequence
  source 1..2418: mol_type = other DNA

SEQ ID NO: 177057 - DNA, 2418 bp, synthetic construct; identical to SEQ ID NO: 177054
  misc_feature 1..2418: note = Description of Artificial Sequence: Synthetic coding sequence
  source 1..2418: mol_type = other DNA

SEQ ID NO: 177058 - DNA, 99 bp, synthetic construct
  misc_feature 1..99: note = Description of Artificial Sequence: Synthetic coding sequence
  source 1..99: mol_type = other DNA
atggatgaagatggcctggagctgcagcaggagcccaacagcttctttgatgccactggagcagatggcacccacatggatggagaccagatcgtgtag

SEQ ID NO: 177059 - DNA, 408 bp, synthetic construct
  misc_feature 1..408: note = Description of Artificial Sequence: Synthetic coding sequence
  source 1..408: mol_type = other DNA
atggatgaagatggcctggagctgcagcaggagcccaacagcttctttgatgccactggagcagatggcacccacatggatggagaccagatcgtggtggaggtgcaggagaccgtgtttgtgtctgatgtggtggacagcgacatcaccgtgcacaactttgtgcctgatgatcctgattctgtggtgatccaggatgtgattgaagatgtggtgattgaagatgtgcagtgcccagacatcatggaggaggctgatgtgtctgagaccgtcatcatccctgagcaggtgctggacagtgatgtgacagaggaggtgtccctggcccactgcaccgtgcctgatgatgtgctggccagtgacatcaccagcgcctccatgtccatgcctgagcacgtgctgacctag

SEQ ID NO: 177060 - DNA, 1584 bp, synthetic construct
  misc_feature 1..1584: note = Description of Artificial Sequence: Synthetic coding sequence
  source 1..1584: mol_type = other DNA
atggacacagaaagtgaaattgacccctgcaaggtggatggcacctgcccagaggtgatcaaggtgtacatcttcaaggctgaccctggagaagatgacctgggcggcaccgtggacatcgtggagagcgagccagaaaatgaccatggagtggagctgctggaccagaacagcagcatccgggtgccccgggagaagatggtgtacatgacagtgaatgacagccagccagaagatgaggacctgaatgtggccgagattgctgatgaggtgtacatggaggtgattgtgggggaggaggatgctgctgctgctgctgctgctgctgctgtgcatgagcagcagatggatgacaatgagatcaagaccttcatgcccatcgcctgggccgccgcctatgccatcatcattggaccagatggccaccccctgactgtgtacccctgcatgatctgtgggaagaagttcaagagccggggcttcctgaagaggcacatgaagaaccaccctgagcacctggccaagaagaagtaccgctgcacagactgtgactacaccaccaacaagaagatcagcctgcacaaccacctggagagccacaagctgaccagcaaggccgagaaggccattgaatgtgatgaatgtgggaagcacttcagccacgccggggccctcttcacccacaagatggtgcacaaggagaagggggccaacaagatgcacaagtgcaagttctgtgaatatgaaacagctgagcagggcctgctgaacagacacctgctggccgtgcacagcaagaacttcccccacatctgtgtggagtgtgggaagggcttccgccaccccagcgagctgaagaagcacatgaggatccacactggagagaagccctaccagtgccagtactgtgagtacagatctgctgacagcagcaacctgaagacccacgtgaagaccaagcacagcaaggagatgcccttcaagtgtgacatctgcctgctgaccttcagtgacaccaaggaggtgcagcagcacgccctgatccaccaggagagcaagacccaccagtgcctgcactgtgaccacaagagcagcaacagcagtgacctgaagaggcacatcatctctgtgcacaccaaggactacccccacaagtgtgacatgtgtgacaagggcttccaccggcccagcgagctgaagaagcacgtggccgcccacaagggcaagaagatgcaccagtgccgccactgtgacttcaagattgctgacccctttgtgctgagccgccacatcctgtctgtgcacaccaaggacctgcccttccgctgcaagcgctgcaggaagggcttccggcagcagagcgagctgaagaagcacatgaagacccacagcggcaggaaggtgtaccagtgtgagtactgtgagtacagcaccacagatgccagcggcttcaagagacatgtgatcagcatccacaccaaggactacccccaccgctgtgagtactgcaagaagggcttccggcggcccagcgagaagaaccagcacatcatgaggcaccacaaggaggtgggcctgccctag

SEQ ID NO: 177061 - DNA, 789 bp, synthetic construct
  misc_feature 1..789: note = Description of Artificial Sequence: Synthetic coding sequence
  source 1..789: mol_type = other DNA
atggatgaagatggcctggagctgcagcaggagcccaacagcttctttgatgccactggagcagatggcacccacatggatggagaccagatcgtggtggaggtgcaggagaccgtgtttgtgtctgatgtggtggacagcgacatcaccgtgcacaactttgtgcctgatgatcctgattctgtggtgatccaggatgtgattgaagatgtggtgattgaagatgtgcagtgcccagacatcatggaggaggctgatgtgtctgagaccgtcatcatccctgagcaggtgctggacagtgatgtgacagaggaggtgtccctggcccactgcaccgtgcctgatgatgtgctggccagtgacatcaccagcgcctccatgtccatgcctgagcacgtgctgactggagacagcatccacgtgtctgatgtgggccacgtgggccacgtgggccacgtggagcacgtggtgcatgacagcgtggtggaggccgagatcgtgacagaccccctgaccacagatgtggtgtctgaggaggtgctggtggccgactgtgccagcgaggccgtgattgatgccaacggcatccctgtggaccagcaggatgatgacaagggcaactgtgaggactacctgatgatcagctgcaacaacagtgatggcattgaaaatagaaatggaacagccagcgccctgctgcacattgatgagagcgctggcctgggccgcctggccaagcagaagcccaagaagagaagaagaccagacagccggcagtaccagacctag

SEQ ID NO: 177062 - DNA, 1731 bp, synthetic construct
  misc_feature 1..1731: note = Description of Artificial Sequence: Synthetic coding sequence
  source 1..1731: mol_type = other DNA
atgaccatggacacagaaagtgaaattgacccctgcaaggtggatggcacctgcccagaggtgatcaaggtgtacatcttcaaggctgaccctggagaagatgacctgggcggcaccgtggacatcgtggagagcgagccagaaaatgaccatggagtggagctgctggaccagaacagcagcatccgggtgccccgggagaagatggtgtacatgacagtgaatgacagccagccagaagatgaggacctgaatgtggccgagattgctgatgaggtgtacatggaggtgattgtgggggaggaggatgctgctgctgctgctgctgctgctgctgtgcatgagcagcagatggatgacaatgagatcaagaccttcatgcccatcgcctgggccgccgcctacggcaacaacagtgatggcattgaaaatagaaatggaacagccagcgccctgctgcacattgatgagagcgctggcctgggccgcctggccaagcagaagcccaagaagagaagaagaccagacagccggcagtaccagacagccatcatcatcggcccagatggccaccccctgactgtgtacccctgcatgatctgtgggaagaagttcaagagccggggcttcctgaagaggcacatgaagaaccaccctgagcacctggccaagaagaagtaccgctgcacagactgtgactacaccaccaacaagaagatcagcctgcacaaccacctggagagccacaagctgaccagcaaggccgagaaggccattgaatgtgatgaatgtgggaagcacttcagccatgctggggccctcttcacccacaagatggtgcacaaggagaagggggccaacaagatgcacaagtgcaagttctgtgaatatgaaacagctgagcagggcctgctgaacagacacctgctggccgtgcacagcaagaacttcccccacatctgtgtggagtgtgggaagggcttccgccaccccagcgagctgaagaagcacatgaggatccacactggagagaagccctaccagtgccagtactgtgagtacagatctgctgacagcagcaacctgaagacccacgtgaagaccaagcacagcaaggagatgcccttcaagtgtgacatctgcctgctgaccttcagtgacaccaaggaggtgcagcagcacgccctgatccaccaggagagcaagacccaccagtgcctgcactgtgaccacaagagcagcaacagcagtgacctgaagaggcacatcatctctgtgcacaccaaggactacccccacaagtgtgacatgtgtgacaagggcttccaccggcccagcgagctgaagaagcacgtggccgcccacaagggcaagaagatgcaccagtgccgccactgtgacttcaagattgctgacccctttgtgctgagccgccacatcctgtctgtgcacaccaaggacctgcccttccgctgcaagcgctgcaggaagggcttccggcagcagagcgagctgaagaagcacatgaagacccacagcggcaggaaggtgtaccagtgtgagtactgtgagtacagcaccacagatgccagcggcttcaagagacatgtgatcagcatccacaccaaggactacccccaccgctgtgagtactgcaagaagggcttcagaagacccagcgagaagaaccagcacatcatgaggcaccacaaggaggtgggcctgccctag

SEQ ID NO: 177063 - DNA, 2535 bp, synthetic construct
  misc_feature 1..2535: note = Description of Artificial Sequence: Synthetic coding sequence
  source 1..2535: mol_type = other DNA
atggatgaagatggcctggagctgcagcaggagcccaacagcttctttgatgccacagacagagtgtccttctgccaccctggctggagcacagtggcccccagcggcagcacagccaccagcgccagccaggcccaggtgatctgcagcgccagccgggtgactggagccaccggggctgatggcacccacatggatggagaccagatcgtggtggaggtgcaggagaccgtgtttgtgtctgatgtggtggacagcgacatcaccgtgcacaactttgtgcctgatgatcctgacagcgtggtgatccaggatgtgattgaagatgtggtgattgaagatgtgcagtgcccagacatcatggaggaggctgatgtgtctgaaacagtcatcatccctgagcaggtgctggacagtgatgtgacagaggaggtgtccctggcccactgcaccgtgcctgatgatgtgctggccagtgacatcaccagcgcctccatgtccatgcctgagcacgtgctgaccggggacagcatccacgtgtctgatgtgggccacgtgggccacgtgggccacgtggagcacgtggtgcatgattctgtggtggaggccgagatcgtgacagaccccctgaccacagatgtggtgtctgaggaggtgctggtggccgactgtgccagcgaggccgtgattgatgccaacggcatccctgtggaccagcaggatgatgacaagggcaactgtgaggactacctgatgatcagcctggatgatgctgggaagattgaacatgatggcagcagcggcatgaccatggacacagaaagtgaaattgacccctgcaaggtggatggcacctgcccagaggtgatcaaggtgtacatcttcaaggctgaccctggagaagatgacctgggcggcaccgtggacatcgtggagagcgagccagaaaatgaccatggagtggagctgctggaccagaacagcagcatccgggtgccccgggagaagatggtgtacatgacagtgaatgacagccagccagaagatgaggacctgaatgtggccgagattgctgatgaggtgtacatggaggtgattgtgggggaggaggatgctgctgctgctgctgctgctgctgctgtgcatgagcagcagatggatgacaatgagatcaagaccttcatgcccatcgcctgggccgccgcctacggcaacaacagtgatggcattgaaaatagaaatggaacagccagcgccctgctgcacattgatgagagcgctggcctgggccgcctggccaagcagaagcccaagaagagaagaagaccagacagccggcagtaccagacagccatcatcatcggcccagatggccaccccctgactgtgtacccctgcatgatctgtgggaagaagttcaagagccggggcttcctgaagaggcacatgaagaaccaccctgagcacctggccaagaagaagtaccgctgcacagactgtgactacaccaccaacaagaagatcagcctgcacaaccacctggagagccacaagctgaccagcaaggccgagaaggccattgaatgtgatgaatgtgggaagcacttcagccatgctggggccctcttcacccacaagatggtgcacaaggagaagggggccaacaagatgcacaagtgcaagttctgtgaatatgaaacagctgagcagggcctgctgaacagacacctgctggccgtgcacagcaagaacttcccccacatctgtgtggagtgtgggaagggcttccgccaccccagcgagctgaagaagcacatgaggatccacactggagagaagccctaccagtgccagtactgtgagtacagatctgctgacagcagcaacctgaagacccacgtgaagaccaagcacagcaaggagatgcccttcaagtgtgacatctgcctgctgaccttcagtgacaccaaggaggtgcagcagcacgccctgatccaccaggagagcaagacccaccagtgcctgcactgtgaccacaagagcagcaacagcagtgacctgaagaggcacatcatctctgtgcacaccaaggactacccccacaagtgtgacatgtgtgacaagggcttccaccggcccagcgagctgaagaagcacgtggccgcccacaagggcaagaagatgcaccagtgccgccactgtgacttcaagattgctgacccctttgtgctgagccgccacatcctgtctgtgcacaccaaggacctgcccttccgctgcaagcgctgcaggaagggcttccggcagcagagcgagctgaagaagcacatgaagacccacagcggcaggaaggtgtaccagtgtgagtactgtgagtacagcaccacagatgccagcggcttcaagagacatgtgatcagcatccacaccaaggactacccccaccgctgtgagtactgcaagaagggcttcagaagacccagcgagaagaaccagcacatcatgaggcaccacaaggaggtgggcctgccctag

SEQ ID NO: 177064 - DNA, 522 bp, synthetic construct
  misc_feature 1..522: note = Description of Artificial Sequence: Synthetic coding sequence
  source 1..522: mol_type = other DNA
gggggctgcagccagtacctgctgctgtttgtggatgatgctgggaagattgaacatgatggcagcagcggcatgaccatggacacagaaagtgaaattgacccctgcaaggtggatggcacctgcccagaggtgatcaaggtgtacatcttcaaggctgaccctggagaagatgacctgggcggcaccgtggacatcgtggagagcgagccagaaaatgaccatggagtggagctgctggaccagaacagcagcatccgggtgccccgggagaagatggtgtacatgacagtgaatgacagccagccagaagatgaggacctgaatgtggccgagattgctgatgaggtgtacatggaggtgattgtgggggaggaggatgctgctgctgctgctgctgctgctgctgtgcatgagcagcagatggatgacaatgagatcaagaccttcatgcccatcgcctgggccgccgcctacggcaacaacagtgatggcattgaaaatagaaatggaacagcctag

SEQ ID NO: 177065 - DNA, 2406 bp, synthetic construct
  misc_feature 1..2406: note = Description of Artificial Sequence: Synthetic coding sequence
  source 1..2406: mol_type = other DNA
atggatgaagatgaatttgagctgcagccccaggagcccaacagcttctttgatggcatcggggctgatgccacccacatggatggagaccagatcgtggtggagatccaggaggccgtgtttgtgagcaacatcgtggacagcgacatcaccgtgcacaactttgtgcctgatgatcctgacagcgtggtgatccaggatgtggtggaggatgtggtgattgaggaggatgtgcagtgcagcgacatcctggaggaggctgatgtgtctgaaaatgtcatcatccctgagcaggtgctggacagtgatgtgacagaggaggtgtccctgccccactgcaccgtgcctgatgatgtgctggccagtgacatcaccagcacctccatgtccatgcctgagcacgtgctgaccagcgagagcatgcacgtgtgtgacatcggccacgtggagcacatggtgcatgacagcgtggtggaggccgagatcatcacagaccccctgaccagtgacatcgtgtctgaggaggtgctggtggccgactgtgcccctgaggccgtgattgatgccagcggcatctctgtggaccagcaggacaatgacaaggccagctgtgaggactacctgatgatcagcctggatgatgctgggaagattgaacatgatggcagcactggagtgaccattgatgctgagagcgagatggacccctgcaaggtggacagcacctgcccagaggtgatcaaggtgtacatcttcaaggctgaccccggggaggatgacctgggcggcaccgtggacatcgtggagagcgagccagaaaatgaccacggcgtggagctgctggaccagaacagcagcatccgggtgccccgggagaagatggtgtacatgacagtgaatgacagccagcaggaggatgaggacctgaatgtggccgagattgctgatgaggtgtacatggaggtgattgtgggggaggaggatgctgctgtggccgctgctgctgctgctgtgcatgagcagcagattgatgaagatgagatgaagacctttgtgcccatcgcctgggccgccgcctacggcaacaacagtgatggcatcgagaacagaaatggaacagccagcgccctgctgcacattgatgaatctgctggcctgggccgcctggccaagcagaagcccaagaagaagaggaggccagacagccggcagtaccagacagccatcatcattggaccagatggccaccccctgactgtgtacccctgcatgatctgtgggaagaagttcaagagccggggcttcctgaagaggcacatgaagaaccaccctgagcacctggccaagaagaagtaccactgcacagactgtgactacaccaccaacaagaagatcagcctgcacaaccacctggagagccacaagctgaccagcaaggccgagaaggccattgaatgtgatgaatgtgggaagcacttcagccacgccggggccctcttcacccacaagatggtgcacaaggagaagggggccaacaagatgcacaagtgcaagttctgtgaatatgaaacagctgagcagggcctgctgaacagacacctgctggccgtgcacagcaagaacttcccccacatctgtgtggagtgtgggaagggcttccgccaccccagcgagctgaggaagcacatgaggatccacactggagagaagccctaccagtgccagtactgtgagtacagatctgctgacagcagcaacctgaagacccacatcaagaccaagcacagcaaggagatgcccttcaagtgtgacatctgcctgctgaccttcagtgacaccaaggaggtgcagcagcacaccctggtgcaccaggagagcaagacccaccagtgcctgcactgtgaccacaagagcagcaacagcagtgacctgaagagacatgtgatctctgtgcacaccaaggactacccccacaagtgtgagatgtgtgagaagggcttccaccggcccagcgagctgaagaagcacgtggccgtgcacaagggcaagaagatgcaccagtgccgccactgtgacttcaagattgctgacccctttgtgctgagccgccacatcctgtctgtgcacaccaaggacctgcccttccgctgcaagcgctgcaggaagggcttccggcagcagaatgagctgaagaagcacatgaagacccacagcggcaggaaggtgtaccagtgtgagtactgtgagtacagcaccacagatgccagcggcttcaagagacatgtgatcagcatccacaccaaggactacccccaccgctgtgagtactgcaagaagggcttccggcggcccagcgagaagaaccagcacatcatgaggcaccacaaggaggtgggcctgccctag

SEQ ID NO: 177066 - DNA, 2406 bp, synthetic construct; identical to SEQ ID NO: 177065
  misc_feature 1..2406: note = Description of Artificial Sequence: Synthetic coding sequence
  source 1..2406: mol_type = other DNA

SEQ ID NO: 177067 - DNA, 1833 bp, synthetic construct
  misc_feature 1..1833: note = Description of Artificial Sequence: Synthetic coding sequence
  source 1..1833: mol_type = other DNA
atggatgaagatgaatttgagctgcagccccaggagcccaacagcttctttgatggcatcgtggatgatgctgggaagattgaacatgatggcagcactggagtgaccattgatgctgagagcgagatggacccctgcaaggtggacagcacctgcccagaggtgatcaaggtgtacatcttcaaggctgaccctggagaagatgacctgggcggcaccgtggacatcgtggagagcgagccagaaaatgaccatggagtggagctgctggaccagaacagcagcatccgggtgccccgggagaagatggtgtacatgacagtgaatgacagccagcaggaggatgaggacctgaatgtggccgagattgctgatgaggtgtacatggaggtgattgtgggggaggaggatgctgctgtggccgctgctgctgctgctgtgcatgagcagcagattgatgaagatgagatgaagacctttgtgcccatcgcctgggccgccgcctacggcaacaacagtgatggcattgaaaatagaaatggaacagccagcgccctgctgcacattgatgagagcgctggcctgggccgcctggccaagcagaagcccaagaagaagagaagaccagacagccggcagtaccagacagccatcatcatcggcccagatggccaccccctgactgtgtacccctgcatgatctgtgggaagaagttcaagagccggggcttcctgaagaggcacatgaagaaccaccctgagcacctggccaagaagaagtaccactgcacagactgtgactacaccaccaacaagaagatcagcctgcacaaccacctggagagccacaagctgaccagcaaggccgagaaggccattgaatgtgatgaatgtgggaagcacttcagccatgctggggccctcttcacccacaagatggtgcacaaggagaagggggccaacaagatgcacaagtgcaagttctgtgaatatgaaacagctgagcagggcctgctgaacagacacctgctggccgtgcacagcaagaacttcccccacatctgtgtggagtgtgggaagggcttccgccaccccagcgagctgaggaagcacatgaggatccacactggagagaagccctaccagtgccagtactgtgagtacagatctgctgacagcagcaacctgaagacccacatcaagaccaagcacagcaaggagatgcccttcaagtgtgacatctgcctgctgaccttcagtgacaccaaggaggtgcagcagcacaccctggtgcaccaggagagcaagacccaccagtgcctgcactgtgaccacaagagcagcaacagcagtgacctgaagagacatgtgatctctgtgcacaccaaggactacccccacaagtgtgagatgtgtgagaagggcttccaccggcccagcgagctgaagaagcacgtggccgtgcacaagggcaagaagatgcaccagtgccgccactgtgacttcaagattgctgacccctttgtgctgagccgccacatcctgtctgtgcacaccaaggacctgcccttccgctgcaagcgctgcaggaagggcttccggcagcagaatgagctgaagaagcacatgaagacccacagcggcaggaaggtgtaccagtgtgagtactgtgagtacagcaccacagatgccagcggcttcaagagacatgtgatcagcatccacaccaaggactacccccaccgctgtgagtactgcaagaagggcttcagaagacccagcgagaagaaccagcacatcatgaggcaccacaaggaggtgggcctgccctag

SEQ ID NO: 177068 - DNA, 276 bp, synthetic construct
  misc_feature 1..276: note = Description of Artificial Sequence: Synthetic coding sequence
  source 1..276: mol_type = other DNA
atggatgaagatgaatttgagctgcagccccaggagcccaacagcttctttgatggcatcggggctgatgccacccacatggatggagaccagatcgtggtggagatccaggaggccgtgtttgtgagcaacatcgtggacagcgacatcaccgtgcacaactttgtgcctgatgatcctgacagcgtggtgatccaggatgtggtggaggatgtggtgattgaggaggatgtgcagtgcagcgacatcctggaggaggctgatgtgtctgagtag

SEQ ID NO: 177069 - DNA, 2175 bp, synthetic construct
  misc_feature 1..2175: note = Description of Artificial Sequence: Synthetic coding sequence
  source 1..2175: mol_type = other DNA
atggatggagaccagatcgtggtggagatccaggaggccgtgtttgtgagcaacatcgtggacagcgacatcaccgtgcacaactttgtgcctgatgatcctgacagcgtggtgatccaggatgtggtggaggatgtggtgattgaggaggatgtgcagtgcagcgacatcctggaggaggctgatgtgtctgaaaatgtcatcatccctgagcaggtgctggacagtgatgtgacagaggaggtgtccctgccccactgcaccgtgcctgatgatgtgctggccagtgacatcaccagcacctccatgtccatgcctgagcacgtgctgaccagcgagagcatgcacgtgtgtgacatcggccacgtggagcacatggtgcatgacagcgtggtggaggccgagatcatcacagaccccctgaccagtgacatcgtgtctgaggaggtgctggtggccgactgtgcccctgaggccgtgattgatgccagcggcatctctgtggaccagcaggacaatgacaaggccagctgtgaggactacctgatgatcagcctggatgatgctgggaagattgaacatgatggcagcactggagtgaccattgatgctgagagcgagatggacccctgcaaggtggacagcacctgcccagaggtgatcaaggtgtacatcttcaaggctgaccccggggaggatgacctgggcggcaccgtggacatcgtggagagcgagccagaaaatgaccacggcgtggagctgctggaccagaacagcagcatccgggtgccccgggagaagatggtgtacatgacagtgaatgacagccagcaggaggatgaggacctgagcaacaacagtgatggcattgaaaatagaaatggaacagccagcgccctgctgcacattgatgagagcgctggcctgggccgcctggccaagcagaagcccaagaagaagagaagaccagacagccggcagtaccagacagccatcatcatcggcccagatggccaccccctgactgtgtacccctgcatgatctgtgggaagaagttcaagagccggggcttcctgaagaggcacatgaagaaccaccctgagcacctggccaagaagaagtaccactgcacagactgtgactacaccaccaacaagaagatcagcctgcacaaccacctggagagccacaagctgaccagcaaggccgagaaggccattgaatgtgatgaatgtgggaagcacttcagccatgctggggccctcttcacccacaagatggtgcacaaggagaagggggccaacaagatgcacaagtgcaagttctgtgaatatgaaacagctgagcagggcctgctgaacagacacctgctggccgtgcacagcaagaacttcccccacatctgtgtggagtgtgggaagggcttccgccaccccagcgagctgaggaagcacatgaggatccacactggagagaagccctaccagtgccagtactgtgagtacagatctgctgacagcagcaacctgaagacccacatcaagaccaagcacagcaaggagatgcccttcaagtgtgacatctgcctgctgaccttcagtgacaccaaggaggtgcagcagcacaccctggtgcaccaggagagcaagacccaccagtgcctgcactgtgaccacaagagcagcaacagcagtgacctgaagagacatgtgatctctgtgcacaccaaggactacccccacaagtgtgagatgtgtgagaagggcttccaccggcccagcgagctgaagaagcacgtggccgtgcacaagggcaagaagatgcaccagtgccgccactgtgacttcaagattgctgacccctttgtgctgagccgccacatcctgtctgtgcacaccaaggacctgcccttccgctgcaagcgctgcaggaagggcttccggcagcagaatgagctgaagaagcacatgaagacccacagcggcaggaaggtgtaccagtgtgagtactgtgagtacagcaccacagatgccagcggcttcaagagacatgtgatcagcatccacaccaaggactacccccaccgctgtgagtactgcaagaagggcttcagaagacccagcgagaagaaccagcacatcatgaggcaccacaaggaggtgggcctgccctag

SEQ ID NO: 177070 - DNA, 1617 bp, synthetic construct
  misc_feature 1..1617: note = Description of Artificial Sequence: Synthetic coding sequence
  source 1..1617: mol_type = other DNA
atggcccgggagctgtctgagagcacagccctggatgcccagagcacagaggaccagatggagctgctggtgatcaaggtggaggaggaggaggccggcttccccagcagcccagacctgggcagcgagggcagccgggagcgcttccggggcttccgctacccagaggccgccggcccccgggaggccctgagccggctgcgggagctgtgccggcagtggctgcagcctgagatgcacagcaaggagcagatcctggagctgctggtgctggagcagttcctgaccatcctgcccggcaacctgcagagctgggtgcgggagcagcaccctgagagcggggaggaggtggtggtgctgctggagtacctggagcggcagctggatgagcccgccccccaggtgtctggagtggaccagggccaggagctgctgtgctgcaagatggccctgctgaccccagcccctggcagccagagcagccagttccagctgatgaaggccctgctgaagcatgagagcgtgggcagccagcccctgcaggacagagtgctgcaggtgcctgtgctggcccacggcggctgctgccgggaggacaaggtggtggccagccggctgaccccagagagccagggcctgctgaaggtggaggatgtggccctgaccctgaccccagagtggacccagcaggacagcagccagggcaacctgtgcagagatgagaagcaggagaaccacggcagcctggtgtccctgggagatgagaagcagaccaagagccgggacctgcccccagctgaggagctgcctgagaaggagcacggcaagatcagctgccacctgagagaagatattgcccagatccccacctgtgccgaggccggggagcaggagggccgcctgcagaggaagcagaagaatgccactggaggccgccgccacatctgccatgaatgtgggaagagctttgcccagagcagcggcctgagcaagcaccggcgcatccacactggagagaagccctatgaatgtgaggagtgtgggaaggccttcatcggcagcagcgccctggtgatccaccagagggtgcacactggagagaagccctatgaatgtgaggagtgtgggaaggccttcagccacagcagtgacctgatcaagcaccagaggacccacactggagagaagccctatgaatgtgatgactgtgggaagaccttcagccagagctgcagcctgctggagcaccaccgcatccacactggagagaagccctaccagtgcagcatgtgtgggaaggccttccgccgcagcagccacctgctgcggcaccagaggatccacactggagacaagaatgtgcaggagcctgagcagggcgaggcctggaagagcaggatggagagccagctggagaatgtggagacccccatgagctacaagtgcaatgaatgtgagaggagcttcacccagaacacaggcctcatcgagcaccagaagatccacactggagagaagccctaccagtgcaatgcctgtgggaagggcttcacccgcatctcctacctggtgcagcaccagaggagccacgtgggcaagaacatcctgagccagtag

SEQ ID NO: 177071 - DNA, 1173 bp, synthetic construct
  misc_feature 1..1173: note = Description of Artificial Sequence: Synthetic coding sequence
  source 1..1173: mol_type = other DNA
atggccctgctgaccccagcccctggcagccagagcagccagttccagctgatgaaggccctgctgaagcatgagagcgtgggcagccagcccctgcaggacagagtgctgcaggtgcctgtgctggcccacggcggctgctgccgggaggacaaggtggtggccagccggctgaccccagagagccagggcctgctgaaggtggaggatgtggccctgaccctgaccccagagtggacccagcaggacagcagccagggcaacctgtgcagagatgagaagcaggagaaccacggcagcctggtgtccctgggagatgagaagcagaccaagagccgggacctgcccccagctgaggagctgcctgagaaggagcacggcaagatcagctgccacctgagagaagatattgcccagatccccacctgtgccgaggccggggagcaggagggccgcctgcagaggaagcagaagaatgccactggaggccgccgccacatctgccatgaatgtgggaagagctttgcccagagcagcggcctgagcaagcaccggcgcatccacactggagagaagccctatgaatgtgaggagtgtgggaaggccttcatcggcagcagcgccctggtgatccaccagagggtgcacactggagagaagccctatgaatgtgaggagtgtgggaaggccttcagccacagcagtgacctgatcaagcaccagaggacccacactggagagaagccctatgaatgtgatgactgtgggaagaccttcagccagagctgcagcctgctggagcaccaccgcatccacactggagagaagccctaccagtgcagcatgtgtgggaaggccttccgccgcagcagccacctgctgcggcaccagaggatccacactggagacaagaatgtgcaggagcctgagcagggcgaggcctggaagagcaggatggagagccagctggagaatgtggagacccccatgagctacaagtgcaatgaatgtgagaggagcttcacccagaacacaggcctcatcgagcaccagaagatccacactggagagaagccctaccagtgcaatgcctgtgggaagggcttcacccgcatctcctacctggtgcagcaccagaggagccacgtgggcaagaacatcctgagccagtag

SEQ ID NO: 177072 - DNA, 1617 bp, synthetic construct; identical to SEQ ID NO: 177070
  misc_feature 1..1617: note = Description of Artificial Sequence: Synthetic coding sequence
  source 1..1617: mol_type = other DNA

SEQ ID NO: 177073 - DNA, 537 bp, synthetic construct
  misc_feature 1..537: note = Description of Artificial Sequence: Synthetic coding sequence
  source 1..537: mol_type = other DNA
atggcccgggagctgtctgagagcacagccctggatgcccagagcacagaggaccagatggagctgctggtgatcaaggtggaggaggaggaggccggcttccccagcagcccagacctgggcagcgagggcagccgggagcgcttccggggcttccgctacccagaggccgccggcccccgggaggccctgagccggctgcgggagctgtgccggcagtggctgcagcctgagatgcacagcaaggagcagatcctggagctgctggtgctggagcagttcctgaccatcctgcccggcaacctgcagagctgggtgcgggagcagcaccctgagagcggggaggaggtggtggtgctgctggagtacctggagcggcagctggatgagcccgccccccaggtggagaggacaggcctggtgtctgagcgctgtggcctcttccccccagagatcccagaccagagcgagggccacagcttcaacatccaggagttcttcatctccttcctgtaccgggagcccccctggcagtag

SEQ ID NO: 177074 - DNA, 993 bp, synthetic construct
  misc_feature 1..993: note = Description of Artificial Sequence: Synthetic coding sequence
  source 1..993: mol_type = other DNA
cggcagcgcttccggggcttccgctacccagaggccgccggcccccgggaggccctgagccggctgcgggagctgtgtggccagtggctgcagcctgagatgcacagcaaggagcagatcctggagctgctggtgctggagcagttcctgaccatcctgcccggcaacctgcagagctgggtgcgggagcagcaccctgagagcggggaggaggtggtggtgctgctggagtacctggagcggcagctggatgagcccgccccccaggtggagaggacaggcctggtgtctgagcgctgtgcccggggcatccccctgcggagccgcagcagcagcagcctgtttgtgctggccttcctgccctggcagggcatcacccacagctgccggccctttgtggtgtctggaggagagatccagaccaagagccgggacctgccccctgtgaagaagctgcctgagaaggagcacggcaagatctgccacctgagagaagatattgcccagatccccacccacgccgaggccggggagcaggagggccgcctgcagaggaagcagaagaatgccatcggcagccgccgccactactgccatgaatgtgggaagagctttgcccagagcagcggcctgaccaagcaccggcgcatccacactggagagaagccctatgaatgtgaggactgtgggaagaccttcatcggcagcagcgccctggtgatccaccagagggtgcacactggagagaagccctatgaatgtgaggagtgtgggaaggtgttcagccacagcagcaacctgatcaagcaccagaggacccacactggagagaagccctatgaatgtgatgactgtgggaagaccttcagccagagctgcagcctgctggagcaccacaagatccacactggagagaagccctaccagtgcaacatgtgtgggaaggccttcagaagaaacagccacctgctgcggcaccagaggatccactag

SEQ ID NO: 177075 - DNA, 1638 bp, synthetic construct
  misc_feature 1..1638: note = Description of Artificial Sequence: Synthetic coding sequence
  source 1..1638: mol_type = other DNA
atggcccgggagcccaggaagaatgctgccctggatgcccagagcgctgaggaccagacaggcctgctgactgtgaaggtggagaaggaggaggccagcgccctgacagctgaggtgcgggccccctgcagccctgcccggggccctgagaggagccggcagcgcttccggggcttccgctacccagaggccgccggcccccgggaggccctgagccggctgcgggagctgtgtggccagtggctgcagcctgagatgcacagcaaggagcagatcctggagctgctggtgctggagcagttcctgaccatcctgcccggcaacctgcagagctgggtgcgggagcagcaccctgagagcggggaggaggtggtggtgctgctggagtacctggagcggcagctggatgagcccgccccccaggtgcctgtgggggaccagggccaggagctgctgtgctgcaagatggccctgctgacccagacccagggcagccagagcagccagtgccagcccatgaaggccctcttcaagcatgagagcctgggcagccagcccctgcatgacagagtgctgcaggtgcccggcctggcccagggcggctgctgcagagaagatgccatggtggccagccggctgaccccaggcagccagggcctgctgaagatggaggatgtggccctgaccctgaccccaggctggacccagctggacagcagccaggtgaacctgtacagagatgagaagcaggagaaccacagcagcctggtgtccctgggcggggagatccagaccaagagccgggacctgccccctgtgaagaagctgcctgagaaggagcacggcaagatctgccacctgagagaagatattgcccagatccccacccacgccgaggccggggagcaggagggccgcctgcagaggaagcagaagaatgccatcggcagccgccgccactactgccatgaatgtgggaagagctttgcccagagcagcggcctgaccaagcaccggcgcatccacactggagagaagccctatgaatgtgaggactgtgggaagaccttcatcggcagcagcgccctggtgatccaccagagggtgcacactggagagaagccctatgaatgtgaggagtgtgggaaggtgttcagccacagcagcaacctgatcaagcaccagaggacccacactggagagaagccctatgaatgtgatgactgtgggaagaccttcagccagagctgcagcctgctggagcaccacaagatccacactggagagaagccctaccagtgcaacatgtgtgggaaggccttcagaagaaacagccacctgctgcggcaccagaggatccacggggacaagaatgtgcagaaccctgagcacggggagagctgggagagccagggccgcacagagagccagtgggagaacacagaggcccctgtgtcctacaagtgcaatgaatgtgagaggagcttcaccaggaacagaagcctgattgagcaccagaagatccacactggagagaagccctaccagtgtgacacctgtgggaagggcttcaccaggaccagctacctggtgcagcaccagaggagccacgtgggcaagaagaccctgagccagtag

SEQ ID NO: 177076 - DNA, 1173 bp, synthetic construct
  misc_feature 1..1173: note = Description of Artificial Sequence: Synthetic coding sequence
  source 1..1173: mol_type = other DNA
atggccctgctgacccagacccagggcagccagagcagccagtgccagcccatgaaggccctcttcaagcatgagagcctgggcagccagcccctgcatgacagagtgctgcaggtgcccggcctggcccagggcggctgctgccgggaggatgccatggtggccagccggctgaccccaggcagccagggcctgctgaagatggaggatgtggccctgaccctgaccccaggctggacccagctggacagcagccaggtgaacctgtacagagatgagaagcaggagaaccacagcagcctggtgtccctgggcggggagatccagaccaagagccgggacctgccccctgtgaagaagctgcctgagaaggagcacggcaagatctgccacctgcgggaggacatcgcccagatccccacccatgctgaggccggggagcaggagggccgcctgcagaggaagcagaagaatgccatcggcagcagaagacactactgccatgaatgtgggaagagctttgcccagagcagcggcctgaccaagcaccggcgcatccacactggagagaagccctatgaatgtgaggactgtgggaagaccttcatcggcagcagcgccctggtgatccaccagagggtgcacactggagagaagccctatgaatgtgaagaatgtgggaaggtgttcagccacagcagcaacctgatcaagcaccagaggacccacactggagagaagccctatgaatgtgatgactgtgggaagaccttcagccagagctgcagcctgctggagcaccacaagatccacactggagagaagccctaccagtgcaacatgtgtgggaaggccttcagaagaaacagccacctgctgcggcaccagagaattcatggagacaagaatgtgcagaaccctgagcacggggagagctgggagagccagggccgcacagagagccagtgggagaacacagaggcccctgtgtcctacaagtgcaatgaatgtgagaggagcttcaccaggaacagaagcctcatcgagcaccagaagatccacactggagagaagccctaccagtgtgacacctgtgggaagggcttcaccaggaccagctacctggtgcagcaccagaggagccacgtgggcaagaagaccctgagccagtag

SEQ ID NO: 177077 - DNA, 501 bp, synthetic construct
  misc_feature 1..501: note = Description of Artificial Sequence: Synthetic coding sequence
  source 1..501: mol_type = other DNA
cccacccacgccgaggccggggagcaggagggccgcctgcagaggaagcagaagaatgccatcggcagccgccgccactactgccatgaatgtgggaagagctttgcccagagcagcggcctgaccaagcaccggcgcatccacactggagagaagccctatgaatgtgaggactgtgggaagaccttcatcggcagcagcgccctggtgatccaccagagggtgcacactggagagaagccctatgaatgtgaggagtgtgggaaggtgttcagccacagcagcaacctgatcaagcaccagaggacccacactggagagaagccctatgaatgtgatgactgtgggaagaccttcagccagagctgcagcctgctggagcaccacaagatccacactggagagaagccctaccagtgcaacatgtgtgggaaggccttcagaagaaacagccacctgctgcggcaccagaggatccacgtggtgacagaaattgtgtag

SEQ ID NO: 177078 - DNA, 438 bp, synthetic construct
  misc_feature 1..438: note = Description of Artificial Sequence: Synthetic coding sequence
  source 1..438: mol_type = other DNA
atggagttcccagacctgggcaagcactgcagcgagaagacctgcaagcagctggacttcctgcctgtgaagtgtgatgcctgcaagcaggacttctgcaaggaccacttcccctatgctgcccacaagtgcccctttgccttccagaaggatgtgcacgtgcctgtgtgccccctgtgcaacacccccatccctgtgaagaagggccagatcccagatgtggtggtgggggaccacatcgaccgggactgtgacagccaccctgggaagaagaaggagaagatcttcacctaccgctgcagcaaggagggctgcaagaagaaggagatgctgcagatggtgtgtgcccagtgccacggcaacttctgcatccagcaccgccaccccctggaccacagctgccgccacggcagccggcccaccatcaaggccggctag

SEQ ID NO: 177079 - DNA, 543 bp, synthetic construct
  misc_feature 1..543: note = Description of Artificial Sequence: Synthetic coding sequence
  source 1..543: mol_type = other DNA
atggagttcccagacctgggcaagcactgcagcgagaagacctgcaagcagctggacttcctgcctgtgaagtgtgatgcctgcaagcaggacttctgcaaggaccacttcccctatgctgcccacaagtgcccctttgccttccagaaggatgtgcacgtgcctgtgtgccccctgtgcaacacccccatccctgtgaagaagggccagatcccagatgtggtggtgggggaccacatcgaccgggactgtgacagccaccctgggaagaagaaggagaagatcttcacctaccgctgcagcaaggagggctgcaagaagaaggagatgctgcagatggtgtgtgcccagtgccacggcaacttctgcatccagcaccgccaccccctggaccacagctgccgccacggcagccggcccaccatcaaggccggctgcagccccatgacagtgtctgagagccggcccctgggggacttcctgaccctggcccctgggggcctggcccagaggctgggctactggttcacccggctgatgtag

SEQ ID NO: 177080 - DNA, 774 bp, synthetic construct
  misc_feature 1..774: note = Description of Artificial Sequence: Synthetic coding sequence
  source 1..774: mol_type = other DNA
atggagttcccagacctgggcgcccactgcagcgagcccagctgccagaggctggacttcctgcccctgaagtgtgatgcctgcagcggcatcttctgtgccgaccacgtggcctatgcccagcaccactgcggcagcgcctaccagaaggacatccaggtgcctgtgtgccccctgtgcaatgtgcctgtgcctgtggcccggggggagcccccagacagagctgtgggggagcacatcgaccgggactgccgcagtgaccctgcccagcagaagaggaagatcttcaccaacaagtgtgaaagagctggctgccggcagcgggagatgatgaagctgacctgtgagcgctgcagcaggaacttctgcatcaagcaccgccaccccctggaccatgactgcagcggggagggccaccccaccagccgggccggcctggccgccatcagccgggcccaggccgtggccagcaccagcacagtgcccagccccagccagaccatgcccagctgcaccagccccagccgggccaccaccaggagccccagctggacagcccctcctgtgattgccctgcagaatggcctgtctgaagatgaggccctgcagagggccctggagatgagcctggccgagaccaagccccaggtgcccagctgccaggaggaggaggacctggccctggcccaggccctgagcgccagcgaggccgagtaccagaggcagcaggcccagagccgcagcagcaagcccagcaactgcagcctgtgctag

SEQ ID NO: 177081 - DNA, 531 bp, synthetic construct
  misc_feature 1..531: note = Description of Artificial Sequence: Synthetic coding sequence
  source 1..531: mol_type = other DNA
atggagttcccagacctgggcgcccactgcagcgagcccagctgccagaggctggacttcctgcccctgaagtgtgatgcctgcagcggcatcttctgtgccgaccacgtggcctatgcccagcaccactgcggcagcgcctaccagaaggacatccaggtgcctgtgtgccccctgtgcaatgtgcctgtgcctgtggcccggggggagcccccagacagagctgtgggggagcacatcgaccgggactgccgcagtgaccctgcccagcagaagaggaagatcttcaccaacaagtgtgaaagagctggctgccggcagcgggagatgatgaagctgacctgtgagcgctgcagcaggaacttctgcatcaagcaccgccaccccctggaccatgactgcagcggggagggccaccccaccagccgggccggcctggccgccatcagccgggcccaggccgtggccagcaccagcacagtgcccagccccagccagaccatgcccagctgcaccagccccagcaggtag

SEQ ID NO: 177082 - DNA, 774 bp, synthetic construct; identical to SEQ ID NO: 177080
  misc_feature 1..774: note = Description of Artificial Sequence: Synthetic coding sequence
  source 1..774: mol_type = other DNA

SEQ ID NO: 177083 - DNA, 531 bp, synthetic construct; identical to SEQ ID NO: 177081
  misc_feature 1..531: note = Description of Artificial Sequence: Synthetic coding sequence
  source 1..531: mol_type = other DNA

SEQ ID NO: 177084 - DNA, 153 bp, synthetic construct
  misc_feature 1..153: note = Description of Artificial Sequence: Synthetic coding sequence
  source 1..153: mol_type = other DNA
atggagttcccagacctgggcgcccactgcagcgagcccagctgccagaggctggacttcctgcccctgaagtgtgatgcctgcagcggcatcttctgtgccgaccacgtggcctatgcccagcaccactgcggcagcgcctaccagaagtag

SEQ ID NO: 177085 - DNA, 678 bp, synthetic construct
  misc_feature 1..678: note = Description of Artificial Sequence: Synthetic coding sequence
  source 1..678: mol_type = other DNA
atggagttcccagacctgggcgcccactgcagcgagcccagctgccagaggctggacttcctgcccctgaagtgtgatgcctgcagcggcatcttctgtgccgaccacgtggcctatgcccagcaccactgcggcagcgcctaccagaaggacatccaggtgcctgtgtgccccctgtgcaatgtgcctgtgcctgtggcccggggggagcccccagacagagctgtgggggagcacatcgaccgggactgccgcagtgaccctgcccagcagaagaggaagatcttcaccaacaagtgtgaaagagctggctgccggcagcgggagatgatgaagctgacctgtgagcgctgcagcaggaacttctgcatcaagcaccgccaccccctggaccatgactgcagcggggagggccaccccaccagccgggccggcctggccgccatcagccgggcccaggccgtggccagcaccagcacagtgcccagccccagccagaccatgcccagctgcaccagccccagccgggccaccaccaggagccccagctggacagcccctcctgtgattgccctgcagaatggcctggtgtcctgggccgaggtgggctggacagagaccaacacccagagggtgaagagcaaggatgctggcctgctgagcccctttgtggagtag

SEQ ID NO: 177086 - DNA, 684 bp, synthetic construct
  misc_feature 1..684: note = Description of Artificial Sequence: Synthetic coding sequence
  source 1..684: mol_type = other DNA
atgggagatgctggcagcgagaggagcaaggcccccagcctgcccccacgctgcccctgtggcttctggggcagcagcaagaccatgaacctgtgcagcaagtgctttgctgacttccagaagaagcagccagatgatgacagcgcccccagcaccagcaacagccagagcgacctcttcagcgaggagaccaccagtgacaacaacaacaccagcatcaccacccccaccctgagccccagccagcagcccctgcccacagagctgaatgtgaccagccccagcaaggaggagtgtggcccctgcacagacacagcccacgtgtccctcatcacccccaccaagaggagctgtggcacagacagccagagtgaaaatgaggccagccctgtgaagaggccccggctgctggagaacacagagaggtctgaggagaccagccgcagcaagcagaagagcagaagacgctgcttccagtgccagaccaagctggagctggtgcagcaggagctgggcagctgccgctgtggctacgtgttctgcatgctgcaccggctgcctgagcagcacgactgcacctttgaccacatgggccggggccgggaggaggccatcatgaagatggtgaagctggacaggaaggtgggccgcagctgccagagaattggagagggctgcagctag

SEQ ID NO: 177087 - DNA, 642 bp, synthetic construct
  misc_feature 1..642: note = Description of Artificial Sequence: Synthetic coding sequence
  source 1..642: mol_type = other DNA
atggcccaggagaccaaccagaccccaggccccatgctgtgcagcacaggctgcggcttctacggcaaccccaggaccaacggcatgtgcagcgtgtgctacaaggagcacctgcagaggcagcagaacagcggccgcatgagccccatgggcacagccagcggcagcaacagccccaccagtgacagcgcctctgtgcagagagctgacaccagcctgaacaactgtgagggcgccgccggcagcaccagcgagaagagcagaaatgtgcctgtggccgccctgcctgtgacccagcagatgacagagatgagcatcagccgggaggacaagatcaccacccccaagacagaggtgtctgagcctgtggtgacccagcccagccccagcgtgtcccagcccagcaccagccagagcgaggagaaggcccctgagctgcccaagcccaagaagaaccgctgcttcatgtgcaggaagaaggtgggcctgaccggctttgactgccgctgtggcaacctcttctgtggcctgcaccgctacagcgacaagcacaactgcccctatgactacaaggccgaggccgccgccaagatcagaaaagaaaatcctgtggtggtggccgagaagatccagaggatctag

SEQ ID NO: 177088 - DNA, 642 bp, synthetic construct; identical to SEQ ID NO: 177087
  misc_feature 1..642: note = Description of Artificial Sequence: Synthetic coding sequence
  source 1..642: mol_type = other DNA

SEQ ID NO: 177089 - DNA, 636 bp, synthetic construct
  misc_feature 1..636: note = Description of Artificial Sequence: Synthetic coding sequence
  source 1..636: mol_type = other DNA
atggccaagccagagcaggccgcagatggaggagtgcggggccgcggggcccggcccccagcccaggaggcccagaggagaagaagacaccctgtggtggtggcccgggacctggcccctggggtgcccggcagcctgcacagcacccagaagaacatggcccaggagaccaaccagaccccaggccccatgctgtgcagcacaggctgcggcttctacggcaaccccaggaccaacggcatgtgcagcgtgtgctacaaggagcacctgcagaggcagcagaacagcggccgcatgagccccatgggcacagccagcggcagcaacagccccaccagtgacagcgcctctgtgcagagagctgacaccagcctgaacaactgtgagggcgccgccggcagcaccagcgagaagagcagaaatgtgcctgtggccgccctgcctgtgacccagcagatgacagagatgagcatcagccgggaggacaagatcaccacccccaagacagaggtgtctgagcctgtggtgacccagcccagccccagcgtgtcccagcccagcaccagccagagcgaggagaaggcccctgagctgcccaagcccaagaagaaccgctgcttcatgtgcaggaagtag

SEQ ID NO: 177090 - DNA, 642 bp, synthetic construct; identical to SEQ ID NO: 177087
  misc_feature 1..642: note = Description of Artificial Sequence: Synthetic coding sequence
  source 1..642: mol_type = other DNA

SEQ ID NO: 177091 - DNA, 642 bp, synthetic construct; identical to SEQ ID NO: 177087
  misc_feature 1..642: note = Description of Artificial Sequence: Synthetic coding sequence
  source 1..642: mol_type = other DNA

SEQ ID NO: 177092 - DNA, 627 bp, synthetic construct
  misc_feature 1..627: note = Description of Artificial Sequence: Synthetic coding sequence
  source 1..627: mol_type = other DNA
atggcccaggagaccaaccacagccaggtgcccatgctgtgcagcacaggctgcggcttctacggcaaccccaggaccaacggcatgtgcagcgtgtgctacaaggagcacctgcagaggcagaacagcagcaatggccgcatcagccccccagccacctctgtgagcagcctgtctgagagcctgcctgtgcagtgcacagatggctctgtgcctgaggcccagagcgccctggacagcaccagcagctccatgcagcccagccctgtgagcaaccagagcctgctgtctgagagcgtggccagcagccagctggacagcacctctgtggacaaggctgtgcctgagacagaagatgtgcaggcctctgtgtctgacacagcccagcagcccagcgaggagcagagcaagagcctggagaagcccaagcagaagaagaaccgctgcttcatgtgcaggaagaaggtgggcctgactggatttgagtgccgctgtggaaatgtgtactgcggcgtgcaccgctacagtgatgtgcacaactgcagctacaactacaaggcagatgctgctgagaagatcaggaaggagaaccctgtggtggtgggggagaagatccagaagatctag

SEQ ID NO: 177093 - DNA, 627 bp, synthetic construct; identical to SEQ ID NO: 177092
  misc_feature 1..627: note = Description of Artificial Sequence: Synthetic coding sequence
  source 1..627: mol_type = other DNA

SEQ ID NO: 177094 - DNA, 591 bp, synthetic construct
  misc_feature 1..591: note = Description of Artificial Sequence: Synthetic coding sequence
  source 1..591: mol_type = other DNA
atggcccaggagaccaaccacagccaggtgcccatgctgtgcagcacaggctgcggcttctacggcaaccccaggaccaacggcatgtgcagcgtgtgctacaaggagcacctgcagaggcagaacagcagcaatggccgcatcagcccccctgtgcagtgcacagatggctctgtgcctgaggcccagagcgccctggacagcaccagcagctccatgcagcccagccctgtgagcaaccagagcctgctgtctgagagcgtggccagcagccagctggacagcacctctgtggacaaggctgtgcctgagacagaagatgtgcaggcctctgtgtctgacacagcccagcagcccagcgaggagcagagcaagagcctggagaagcccaagcagaagaagaaccgctgcttcatgtgcaggaagaaggtgggcctgactggatttgagtgccgctgtggaaatgtgtactgcggcgtgcaccgctacagtgatgtgcacaactgcagctacaactacaaggcagatgctgctgagaagatcaggaaggagaaccctgtggtggtgggggagaagatccagaagatctag

SEQ ID NO: 177095 - DNA, 627 bp, synthetic construct; identical to SEQ ID NO: 177092
  misc_feature 1..627: note = Description of Artificial Sequence: Synthetic coding sequence
  source 1..627: mol_type = other DNA

SEQ ID NO: 177096 - DNA, 627 bp, synthetic construct; identical to SEQ ID NO: 177092
  misc_feature 1..627: note = Description of Artificial Sequence: Synthetic coding sequence
  source 1..627: mol_type = other DNA

SEQ ID NO: 177097 - DNA, 627 bp, synthetic construct; identical to SEQ ID NO: 177092
  misc_feature 1..627: note = Description of Artificial Sequence: Synthetic coding sequence
  source 1..627: mol_type = other DNA

SEQ ID NO: 177098 - DNA, 2085 bp, synthetic construct
  misc_feature 1..2085: note = Description of Artificial Sequence: Synthetic coding sequence
  source 1..2085: mol_type = other DNA
atggagaacaagagcctggagagcagccagacagacctgaagctggtggcccacccccgggccaagagcaaggtgtggaagtactttggatttgacaccaatgctgagggctgcatcctgcagtggaagaagatctactgccgcatctgcatggcccagatcgcctacagcggcaacaccagcaacctgagctaccacctggagaagaaccaccctgaggagttctgtgaatttgtgaagagcaacacagagcagatgagggaggcctttgccacagccttcagcaagctgaagccagagagcagccagcagcccggccaggatgccctggccgtgaaggccggccacggctatgacagcaagaagcagcaggagctgacagctgctgtgctgggcctcatctgtgagggcctgtacccagccagcatcgtggatgagcccaccttcaaggtgctgctgaagacagctgaccccaggtatgagctgcccagcaggaagtacatcagcaccaaggccatccctgagaagtatggagctgtgcgggaggtgatcctgaaggagctggccgaggccacctggtgtggcatcagcacagacatgtggaggtctgagaaccagaacagagcctacgtgaccctggccgcccacttcctgggcctgggcgcccccaactgcctgtccatgggcagccgctgcctgaagacctttgaggtgcctgaagaaaatacagctgagaccatcaccagggtgctgtatgaggtgttcatcgagtggggcatcagcgccaaggtgtttggagccaccaccaactacggcaaggacatcgtgaaggcctgcagcctgctggatgtggccgtgcacatgccctgcctgggccacaccttcaatgccggcatccagcaggccttccagctgcccaagctgggcgccctgctgagccgctgcaggaagctggtggagtacttccagcagagcgctgtggccatgtacatgctgtatgagaagcagaagcagcagaatgtggcccactgcatgctggtgagcaacagagtgtcctggtggggcagcaccctggccatgctgcagaggctgaaggagcagcagtttgtgattgctggggtgctggtggaggacagcaacaaccaccacctgatgctggaggccagcgagtgggccaccatcgagggcctggtggagctgctgcagcccttcaagcaggtggccgagatgctgagcgccagccgctaccccaccatctccatggtgaagcccctgctgcacatgctgctgaacaccaccctgaacatcaaggagacagacagcaaggagctgtccatggccaaggaggtgattgccaaggagctgagcaagacctaccaggagaccccagaaattgacatgttcctgaatgtggccaccttcctggacccccgctacaagaggctgcccttcctgagcgcctttgagcggcagcaggtggagaacagagtggtggaggaggccaagggcctgctggacaaggtgaaggatggcggctacagacctgctgaggacaagatcttccctgtgcctgaggagccccctgtgaagaagctgatgaggaccagcaccccacctccagccagcgtcatcaacaacatgctggccgagatcttctgccagacaggaggagtggaggaccaggaggagtggcacgcccaggtggtggaggagctgagcaacttcaagagccagaaggtgctgggcctgaatgaagaccccctgaagtggtggagcgaccggctggccctcttccccctgctgcccaaggtgctgcagaagtactggtgtgtgacagccaccagggtggcccctgagcggctgtttggcagcgctgccaacgtggtgtctgccaagaggaaccggctggccccagcccacgtggatgagcaggtgttcctgtatgaaaatgcccggtctggagctgaggccgagcctgaggaccaggatgaaggagagtggggcctggaccaggagcaggtgttcagcctgggagatggagtgtctgggggcttcttcggcatccgggacagcagcttcctgtag

SEQ ID NO: 177099 - DNA, 2085 bp, synthetic construct; identical to SEQ ID NO: 177098
  misc_feature 1..2085: note = Description of Artificial Sequence: Synthetic coding sequence
  source 1..2085: mol_type = other DNA

SEQ ID NO: 177100 - DNA, 2085 bp, synthetic construct; identical to SEQ ID NO: 177098
  misc_feature 1..2085: note = Description of Artificial Sequence: Synthetic coding sequence
  source 1..2085: mol_type = other DNA

SEQ ID NO: 177101 - DNA, 819 bp, synthetic construct
  misc_feature 1..819: note = Description of Artificial Sequence: Synthetic coding sequence
  source 1..819: mol_type = other DNA
atggagaacaagagcctggagagcagccagacagacctgaagctggtggcccacccccgggccaagagcaaggtgtggaagtactttggatttgacaccaatgctgagggctgcatcctgcagtggaagaagatctactgccgcatctgcatggcccagatcgcctacagcggcaacaccagcaacctgagctaccacctggagaagaaccaccctgaggagttctgtgaatttgtgaagagcaacacagagcagatgagggaggcctttgccacagccttcagcaagctgaagccagagagcagccagcagcccggccaggatgccctggccgtgaaggccggccacggctatgacagcaagaagcagcaggagctgacagctgctgtgctgggcctcatctgtgagggcctgtacccagccagcatcgtggatgagcccaccttcaaggtgctgctgaagacagctgaccccaggtatgagctgcccagcaggaagtacatcagcaccaaggccatccctgagaagtatggagctgtgcgggaggtgatcctgaaggagctggccgaggccacctggtgtggcatcagcacagacatgtggaggtctgagaaccagaacagagcctacgtgaccctggccgcccacttcctgggcctgggcgcccccaactgcctgtccatgggcagccgctgcctgaagacctttgaggtgcctgaagaaaatacagctgagaccatcaccagggtgctgtatgaggtgttcatcgagtggggcatcagcgccaaggtgtttggagccaccaccaactatggatag

SEQ ID NO: 177102 - DNA, 3177 bp, synthetic construct
  misc_feature 1..3177: note = Description of Artificial Sequence: Synthetic coding sequence
  source 1..3177: mol_type = other DNA
atgaggaggaagggccgctgccaccggggcagcgctgcccggcaccccagcagcccctgcagcgtgaagcacagccccacccgggagaccctgacctacgcccaggcccagaggatggtggagattgaaattgagggccgcctgcaccgcatcagcatctttgaccccctggagatcatcctggaggatgacctgacagcccaggagatgtctgagtgcaacagcaacaaggagaacagcgagaggcctcctgtgtgcctgcggaccaagaggcacaagaacaacagagtgaagaagaagaatgaggccctgcccagcgcccacggcaccccagccagcgccagcgccctgcctgagcccaaggtgcgcatcgtggagtacagccccccatctgccccccggcggccccctgtgtactacaagttcatcgagaagtctgctgaggagctggacaatgaggtggagtatgacatggatgaagaagattatgcctggctggagatcgtgaatgagaagaggaagggggactgtgtgcctgctgtgtcccagagcatgtttgagttcctgatggacagatttgagaaggagagccactgtgagaaccagaagcagggcgagcagcagagcctgattgatgaagatgctgtgtgctgcatctgcatggatggagagtgccagaacagcaatgtcatcctcttctgtgacatgtgcaacctggccgtgcaccaggagtgctacggcgtgccctacatccctgagggccagtggctgtgccgccactgcctgcagagccgggcccggcctgctgactgtgtgctgtgccccaacaagggcggggccttcaagaagacagatgatgaccgctggggccacgtggtgtgtgccctgtggatccctgaggtgggctttgccaacacagtgttcatcgagcccattgatggagtgaggaacatccccccagcccgctggaagctgacctgctacctgtgcaagcagaagggcgtgggcgcctgcatccagtgccacaaggccaactgctacacagccttccacgtgacctgtgcccagaaggccggcctgtacatgaagatggagcctgtgaaggagctgactggaggcggcaccaccttctctgtgaggaagacagcctactgtgatgtgcacaccccacctggctgcacccggcggcccctgaacatctatggagatgtggagatgaagaatggagtgtgcaggaaggagagctctgtgaagacagtgcgcagcaccagcaaggtgaggaagaaggccaagaaggccaagaaggccctggccgagccctgtgctgtgctgcccaccgtgtgtgccccctacatccccccccagaggctgaaccgcatcgccaaccaggtggccatccagaggaagaagcagtttgtggagcgggcccacagctactggctgctgaagaggctgagcagaaatggagcccccctgctgcggcggctgcagagcagcctgcagagccagaggagcagccagcagcgggagaatgatgaggagatgaaggccgccaaggagaagctgaagtactggcagaggctgcggcatgacctggagcgggcccggctgctgattgagctgctgaggaagcgggagaagctgaagcgggagcaggtgaaggtggagcaggtggccatggagctgcggctgacccccctgactgtgctgctgcggtctgtgctggaccagctgcaggacaaggaccctgcccgcatctttgcccagcctgtgtccctgaaggaggtgcctgactacctggaccacatcaagcaccccatggactttgccaccatgaggaagaggctggaggcccagggctacaagaacctgcatgaatttgaagaagattttgacctgatcatcgacaactgcatgaagtacaatgcccgggacaccgtcttctacagagctgctgtgcggctgcgggaccagggcggcgtggtgctgcggcaggcccggcgggaggtggacagcatcggcctggaggaggccagcggcatgcacctgcctgagaggcctgctgctgccccccggcggcccttctcctgggaggatgtggaccggctgctggaccctgccaacagagcccacctgggcctggaggagcagctgcgggagctgctggacatgctggacctgacctgtgccatgaagagcagcggcagccgcagcaagagggccaagctgctgaagaaggagatcgccctgctgaggaacaagctgagccagcagcacagccagcccctgcccactggacctggcctggagggctttgaggaggatggagctgccctgggccctgaggccggggaggaggtgctgccccggctggagaccctgctgcagcccaggaagaggagccgcagcacctgtggggacagcgaggtggaggaggagagccctgggaagaggctggatgctggcctgaccaatggatttggaggagcccggtctgagcaggagcccggcggcggcctgggcaggaaggccaccccaagaagaagatgtgccagcgagagcagcatcagcagcagcaacagccccctgtgtgacagcagcttcaatgcccccaagtgtggccggggcaagccagccctggtgcggcggcacaccctggaggacagaagtgagctgatcagctgcattgaaaatggaaattatgccaaggccgccagaattgctgctgaggtgggccagagctccatgtggatcagcacagatgctgctgcctctgtgctggagcccctgaaggtggtgtgggccaagtgcagcggctaccccagctacccagccctgatcatcgaccccaagatgccccgggtgcccggccaccacaacggggtgaccatcccagccccacccctggatgtgctgaagatcggggagcacatgcagaccaagagtgatgagaagctgttcctggtgctcttctttgacaacaagaggtcctggcagtggctgcccaagagcaagatggtgcccctgggcattgatgagaccatcgacaagctgaagatgatggagggcaggaacagcagcatcaggaaggctgtgcgcatcgcctttgaccgggccatgaaccacctgagccgggtgcatggagagcccaccagtgacctgagtgacattgattag

SEQ ID NO: 177103 - DNA, 2940 bp, synthetic construct
  misc_feature 1..2940: note = Description of Artificial Sequence: Synthetic coding sequence
  source 1..2940: mol_type = other DNA
atgtctgtgtgcaccctgtctgtgcctgtgagcagcctgagccctggaagacgctgcaacaccttcagtgacagcggcatcctgggctgtgtgcccatcaacagcaacacagatgaggaggatgtggtggaggagaagatggtggccgagggcgtgaacaaggaggccaagcagcctgccaagaagaagaggaagaagggcctgcgcatcaagggcaagagaagaaggaagaagctgatcctggccaagaagttcagcaaggacctgggcagcggccggcctgtggctgatgccccagccctgctggccagcaatgaccctgagcaggatgaggagagcctgtttgagagcaacatcgagaagcagatctacctgcccagcacccgggccaagaccagcatcgtgtggcacttcttccacgtggacccccagtacacctggagggccatctgcaacctgtgtgagaagtctgtgtcccggggcaagccaggcagccacctgggcaccagcaccctgcagaggcacctgcaggcccggcacagcccccactggacccgggccaacaagtttggagtggccagcggggaggaggacttcaccctggatgtgtccctgagccccagcagcggcagcaatggcagctttgagtacatccccacagaccccctggatgacaacaggatgggcaagaagcatgacaagagcgccagtgatgccctgcgggcagagcggggccgcttcctgatcaagagcaacatcgtgaagcacgccctgatccctggcacccgggccaagaccagcgctgtgtggaacttcttctacacagacccccagcacatcagcagagctgtgtgcaacatctgcaagaggtctgtgtcccggggccggcccggcagccacctgggcaccagcaccctgcagaggcacctgcaggccacccaccccatccactgggccgtggccaacaaggacagcggggctgtggccaacggcctggatgaagctgagacagagaggagtgacctgctgagtgacaccctgcacggggagaagagcacaggcagccaggacctgacagctgaggacctgagtgacagcgacagtgatgagcccatgctggaggtggagaacagaagtgagagccccatccctgtggccgagcagggcaccctgatgagggcccaggagcgggagaccacctgctgcggcaaccctgtgagcagccacatcagccaggccatcatccagatgattgtggaggacatgcacccctacaactacttcagcaccccagccttccagcgcttcatgcagatcgtggccccagactaccgcctgcccagcgagacctacttcttcaccaaggctgtgccccagctgtatgactgtgtgcgggagaagatcttcctgaccctggagaatgtgcagagccagaagatccacctgactgtggacatctggacccatgaccccagcacagactacttcatcgtgacagtgcactgggtgtccctggagacagccagcttcctgaacaacggccgcatcccagacttcaggaagtgggccgtgctgtgtgtgacaggcctggccaaggactgcctgatcaccaacatcctgcaggagctgaatgaccagatcggcctgtggctgagccccaacttcctgatccccagcttcatcgtgtctgacaacagcagcaatgtggtgcacgccatcaaggatggcggcttcacccacgtgccctgcttcctgcactgcctgaacatggtgatccaggacttcttctgtgagcacaagagcattgagaacatgctggtggccgccaggaagacctgccaccacttcagccacagcgtgaaggcccggcagatcctgcaggagttccagaatgaccaccagctgccctggaagaacctgaagcaggatgaaacaggccactggatcagcaccttctacatgctgaagtggctgctggagcactgctacagcgtgcaccacagcctgggccgggccagcggcgtggtgctgaccagcctgcagtggaccctgatgacctacgtgtgtgacatcctgaagccctttgaggaggccacccagaaggtgtctgtgaagacagctggcctgaaccaggtgctgcccctcatccaccacctgctgctgagcctgcagaagctgcgggaggacttccaggtgcggggcatcacccaggccctgaacctggtggacagcctgagcctgaagctggagacagacaccctgctgagcgccatgctgaagagcaagccctgcatcctggccaccctgctggacccctgcttcaagaacagcctggaggacttcttcccccagggcgctgacctggagacctacaagcagttcctggccgaggaggtgtgcaactacatggagagcagccctgagatctgccagatccccaccagcgaggccagctgccccagcgtgacagtgggcgctgacagcttcaccagcagcctgaaggagggcaccagcagcagcggctctgtggacagcagcgctgtggacaacgtggccctgggcagcaagagcttcatgttccccagcgctgtggccgtggtggatgagtacttcaaggagaagtacagcgagttctctggaggagatgaccccctcatctactggcagaggaagatcagcatctggccagccctgacccaggtggccatccagtacctgagctgccccatgtgctcctggcagagcgagtgcatcttcaccaagaacagccacttccaccccaagcagatcatgagcctggactttgacaacatcgagcagctgatgttcctgaagatgaacctgaagaatgtgaactatgactacagcaccctggtgctgtcctgggaccctgagcagaatgaggtggtgcagagcagcgagaaggagatcctgccctag

SEQ ID NO: 177104 - DNA, 4938 bp, synthetic construct
  misc_feature 1..4938: note = Description of Artificial Sequence: Synthetic coding sequence
  source 1..4938: mol_type = other DNA
atggaggagagcaagaccctgaagtctgagaaccacgagcccaagaagaatgtcatctgtgaggagagcaaggctgtgcaggtgattggcaaccagaccctgaaggccagaaatgacaagtctgtgaaggagattgagaacagcagccccaacagaaacagcagcaagaagaacaagcagaatgacatctgcatcgagaagacagaggtgaagagctgcaaggtgaatgctgccaacctgcccggccccaaggacctgggcctggtgctgcgggaccagagccactgcaaggccaagaagttccccaacagccctgtgaaggccgagaaggccaccatcagccaggccaagtctgagaaggccaccagcctgcaggccaaggccgagaagagccccaagagccccaacagcgtgaaggccgagaaggccagcagctaccagatgaagtctgagaaggtgcccagcagccctgctgaggccgagaagggccccagcctgctgctgaaggacatgaggcagaagacagagctgcagcagatcggcaagaagatccccagcagcttcacctctgtggacaaggtgaacatcgaggccgtgggcggggagaagtgtgccctgcagaacagccccaggagccagaagcagcagacctgcacagacaacacaggagacagtgatgacagcgccagcggcattgaagatgtgtctgatgacctgagcaagatgaagaatgatgagagcaacaaggagaacagcagcgagatggactacctggagaatgccaccgtgattgatgaaagtgccctgaccccagagcagaggctgggcctgaagcaggccgaggagcggctggagcgggaccacatcttccggctggagaagaggagccctgagtacaccaactgccgctacctgtgcaagctgtgcctgatccacatcgagaacatccagggcgcccacaagcacatcaaggagaagaggcacaagaagaacatcctggagaagcaggaggagagcgagctgcggagcctgcccccacccagccctgcccacctggccgccctgtctgtggccgtcatcgagctggccaaggagcacggcatcacagatgatgacctgcgggtgcggcaggagatcgtggaggagatgagcaaggtgatcaccaccttcctgcctgaatgttccctgcggctgtatggcagcagcctgaccaggtttgccctgaagagcagtgatgtgaacatcgacatcaagttcccccccaagatgaaccacccagacctgctgatcaaggtgctgggcatcctgaagaagaatgtgctgtatgtggatgtggagagtgacttccacgccaaggtgcctgtggtggtgtgccgggacaggaagagcggcctgctgtgccgggtgtctgctggaaatgacatggcctgcctgaccacagacctgctgacagccctgggcaagattgagcctgtgttcatccccctggtgctggccttccgctactgggccaagctgtgctacatcgacagccagacagatggcggcatccccagctactgctttgccctgatggtgatgttcttcctgcagcagaggaagccacccctgctgccctgcctgctgggctcctggattgagggctttgaccccaagaggatggatgacttccagctgaagggcatcgtggaggagaagtttgtgaagtgggagtgcaacagcagcagcgccacagagaagaacagcattgctgaggagaacaaggccaaggctgaccagcccaaggatgacaccaagaagacagaaacagacaaccagagcaatgccatgaaggagaagcacggcaagagccccctggccctggagacccccaacagagtgtccctgggccagctgtggctggagctgctgaagttctacaccctggactttgccctggaggagtatgtgatctgtgtgcgcatccaggacatcctgacccgggagaacaagaactggcccaagagaagaattgccatcgaggaccccttctctgtgaagagaaatgtggcccggagcctgaacagccagctggtgtatgaatatgtggtggagcgcttccgggccgcctaccgctactttgcctgcccccagaccaagggcggcaacaagagcacagtggacttcaagaagcgggagaagggcaagatcagcaacaagaagcctgtgaagagcaacaacatggccaccaacggctgcatcctgctgggggagaccacagagaagatcaatgctgagcgggagcagcctgtgcagtgtgatgagatggactgcaccagccagcgctgcatcatcgacaacaacaacctgctggtgaatgagctggactttgctgaccacggccaggacagcagcagcctgagcaccagcaagagcagcgagattgagcccaagctggacaagaagcaggatgacctggcccccagcgagacctgcctgaagaaggagctgagccagtgcaactgcatcgacctgagcaagagcccagaccctgacaagagcactggaacagactgccgcagcaacctggagacagagagcagccaccagagcgtgtgcacagacaccagcgccaccagctgcaactgcaaggccacagaagatgccagtgacctgaatgatgatgacaacctgcccacccaggagctgtactacgtgtttgacaagttcatcctgaccagcggcaagccacccaccatcgtgtgcagcatctgcaagaaggatggccacagcaagaatgactgcccagaggacttcaggaagattgacctgaagcccctgccccccatgaccaaccgcttccgggagatcctggacctggtgtgcaagcgctgctttgatgagctgagccccccctgcagcgagcagcacaaccgggagcagatcctgattggcctggagaagttcatccagaaggagtatgatgagaaggcccggctgtgcctgtttggcagcagcaagaatggatttggcttccgggacagcgacctggacatctgcatgaccctggagggccatgaaaatgctgagaagctgaactgcaaggagatcatcgagaacctggccaagatcctgaagaggcaccctggcctgaggaacatcctgcccatcaccacagccaaggtgcccatcgtgaagtttgagcacagaagaagtggcctggagggggacatcagcctgtacaacaccctggcccagcacaacaccaggatgctggccacctatgctgccatcgacccccgggtgcagtacctgggctacaccatgaaggtgtttgccaagagatgtgacattggagatgccagccggggcagcctgagcagctatgcctacatcctgatggtgctgtacttcctgcagcagaggaagccccctgtgattcctgtgctgcaggagatctttgatggcaagcagatcccccagaggatggtggatggctggaatgccttcttctttgacaagacagaggagctgaagaagaggctgcccagcctgggcaagaacacagagagcctgggggagctgtggctgggcctgctgcgcttctacacagaggagtttgacttcaaggagtatgtgatcagcatccggcagaagaagctgctgaccacctttgagaagcagtggaccagcaaatgtattgccatcgaggacccctttgacctgaaccacaacctgggcgccggcgtgtccaggaagatgaccaacttcatcatgaaggccttcatcaatggaaggaagctgtttggcacccccttctaccccctcatcggccgggaggccgagtacttctttgacagccgggtgctgacagatggagagctggccccaaatgaccgctgctgccgggtgtgtgggaagattggccactacatgaaggactgccccaagaggaagagcagcctgctcttccggctgaagaagaaggacagcgaggaggagaaggagggcaatgaggaggagaaggacagcagagatgtgctggacccccgggacctgcatgacacccgggacttccgggacccccgggacctgcgctgcttcatctgtggagatgctggccacgtgcggcgggagtgcccagaggtgaagctggcccggcagaggaacagctctgtggccgccgcccagctggtgaggaacctggtgaatgcccagcaggtggccggcagcgcccagcagcagggcgaccagagcatccgcacccggcagagcagcgagtgcagcgagagccccagctacagcccccagccccagcccttcccccagaacagcagccagagcgctgccatcacccagcccagcagccagcccggcagccagcccaagctgggccccccccagcagggcgcccagcccccccaccaggtgcagatgcccctgtacaacttcccccagagccccccagcccagtacagccccatgcacaacatgggcctgctgcccatgcaccccctgcagatcccagcccccagctggcccatccacggccctgtgatccacagcgcccctggcagcgcccccagcaacatcggcctgaatgaccccagcatcatctttgcccagcctgctgcccggcctgtggccatccccaacaccagccatgatggccactggcccaggacagtggcccccaacagcctggtgaacagcggggctgtgggcaacagcgagcccggcttccggggcctgaccccacccatcccctgggagcacgccccccggccccacttccccctggtgcctgcctcctggccctacggcctgcaccagaacttcatgcaccagggcaatgcccgcttccagcccaacaagcccttctacacccaggacagatgtgccacccggcgctgccgggagcgctgcccccaccccccaagaggaaatgtgtctgagtag

SEQ ID NO: 177105 - DNA, 4935 bp, synthetic construct
  misc_feature 1..4935: note = Description of Artificial Sequence: Synthetic coding sequence
  source 1..4935: mol_type = other DNA
atggaggagagcaagaccctgaagtctgagaaccacgagcccaagaagaatgtcatctgtgaggagagcaaggctgtgcaggtgattggcaaccagaccctgaaggccagaaatgacaagtctgtgaaggagattgagaacagcagccccaacagaaacagcagcaagaagaacaagcagaatgacatctgcatcgagaagacagaggtgaagagctgcaaggtgaatgctgccaacctgcccggccccaaggacctgggcctggtgctgcgggaccagagccactgcaaggccaagaagttccccaacagccctgtgaaggccgagaaggccaccatcagccaggccaagtctgagaaggccaccagcctgcaggccaaggccgagaagagccccaagagccccaacagcgtgaaggccgagaaggccagcagctaccagatgaagtctgagaaggtgcccagcagccctgctgaggccgagaagggccccagcctgctgctgaaggacatgaggcagaagacagagctgcagcagatcggcaagaagatccccagcagcttcacctctgtggacaaggtgaacatcgaggccgtgggcggggagaagtgtgccctgcagaacagccccaggagccagaagcagcagacctgcacagacaacacaggagacagtgatgacagcgccagcggcattgaagatgtgtctgatgacctgagcaagatgaagaatgatgagagcaacaaggagaacagcagcgagatggactacctggagaatgccaccgtgattgatgaaagtgccctgaccccagagcagaggctgggcctgaagcaggccgaggagcggctggagcgggaccacatcttccggctggagaagaggagccctgagtacaccaactgccgctacctgtgcaagctgtgcctgatccacatcgagaacatccagggcgcccacaagcacatcaaggagaagaggcacaagaagaacatcctggagaagcaggaggagagcgagctgcggagcctgcccccacccagccctgcccacctggccgccctgtctgtggccgtcatcgagctggccaaggagcacggcatcacagatgatgacctgcgggtgcggcaggagatcgtggaggagatgagcaaggtgatcaccaccttcctgcctgaatgttccctgcggctgtatggcagcagcctgaccaggtttgccctgaagagcagtgatgtgaacatcgacatcaagttcccccccaagatgaaccacccagacctgctgatcaaggtgctgggcatcctgaagaagaatgtgctgtatgtggatgtggagagtgacttccacgccaaggtgcctgtggtggtgtgccgggacaggaagagcggcctgctgtgccgggtgtctgctggaaatgacatggcctgcctgaccacagacctgctgacagccctgggcaagattgagcctgtgttcatccccctggtgctggccttccgctactgggccaagctgtgctacatcgacagccagacagatggcggcatccccagctactgctttgccctgatggtgatgttcttcctgcagcagaggaagccacccctgctgccctgcctgctgggctcctggattgagggctttgaccccaagaggatggatgacttccagctgaagggcatcgtggaggagaagtttgtgaagtgggagtgcaacagcagcagcgccacagagaagaacagcattgctgaggagaacaaggccaaggctgaccagcccaaggatgacaccaagaagacagaaacagacaaccagagcaatgccatgaaggagaagcacggcaagagccccctggccctggagacccccaacagagtgtccctgggccagctgtggctggagctgctgaagttctacaccctggactttgccctggaggagtatgtgatctgtgtgcgcatccaggacatcctgacccgggagaacaagaactggcccaagagaagaattgccatcgaggaccccttctctgtgaagagaaatgtggcccggagcctgaacagccagctggtgtatgaatatgtggtggagcgcttccgggccgcctaccgctactttgcctgcccccagaccaagggcggcaacaagagcacagtggacttcaagaagcgggagaagggcaagatcagcaacaagaagcctgtgaagagcaacaacatggccaccaacggctgcatcctgctgggggagaccacagagaagatcaatgctgagcgggagcagcctgtgcagtgtgatgagatggactgcaccagccagcgctgcatcatcgacaacaacaacctgctggtgaatgagctggactttgctgaccacggccaggacagcagcagcctgagcaccagcaagagcagcgagattgagcccaagctggacaagaagcaggatgacctggcccccagcgagacctgcctgaagaaggagctgagccagtgcaactgcatcgacctgagcaagagcccagaccctgacaagagcactggaacagactgccgcagcaacctggagacagagagcagccaccagagcgtgtgcacagacaccagcgccaccagctgcaactgcaaggccacagaagatgccagtgacctgaatgatgatgacaacctgcccacccaggagctgtactacgtgtttgacaagttcatcctgaccagcggcaagccacccaccatcgtgtgcagcatctgcaagaaggatggccacagcaagaatgactgcccagaggacttcaggaagattgacctgaagcccctgccccccatgaccaaccgcttccgggagatcctggacctggtgtgcaagcgctgctttgatgagctgagccccccctgcagcgagcagcacaaccgggagcagatcctgattggcctggagaagttcatccagaaggagtatgatgagaaggcccggctgtgcctgtttggcagcagcaagaatggatttggcttccgggacagcgacctggacatctgcatgaccctggagggccatgaaaatgctgagaagctgaactgcaaggagatcatcgagaacctggccaagatcctgaagaggcaccctggcctgaggaacatcctgcccatcaccacagccaaggtgcccatcgtgaagtttgagcacagaagaagtggcctggagggggacatcagcctgtacaacaccctggcccagcacaacaccaggatgctggccacctatgctgccatcgacccccgggtgcagtacctgggctacaccatgaaggtgtttgccaagagatgtgacattggagatgccagccggggcagcctgagcagctatgcctacatcctgatggtgctgtacttcctgcagcagaggaagccccctgtgattcctgtgctgcaggagatctttgatggcaagcagatcccccagaggatggtggatggctggaatgccttcttctttgacaagacagaggagctgaagaagaggctgcccagcctgggcaagaacacagagagcctgggggagctgtggctgggcctgctgcgcttctacacagaggagtttgacttcaaggagtatgtgatcagcatccggcagaagaagctgctgaccacctttgagaagcagtggaccagcaaatgtattgccatcgaggacccctttgacctgaaccacaacctgggcgccggcgtgtccaggaagatgaccaacttcatcatgaaggccttcatcaatggaaggaagctgtttggcacccccttctaccccctcatcggccgggaggccgagtacttctttgacagccgggtgctgacagatggagagctggccccaaatgaccgctgctgccgggtgtgtgggaagattggccactacatgaaggactgccccaagaggaagagcctgctcttccggctgaagaagaaggacagcgaggaggagaaggagggcaatgaggaggagaaggacagcagagatgtgctggacccccgggacctgcatgacacccgggacttccgggacccccgggacctgcgctgcttcatctgtggagatgctggccacgtgagaagagaatgtcctgaggtgaagctggcccggcagaggaacagctctgtggccgccgcccagctggtgaggaacctggtgaatgcccagcaggtggccggcagcgcccagcagcagggcgaccagagcatccgcacccggcagagcagtgaatgttctgagagccccagctacagcccccagccccagcccttcccccagaacagcagccagagcgctgccatcacccagcccagcagccagcccggcagccagcccaagctgggccccccccagcagggcgcccagcccccccaccaggtgcagatgcccctgtacaacttcccccagagccccccagcccagtacagccccatgcacaacatgggcctgctgcccatgcaccccctgcagatcccagcccccagctggcccatccacggccctgtgatccacagcgcccctggcagcgcccccagcaacatcggcctgaatgaccccagcatcatctttgcccagcctgctgcccggcctgtggccatccccaacaccagccatgatggccactggcccaggacagtggcccccaacagcctggtgaacagcggggctgtgggcaacagcgagcccggcttccggggcctgaccccacccatcccctgggagcacgccccccggccccacttccccctggtgcctgcctcctggccctacggcctgcaccagaacttcatgcaccagggcaatgcccgcttccagcccaacaagcccttctacacccaggacagatgtgccacccggcgctgccgggagcgctgcccccaccccccaagaggaaatgtgtctgagtag

SEQ ID NO: 177106 - DNA, 264 bp, synthetic construct
  misc_feature 1..264: note = Description of Artificial Sequence: Synthetic coding sequence
  source 1..264: mol_type = other DNA
atggaggagagcaagaccctgaagtctgagaaccacgagcccaagaagaatgtcatctgtgaggagagcaaggctgtgcaggtgattggcaaccagaccctgaaggccagaaatgacaagtctgtgaaggagattgagaacagcagccccaacagaaacagcagcaagaagaacaagcagaatgacatctgcatcgagaagacagaggtgaagagctgcaaggtgaatgctgccaacctgcccggccccaaggacctgggctag

SEQ ID NO: 177107 - DNA, 234 bp, synthetic construct
  misc_feature 1..234: note = Description of Artificial Sequence: Synthetic coding sequence
  source 1..234: mol_type = other DNA
atggaggagagcaagaccctgaagtctgagaaccacgagcccaagaagaatgtcatctgtgaggagagcaaggctgtgcaggtgattggcaaccagaccctgaaggccagaaatgacaagtctgtgaaggagattgagaacagcagccccaacagaaacagcagcaagaagaacaagcagaatgacatctgcatcgagaagacagaggtgaagagctgcaaggtgaatgcctag

SEQ ID NO: 177108 - DNA, 1209 bp, synthetic construct
  misc_feature 1..1209: note = Description of Artificial Sequence: Synthetic coding sequence
  source 1..1209: mol_type = other DNA
atggccagcatcatcgcccgggtgggcaacagccggcggctgaatgcccccctgcccccctgggcccacagcatgctgcggagcctgggccgcagcctgggccccatcatggcctccatggctgacaggaacatgaagctgttcagcggccgggtggtgcctgcccagggcgaggagacctttgagaactggctgacccaggtgaatggagtgctgcctgactggaacatgtctgaggaggagaagctgaagaggctgatgaagaccctgcggggccctgcccgggaggtgatgagggtgctgcaggccaccaaccccaacctgtctgtggccgacttcctgcgggccatgaagctggtgtttggagagagcgagagctctgtgacagcccacggcaagttcttcaacaccctgcaggcccagggcgagaaggccagcctgtatgtgatccggctggaggtgcagctgcagaatgccatccaggccggcatcatcgccgagaaggatgccaacagaacccggctgcagcagctgctgctgggcggggagctgagccgggacctgcggctgcggctgaaggacttcctgaggatgtatgccaatgagcaggagcggctgcccaacttcctggagctgatccgcatggtgcgggaggaggaggactgggatgatgccttcatcaagaggaagaggcccaagaggtctgagagcatggtggagagagctgtgtcccctgtggccttccagggcagcccccccatcgtcatcggcagcgctgactgcaacgtcatcgagattgatgacaccctggatgacagtgatgaagatgtgatcctggtggagagccaggacccccccctgcccagctggggcgccccacccctgcgggaccgggcccggccccaggatgaggtgctggtgattgacagcccccacaacagccgggcccagttccccagcaccagcggcggcagcggctacaagaacaacggccctggagagatgaggcgggccaggaagaggaagcacaccatccgctgcagctactgtggggaggagggccacagcaaggagacctgtgacaatgaaagtgacaaggcccaggtgtttgaaaatctcatcatcaccctgcaggagctgacccacacagagatggagaggagccgggtggcccctggagagtacaatgacttcagcgagcccctgtag

SEQ ID NO: 177109 - DNA, 1542 bp, synthetic construct
  misc_feature 1..1542: note = Description of Artificial Sequence: Synthetic coding sequence
  source 1..1542: mol_type = other DNA
atggccgccagcagaaatggatttgaggccgtggaggccgagggcagcgctggctgccggggcagcagcggcatggaggtggtgctgcccctggaccctgctgtgcctgcccccctgtgcccccacggccccaccctgctgtttgtgaaggtgacccagggcaaggaggagacccggcgcttctacgcctgcagcgcctgccgggacaggaaggactgcaacttcttccagtgggaggatgagaagctgagcggggcccggctggccgcccgggaggcccacaacagacgctgccagccccccctgagcaggacccagtgtgtggagcgctacctgaagttcatcgagctgcccctgacccagaggaagttctgccagacctgccagcagctgctgctgcctgatgactggggccagcacagcgagcaccaggtgctgggcaatgtgtccatcacccagctgcggcggcccagccagctgctgtaccccctggagaacaagaagaccaatgcccagtacctgtttgctgacaggagctgccagttcctggtggacctgctgagcgccctgggcttcagaagagtgctgtgtgtgggcaccccccggctgcacgagctgatcaagctgacagccagcggggacaagaagagcaacatcaagagcctgctgctggacatcgacttccgctacagccagttctacatggaggacagcttctgccactacaacatgttcaaccaccacttctttgatggcaagacagccctggaggtgtgccgggccttcctgcaggaggacaagggggagggcatcatcatggtgacagatcctccatttggaggcctggtggagcccctggccatcaccttcaagaagctgattgccatgtggaaggagggccagagccaggatgacagccacaaggagctgcccatcttctggatcttcccctacttctttgagagccgcatctgccagttcttccccagcttccagatgctggactaccaggtggactatgacaaccacgccctgtacaagcacggcaagacaggcaggaagcagagccctgtgcgcatcttcaccaacatcccccccaacaagatcatcctgcccacagaggagggctaccgcttctgcagcccctgccagcgctacgtgtccctggagaaccagcactgtgagctgtgcaacagctgcaccagcaaggatggcaggaagtggaaccactgcttcctgtgcaagaagtgtgtgaagcccagctggatccactgcagcatctgcaaccactgtgctgtgcctgaccacagctgtgagggccccaagcacggctgcttcatctgtggggagctggaccacaagaggagcacctgccccaacatcgccaccagcaagagggccaacaaggctgtgaggaagcagaagcagaggaagagcaacaagatgaagatggagaccaccaagggccagagcatgaaccacaccagcgccaccaggaggaagaagagaagagagcgggcccaccagtacctgggcagctag

SEQ ID NO: 177110 - DNA, 384 bp, synthetic construct
  misc_feature 1..384: note = Description of Artificial Sequence: Synthetic coding sequence
  source 1..384: mol_type = other DNA
atggaggtggtgctgcccctggaccctgctgtgcctgcccccctgtgcccccacggccccaccctgctgtttgtgaaggtgacccagggcaaggaggagacccggcgcttctacgcctgcagcgcctgccgggacaggaaggactgcaacttcttccagtgggaggatgagaagctgagcggggcccggctggccgcccgggaggcccacaacagacgctgccagccccccctgagcaggacccagtgtggccgctacctgaagttcatcgagctgcccctgacccagaggaagttctgccagacctgccagcagctgctgctgcctgatgactggggccagcacagcgagcaccagttctgggtgtgtgtgatcaccagctag

SEQ ID NO: 177111 - DNA, 1479 bp, synthetic construct
  misc_feature 1..1479: note = Description of Artificial Sequence: Synthetic coding sequence
  source 1..1479: mol_type = other DNA
atggtgatcctgctgctgcagcacggggctgaccccaccctgattgatggagagggcttcagcagcatccacctggccgtgctcttccagcacatgcccatcatcgcctacctgatcagcaagggccagagcgtgaacatgacagatgtgaatggccagacccccctgatgctgagcgcccacaaggtgattggccctgagcccaccggcttcctgctgaagttcaaccccagcctgaatgtggtggacaagatccaccagaacacccccctgcactgggccgtggccgctggaaatgtgaatgctgtggacaagctgctggaggccggcagcagcctggacatccagaatgtgaagggggagacccccctggacatggccctgcagaacaagaaccagctgatcatccacatgctgaagacagaggccaagatgagggccaaccagaagttccggctgtggcgctggctgcagaagtgtgagctgttcctgctgctgatgctgagcgtcatcaccatgtgggccatcggctacatcctggacttcaacagcgacagctggctgctgaagggctgcctgctggtgaccctcttcttcctgaccagcctcttcccccgcttcctggtgggctacaagaacctggtgtacctgcccacagccttcctgctgagctctgtgttctggatcttcatgacctggttcatcctcttcttcccagacctggccggggcccccttctacttctccttcatcttcagcatcgtggccttcctgtacttcttctacaagacctgggccacagatcctggcttcaccaaggccagcgaggaggagaagaaggtgaacatcatcaccctggccgagaccggcagcctggacttccgcaccttctgcaccagctgcctgatcaggaagcccctgcggagcctgcactgccacgtgtgcaactgctgcgtggcccgctatgaccagcactgcctgtggacaggccgctgcattggatttggaaaccaccactactacatcttcttcctgttcttcctgtccatggtgtgtggctggatcatctacggcagcttcatctacctgagcagccactgtgccaccaccttcaaggaggatggcctgtggacctacctgaaccagatcgtggcctgcagcccctgggtgctgtacatcctgatgctggccaccttccacttctcctggagcaccttcctgctgctgaaccagctgttccagatcgccttcctgggcctgaccagccatgagcgcatcagcctgcagaagcagagcaagcacatgaagcagaccctgagcctgaggaagaccccctacaacctgggcttcatgcagaacctggccgacttcttccagtgtggctgcttcggcctggtgaagccctgtgtggtggactggaccagccagtacaccatggtgttccacccagcccgggagaaggtgctgcggtctgtgtag

SEQ ID NO: 177112 - DNA, 1869 bp, synthetic construct
  misc_feature 1..1869: note = Description of Artificial Sequence: Synthetic coding sequence
  source 1..1869: mol_type = other DNA
atggagggccctggcctgggcagccagtgcaggaaccacagccacggcccccaccccccaggcttcggccgctatggcatctgtgcccacgagaacaaggagctggccaatgcccgggaggccctgcccctgattgaggacagcagcaactgtgacatcgtgaaggccacccagtatggcatctttgagcgctgcaaggagctggtggaggccggctatgatgtgcggcagcctgacaaggaaaatgtgtccctgctgcactgggccgccatcaacaaccggctggacctggtgaagttctacatcagcaaaggagctgtggtggaccagctgggcggggacctgaacagcacccccctgcactgggccatccggcagggccacctgcccatggtgatcctgctgctgcagcacggggctgaccccaccctgattgatggagagggcttcagcagcatccacctggccgtgctcttccagcacatgcccatcatcgcctacctgatcagcaagggccagagcgtgaacatgacagatgtgaatggccagacccccctgatgctgagcgcccacaaggtgattggccctgagcccaccggcttcctgctgaagttcaaccccagcctgaatgtggtggacaagatccaccagaacacccccctgcactgggccgtggccgctggaaatgtgaatgctgtggacaagctgctggaggccggcagcagcctggacatccagaatgtgaagggggagacccccctggacatggccctgcagaacaagaaccagctgatcatccacatgctgaagacagaggccaagatgagggccaaccagaagttccggctgtggcgctggctgcagaagtgtgagctgttcctgctgctgatgctgagcgtcatcaccatgtgggccatcggctacatcctggacttcaacagcgacagctggctgctgaagggctgcctgctggtgaccctcttcttcctgaccagcctcttcccccgcttcctggtgggctacaagaacctggtgtacctgcccacagccttcctgctgagctctgtgttctggatcttcatgacctggttcatcctcttcttcccagacctggccggggcccccttctacttctccttcatcttcagcatcgtggccttcctgtacttcttctacaagacctgggccacagatcctggcttcaccaaggccagcgaggaggagaagaaggtgaacatcatcaccctggccgagaccggcagcctggacttccgcaccttctgcaccagctgcctgatcaggaagcccctgcggagcctgcactgccacgtgtgcaactgctgcgtggcccgctatgaccagcactgcctgtggacaggccgctgcattggatttggaaaccaccactactacatcttcttcctgttcttcctgtccatggtgtgtggctggatcatctacggcagcttcatctacctgagcagccactgtgccaccaccttcaaggaggatggcctgtggacctacctgaaccagatcgtggcctgcagcccctgggtgctgtacatcctgatgctggccaccttccacttctcctggagcaccttcctgctgctgaaccagctgttccagatcgccttcctgggcctgaccagccatgagcgcatcagcctgcagaagcagagcaagcacatgaagcagaccctgagcctgaggaagaccccctacaacctgggcttcatgcagaacctggccgacttcttccagtgtggctgcttcggcctggtgaagccctgtgtggtggactggaccagccagtacaccatggtgttccacccagcccgggagaaggtgctgcggtctgtgtag

SEQ ID NO: 177113 - DNA, 564 bp, synthetic construct
  misc_feature 1..564: note = Description of Artificial Sequence: Synthetic coding sequence
  source 1..564: mol_type = other DNA
atgaggcggggctggaagatggccctgagcggcggcctgcgctgctgcagaagagtgctgtcctgggtgcctgtgctggtgattgtgctggtggtgctgtggagctactatgcctacgtgtttgagctgtgcctggtgacagtgctgagccctgctgagaaggtgatctacctgatcctgtaccacgccatctttgtgttcttcacctggacctactggaagagcatcttcaccctgccccagcagcccaaccagaagttccacctgagctacacagacaaggagagatatgaaaatgaggagaggcctgaggtgcagaagcagatgctggtggacatggccaagaagctgcctgtgtacaccaggactggaagtggagctgtgcgcttctgtgaccgctgccacctgatcaagccagaccgctgccaccactgcagcgtgtgtgccatgtgtgtgctgaagatggaccaccactgcccctggggcaactaccctgtgtttgccctgagctccatgtccttcttcttcagcctgtggccagcctgcttcctgagcgccctgtag

SEQ ID NO: 177114 - DNA, 1014 bp, synthetic construct
  misc_feature 1..1014: note = Description of Artificial Sequence: Synthetic coding sequence
  source 1..1014: mol_type = other DNA
atgaggcggggctggaagatggccctgagcggcggcctgcgctgctgcagaagagtgctgtcctgggtgcctgtgctggtgattgtgctggtggtgctgtggagctactatgcctacgtgtttgagctgtgcctggtgacagtgctgagccctgctgagaaggtgatctacctgatcctgtaccacgccatctttgtgttcttcacctggacctactggaagagcatcttcaccctgccccagcagcccaaccagaagttccacctgagctacacagacaaggagagatatgaaaatgaggagaggcctgaggtgcagaagcagatgctggtggacatggccaagaagctgcctgtgtacaccaggactggaagtggagctgtgcgcttctgtgaccgctgccacctgatcaagccagaccgctgccaccactgcagcgtgtgtgccatgtgtgtgctgaagatggaccaccactgcccctgggtgaacaactgcatcggcttcagcaactacaagttcttcctgcagttcctggcctacagcgtgctgtactgcctgtacatcgccaccaccgtcttctcctacttcatcaagtactggagaggagagctgcccagcgtgcgcagcaagttccacgtgctcttcctgctgtttgtggcctgcatgttctttgtgtccctggtgatcctgtttggctaccactgctggctggtgtccaggaacaagaccaccctggaggccttctgcacccctgtgttcaccagcggccctgagaagaatggcttcaacctgggcttcatcaagaacatccagcaggtgtttggagacaagaagaagttctggctgatccccatcggcagcagccctggagatggccacagcttccccatgaggtccatgaatgaaagccagaaccccctgctggccaatgaggagacctgggaggacaatgaagatgacaaccaggactacccagagggcagcagcagcctggccgtggagacagagacctag

SEQ ID NO: 177115 - DNA, 987 bp, synthetic construct
  misc_feature 1..987: note = Description of Artificial Sequence: Synthetic coding sequence
  source 1..987: mol_type = other DNA
atgaggcggggctggaagatggccctgagcggcggcctgcgctgctgcagaagagtgctgtcctgggtgcctgtgctggtgattgtgctggtggtgctgtggagctactatgcctacgtgtttgagctgtgcctggtgatctacctgatcctgtaccacgccatctttgtgttcttcacctggacctactggaagagcatcttcaccctgccccagcagcccaaccagaagttccacctgagctacacagacaaggagagatatgaaaatgaggagaggcctgaggtgcagaagcagatgctggtggacatggccaagaagctgcctgtgtacaccaggacaggcagcggggctgtgcgcttctgtgaccgctgccacctgatcaagccagaccgctgccaccactgcagcgtgtgtgccatgtgtgtgctgaagatggaccaccactgcccctgggtgaacaactgcatcggcttcagcaactacaagttcttcctgcagttcctggcctacagcgtgctgtactgcctgtacatcgccaccaccgtcttctcctacttcatcaagtactggagaggagagctgcccagcgtgcgcagcaagttccacgtgctcttcctgctgtttgtggcctgcatgttctttgtgtccctggtgatcctgtttggctaccactgctggctggtgtccaggaacaagaccaccctggaggccttctgcacccctgtgttcaccagcggccctgagaagaatggcttcaacctgggcttcatcaagaacatccagcaggtgtttggagacaagaagaagttctggctgatccccatcggcagcagccctggagatggccacagcttccccatgaggtccatgaatgaaagccagaaccccctgctggccaatgaggagacctgggaggacaatgaagatgacaaccaggactacccagagggcagcagcagcctggccgtggagacagagacctag

SEQ ID NO: 177116 - DNA, 2022 bp, synthetic construct
  misc_feature 1..2022: note = Description of Artificial Sequence: Synthetic coding sequence
  source 1..2022: mol_type = other DNA
atgcccaggagccctggcacccggctgaagccagccaagtacatccctgtggccacagctgctgccctgctggtgggcagcagcaccctcttctttgtgttcacctgcccctggctgaccagggctgtgtccccagctgtgcctgtgtacaacggcatcatcttcctgtttgtgctggccaacttctccatggccaccttcatggaccccggggtcttccccagggcagatgaagatgaggacaaggaggatgacttccgggcccccctgtacaagaatgtggatgtgcggggcatccaggtgaggatgaagtggtgtgccacctgccacttctaccggcccccacgctgcagccactgcagcgtgtgtgacaactgtgtggaggtgacaggcaagttccggggcggcgtgaaccccttcacccggggctgctgcggaaatgtggagcacgtgctgtgcagccccctggccccccgctacgtggtggagcccccccggctgcccctggccgtgtccctgaagccacccttcctgcggcctgagctgctggaccgggccgcccccctgaaggtgaagctgagtgacaatggcctgaaggccggcctgggccgcagcaagagcaagggcagcctggaccggctggatgagaagcccctggacctgggcccccccctgccccccaagattgaagctggcaccttcagcagtgacctgcagacccccaggcctggcagcgctgagagcgccctgtctgtgcagaggaccagcccccccaccccagccatgtacaagttccggcctgccttccccaccggccccaaggtgcccttctgtggccctggagagcaggtgcccggccctgacagcctgaccctgggagatgacagcatccgcagcctggactttgtgtctgagcccagcctggacctgcctgactatggccctgggggcctgcacgccgcctacccacccagcccccccctgagcgccagtgatgccttcagcggggccctgcggagcctgagcctgaaggccagcagccggcggggcggggaccacgtggccctgcagcccctgcggtctgagggcggcccccccaccccccacaggagcatctttgccccccacgccctgcccaacagaaatggcagcctgtcctatgacagcctgctgaaccctggcagccctgggggccacgcctgcccagcccaccctgctgtgggcgtggccggctaccacagcccctacctgcaccctggggccaccggggaccccccccggcccctgcccaggagcttcagccctgtgctgggcccccggccccgggagcccagccctgtgcgctatgacaacctgagcaggaccatcatggccagcatccaggagaggaaggaccgggaggagcgggagcggctgctgcggagccaggccgacagcctgtttggagacagcggcgtgtatgatgcccccagcagctacagcctgcagcaggcctctgtgctgtctgagggcccccggggccctgccctgcgctatggcagcagagatgacctggtggccggccctggctttggaggagccaggaacccagccctgcagaccagcctgagcagcctgagcagctctgtgtcccgggcccccaggaccagcagcagcagcctgcaggccgaccaggccagcagcaatgcccctggcccccggcccagcagcggcagccacaggagccctgcccggcagggcctgcccagccccccaggcaccccccacagccccagctatgccggccccaaggctgtggccttcatccacacagacctgcctgagcccccacccagcctgactgtgcagagggaccacccccagctgaagaccccacccagcaagctgaatggccagagccctggcctggcccggctgggccctgccactggacctcctggccccagcgccagccccaccaggcacaccctggtgaagaaggtgtctggagtgggcggcaccacctatgagatctctgtgtag

SEQ ID NO: 177117 - DNA, 2298 bp, synthetic construct
  misc_feature 1..2298: note = Description of Artificial Sequence: Synthetic coding sequence
  source 1..2298: mol_type = other DNA
atgcccaggagccctggcacccggctgaagccagccaagtacatccctgtggccacagctgctgccctgctggtgggcagcagcaccctcttctttgtgttcacctgcccctggctgaccagggctgtgtccccagctgtgcctgtgtacaacggcatcatcttcctgtttgtgctggccaacttctccatggccaccttcatggaccccggggtcttccccagggcagatgaagatgaggacaaggaggatgacttccgggcccccctgtacaagaatgtggatgtgcggggcatccaggtgaggatgaagtggtgtgccacctgccacttctaccggcccccacgctgcagccactgcagcgtgtgtgacaactgtgtggaggactttgaccaccactgcccctgggtgaacaactgcattggaagaagaaactaccgctacttcttcctgttcctgctgagcctgagcgcccacatggtgggcgtggtggccttcggcctggtgtatgtgctgaaccacgccgagggcctgggcgccgcccacaccaccatcaccatggctgtgatgtgtgtggccggcctcttcttcatccctgtgattggcctgaccggcttccacgtggtgctggtgacccggggccgcaccaccaatgagcaggtgacaggcaagttccggggcggcgtgaaccccttcacccggggctgctgcggaaatgtggagcacgtgctgtgcagccccctggccccccgctacgtggtggagcccccccggctgcccctggccgtgtccctgaagccacccttcctgcggcctgagctgctggaccgggccgcccccctgaaggtgaagctgagtgacaatggcctgaaggccggcctgggccgcagcaagagcaagggcagcctggaccggctggatgagaagcccctggacctgggcccccccctgccccccaagattgaagctggcaccttcagcagtgacctgcagacccccaggcctggcagcgctgagagcgccctgtctgtgcagaggaccagcccccccaccccagccatgtacaagttccggcctgccttccccaccggccccaaggtgcccttctgtggccctggagagcaggtgcccggccctgacagcctgaccctgggagatgacagcatccgcagcctggactttgtgtctgagcccagcctggacctgcctgactatggccctgggggcctgcacgccgcctacccacccagcccccccctgagcgccagtgatgccttcagcggggccctgcggagcctgagcctgaaggccagcagccggcggggcggggaccacgtggccctgcagcccctgcggtctgagggcggcccccccaccccccacaggagcatctttgccccccacgccctgcccaacagaaatggcagcctgtcctatgacagcctgctgaaccctggcagccctgggggccacgcctgcccagcccaccctgctgtgggcgtggccggctaccacagcccctacctgcaccctggggccaccggggaccccccccggcccctgcccaggagcttcagccctgtgctgggcccccggccccgggagcccagccctgtgcgctatgacaacctgagcaggaccatcatggccagcatccaggagaggaaggaccgggaggagcgggagcggctgctgcggagccaggccgacagcctgtttggagacagcggcgtgtatgatgcccccagcagctacagcctgcagcaggcctctgtgctgtctgagggcccccggggccctgccctgcgctatggcagcagagatgacctggtggccggccctggctttggaggagccaggaacccagccctgcagaccagcctgagcagcctgagcagctctgtgtcccgggcccccaggaccagcagcagcagcctgcaggccgaccaggccagcagcaatgcccctggcccccggcccagcagcggcagccacaggagccctgcccggcagggcctgcccagccccccaggcaccccccacagccccagctatgccggccccaaggctgtggccttcatccacacagacctgcctgagcccccacccagcctgactgtgcagagggaccacccccagctgaagaccccacccagcaagctgaatggccagagccctggcctggcccggctgggccctgccactggacctcctggccccagcgccagccccaccaggcacaccctggtgaagaaggtgtctggagtgggcggcaccacctatgagatctctgtgtag

SEQ ID NO: 177118 - DNA, 2337 bp, synthetic construct
  misc_feature 1..2337: note = Description of Artificial Sequence: Synthetic coding sequence
  source 1..2337: mol_type = other DNA
atgcccaggagccctggcacccggctgaagccagccaagtacatccctgtggccacagctgctgccctgctggtgggcagcagcaccctcttctttgtgttcacctgcccctggctgaccagggctgtgtccccagctgtgcctgtgtacaacggcatcatcttcctgtttgtgctggccaacttctccatggccaccttcatggaccccggggtcttccccagggcagatgaagatgaggacaaggaggatgacttccgggcccccctgtacaagaatgtggatgtgcggggcatccaggtgaggatgaagtggtgtgccacctgccacttctaccggcccccacgctgcagccactgcagcgtgtgtgacaactgtgtggaggactttgaccaccactgcccctgggtgaacaactgcattggaagaagaaactaccgctacttcttcctgttcctgctgagcctgagcgcccacatggtgggcgtggtggccttcggcctggtgtatgtgctgaaccacgccgagggcctgggcgccgcccacaccaccatcaccatggctgtgatgtgtgtggccggcctcttcttcatccctgtgattggcctgaccggcttccacgtggtgctggtgacccggggccgcaccaccaatgagcaggtgacaggcaagttccggggcggcgtgaaccccttcacccggggctgctgcggaaatgtggagcacgtgctgtgcagccccctggccccccgctacgtggtggagcccccccggctgcccctggccgtgtccctgaagccacccttcctgcggcctgagctgctggaccgggccgcccccctgaaggtgaagctgagtgacaatggcctgaaggccggcctgggccgcagcaagagcaagggcagcctggaccggctggatgagaagcccctggacctgggcccccccctgccccccaagattgaagctggcaccttcagcagtgacctgcagacccccaggcctggcagcgctgagagcgccctgtctgtgcagaggaccagcccccccaccccagccatgtacaagttccggcctgccttccccaccggccccaaggtgcccttctgtggccctggagagcaggtgcccggccctgacagcctgaccctgggagatgacagcatccgcagcctggactttgtgtctgagcccagcctggacctgcctgactatggccctgggggcctgcacgccgcctacccacccagcccccccctgagcgccagtgatgccttcagcggggccctgcggagcctgagcctgaaggccagcagccggcggggcggggaccacgtggccctgcagcccctgcggtctgagggcggcccccccaccccccacaggagcatctttgccccccacgccctgcccaacagaaatggcagcctgtcctatgacagcctgctgaaccctggcagccctgggggccacgcctgcccagcccaccctgctgtgggcgtggccggctaccacagcccctacctgcaccctggggccaccggggaccccccccggcccctgcccaggagcttcagccctgtgctgggcccccggccccgggagcccagccctgtgcgctatgacaacctgagcaggaccatcatggccagcatccaggagaggaaggaccgggaggagcgggagcggctgctgcggagccaggccgacagcctgtttggagacagcggcgtgtatgatgcccccagcagctacagcctgcagcaggcctctgtgctgtctgagggcccccggggccctgccctgcgctatggcagcagagatgacctggtggccggccctggctttggaggagccaggaacccagccctgcagaccagcctgagcagcctgagcagctctgtgtcccgggcccccaggaccagcagcagcagcctgcaggccgaccaggccagcagcaatgcccctggcccccggcccagcagcggcagccacaggagccctgcccggcagggcctgcccagccccccaggcaccccccacagccccagctatgccggccccaaggctgtggccttcatccacacagacctgcctgagcccccacccagcctgactgtgcagaggggccgcatcggcacctgcacccggggctggggcagaagaggccagccctgggtgcccccaggcctgcacctgtgccacctgggccggcctgaggacaggcctcccctgcgggccccctggagccaggccgccggggccccacccaggggggccatgtgccgcctgcacctggccgccagcagcctcttccccagcctgagcggcccctag

SEQ ID NO: 177119 - DNA, 1095 bp, synthetic construct
  misc_feature 1..1095: note = Description of Artificial Sequence: Synthetic coding sequence
  source 1..1095: mol_type = other DNA
atgtctgtgatggtggtgaggaagaaggtgaccaggaagtgggagaagctgcccggcaggaacaccttctgctgtgatggccgggtgatgatggcccggcagaagggcatcttctacctgaccctcttcctgatcctgggcacctgcaccctcttctttgcctttgagtgccgctacctggccgtgcagctgagccctgccatccctgtgtttgctgccatgctgttcctgttctccatggccaccctgctgcggaccagcttcagtgaccccggggtcatcccccgggccctgcctgatgaggccgccttcatcgagatggagattgaggccaccaatggagctgtgccccagggccagaggcccccaccccgcatcaagaacttccagatcaacaaccagatcgtgaagctgaagtactgctacacctgcaagatcttccggcccccccgggccagccactgcagcatctgtgacaactgtgtggagagatttgaccaccactgcccctgggtgggcaactgtgtgggcaagaggaactaccgctacttctacctgttcatcctgagcctgagcctgctgaccatctacgtgtttgccttcaacatcgtgtatgtggccctgaagagcctgaagattggcttcctggagaccctgaaggagaccccaggcaccgtgctggaggtgctgatctgcttcttcaccctgtggagcgtggtgggcctgaccggcttccacaccttcctggtggccctgaaccagaccaccaatgaagacatcaagggctcctggacaggcaagaacagagtgcagaacccctacagccacggcaacatcgtgaagaactgctgtgaggtgctgtgtggccccctgccccccagcgtgctggaccggcggggcatcctgcccctggaggagagcggcagcaggcctcccagcacccaggagaccagcagcagcctgctgccccagagccctgcccccacagagcacctgaacagcaatgagatgcctgaggacagcagcaccccagaggagatgcctcctcctgagcccccagagcccccccaggaggccgctgaggccgagaagtag

SEQ ID NO: 177120 - DNA, 1095 bp, synthetic construct; identical to SEQ ID NO: 177119
  misc_feature 1..1095: note = Description of Artificial Sequence: Synthetic coding sequence
  source 1..1095: mol_type = other DNA

SEQ ID NO: 177121 - DNA, 513 bp, synthetic construct
  misc_feature 1..513: note = Description of Artificial Sequence: Synthetic coding sequence
  source 1..513: mol_type = other DNA
atgtctgtgatggtggtgaggaagaaggtgaccaggaagtgggagaagctgcccggcaggaacaccttctgctgtgatggccgggtgatgatggcccggcagaagggcatcttctacctgaccctcttcctgatcctgggcacctgcaccctcttctttgcctttgagtgccgctacctggccgtgcagctgagccctgccatccctgtgtttgctgccatgctgttcctgttctccatggccaccctgctgcggaccagcttcagtgaccccggggtcatcccccgggccctgcctgatgaggccgccttcatcgagatggagattgaggccaccaatggagctgtgccccagggccagaggcccccaccccgcatcaagaacttccagatcaacaaccagatcgtgaagctgaagtactgctacacctgcaagatcttccggcccccccgggccagccactgcagcatctgtgacaactgtgtggagagatttgaccaccactgcccctag

SEQ ID NO: 177122 - DNA, 585 bp, synthetic construct
  misc_feature 1..585: note = Description of Artificial Sequence: Synthetic coding sequence
  source 1..585: mol_type = other DNA
tgactcttcctgatcctgggcacctgcaccctcttctttgcctttgagtgccgctacctggccgtgcagctgagccctgccatccctgtgtttgctgccatgctgttcctgttctccatggccaccctgctgcggaccagcttcagtgaccccggggtcatcccccgggccctgcctgatgaggccgccttcatcgagatggagattgaggccaccaatggagctgtgccccagggccagaggcccccaccccgcatcaagaacttccagatcaacaaccagatcgtgaagctgaagtactgctacacctgcaagatcttccggcccccccgggccagccactgcagcatctgtgacaactgtgtggagagcctgaagattggcttcctggagaccctgaaggagaccccaggcaccgtgctggaggtgctgatctgcttcttcaccctgtggagcgtggtgggcctgaccggcttccacaccttcctggtggccctgaaccagaccaccaatgaagacatcaagggctcctggacaggcaagaacagagtgcagaacccctacagccacggcaacatcgtgtag

SEQ ID NO: 177123 - DNA, 897 bp, synthetic construct
  misc_feature 1..897: note = Description of Artificial Sequence: Synthetic coding sequence
  source 1..897: mol_type = other DNA
atggagcggggcatcagtgatgtgacagacaggaagctgaccatggaggaggaggaggccaagagaattgctgagatgggcaagcctgtgctgggggagcaccccaagctggaggtgatcatcgaggagagctatgagttcaagaccaccgtggacaagctgatcaagaagaccaacctggccctggtggtgggcacccacagctggagggaccagttcatggaggccatcaccgtgtctgctgctggagatgaagatgaagatgagagcggggaggagcggctgcccagctgctttgattatgtgatgcacttcctgactgtgttctggaaggtgctgtttgcctgtgtgcccccaacagagtactgccacggctgggcctgctttgctgtgtccatcctgatcatcggcatgctgacagccatcattggagacctggccagccacttcggctgcaccatcggcctgaaggacagcgtgacagctgtggtgtttgtggccttcggcacctctgtgcctgacacctttgccagcaaggctgctgccctgcaggatgtgtatgcagatgccagcattggaaatgtgacaggcagcaatgctgtgaatgtgttcctgggcatcggcctggcctggagcgtggccgccatctactgggccctgcagggccaggagttccacgtgtctgctggcaccctggccttctctgtgaccctcttcaccatctttgcctttgtgtgcatctctgtgctgctgtacagaagaagaccccacctgggcggggagctgggcggcccccggggctgcaagctggccaccacctggctgtttgtgtccctgtggctgctgtacatcctgtttgccaccctggaggcctactgctacatcaagggcttctag

SEQ ID NO: 177124 - DNA, 705 bp, synthetic construct
  misc_feature 1..705: note = Description of Artificial Sequence: Synthetic coding sequence
  source 1..705: mol_type = other DNA
atgagcagcgaggtgtctgccaggagagatgccaagaagctggtgcgcagccccagcggcctgaggatggtgcctgagcaccgggccttcggcagccccttcggcctggaggagccccagtgggtgcctgacaaggagtgccgccgctgcatgcagtgtgatgccaagtttgacttcctgaccaggaagcaccactgcagaagatgtgggaagtgcttctgtgaccgctgctgcagccagaaggtgcccctgcggaggatgtgctttgtggaccctgtgcggcagtgtgccgagtgtgccctggtgtccctgaaggaggccgagttctatgacaagcagctgaaggtgctgctgagcggggccaccttcctggtgacctttggaaacagcgagaagccagagaccatgacctgccgcctgagcaacaaccagcgctacctgttcctggatggagacagccactatgaaattgaaattgtgcacatcagcacagtgcagatcctgacagagggcttccccccaggcggcggcaatgcccgggccaccggcatgttcctgcagtacacagtgcctggaacagaaggagtgacccagctgaagctgactgtggtggaggatgtgacagtgggccggcggcaggccgtggcctggctggtggccatgcacaaggccgccaagctgctgtatgagagccgggaccagtag

SEQ ID NO: 177125 - DNA, 7620 bp, synthetic construct
  misc_feature 1..7620: note = Description of Artificial Sequence: Synthetic coding sequence
  source 1..7620: mol_type = other DNA
atgaaccacccctttgggaaggaggaggccgccagccagaagcagctgtttggcttcttctgtgagtgcctgcggcggggggagtgggagctggcccaggcctgtgtgccccagctgcaggagggccagggcgacatccccaagagggtggaggacatcctgcaggccctggtggtgtgccccaacctgctgcgctgtggccaggacatcaacccccagagggtggcctgggtgtggctgctggtgctggagaagtggctggcccgggagaagaagctgctgcctgtggtgttccggaggaagctggagttcctgctgctgtctgaggacctgcagggcgacatccctgagaacatcctggaggagctgtatgagaccctgacccagggcgctgtgggccacgtgcctgatggcaacccccggcgggagagctggaccccccggctgagcagcgaggccgtgtctgtgctgtgggacctgctgcggcagagcccccagcctgcccaggccctgctggagctgctgctggaggaggatgatggcaccggcctgtgccactggcccctgcagaatgccctggtggacctgatcaggaaggccctgcgggccctgcagggcccagattctgtgcccccaggagtggtggatgccatctatggagccctgcggaccctgcgctgcccagctgagcccctgggcgtggagctgcacctgctgtgtgaggagctgctggaggcctgcaggacagagggcagccccctgcgggaggagcggctgctgagctgcctgctgcacaaggccagccggggcctgctgagcctgtatggccacacctacgccgagaaggtgacagagaagccaccccgggccacagccagcggcaaggtgtccccagaccacctggaccctgagcgggccatgctggccctcttcagcaaccccaacccagctgaggcctggaaggtggcctacttctactgcctgagcaacaacaagcacttcctggagcagatcctggtgacagccctgaccctgctgaaggaggaggacttccccaacctgggctgcctgctggaccgggagttccggcccctgagctgcctgctggtgctgctgggctggacccactgccagagcctggagagcgccaagaggctgctgcagaccctgcacaggacccagggccctggctgtgatgagctgctgagagatgcctgtgatggcctgtgggcccacctggaggtgctggagtggtgcatccagcagagcagcaaccccatccccaagagggacctgctgtaccacctgcatggaggagacagccacagcgtgctgtacaccctgcaccacctgaccaacctgcctgccctgcgggaggaggatgtgctgaagctgctgcagaaggtgcctgccaaggacccccagcaggagccagatgctgtggatgcccctgtgcctgagcacctgagccagtgccagaacctgaccctgtaccagggcttctgtgccatgaagtatgccatctatgccctgtgtgtgaacagccaccagcacagccagtgccaggactgcaaggacagcctgtctgaggacctggccagcgccacagagcccgccaatgacagcctgagcagccctggggccgccaacctcttcagcacctacctggcccgctgccagcagtacctgtgcagcatcccagacagcctgtgcctggagctgctggagaacatcttcagcctgctgctgatcaccagcgctgacctgcaccctgagccccacctgcctgaagattatgcagaagatgatgacatcgagggcaagagccccagcggcctgcggagccccagcgagagcccccagcacatcgcccaccctgagaggaagtctgagcggggcagcctgggcgtgcccaagaccctggcctacaccatgcccagccacgtgaaggccgagcccaaggacagctacccaggcccccaccgccacagcttcctggacctgaagcacttcaccagcggcatcagcggcttcctggctgatgaatttgccatcggggccttcctgcggctgctgcaggagcagctggatgagatcagcagccgcagccccccagagaagcccaagcaggagagccagagctgcagcggcagcagagatggcctgcagagccggctgcaccggctgagcaaggtggtgtctgaggcccagtggaggcacaaggtggtgaccagcaaccacaggtctgaggagcagcccagccgccgctaccagcctgccaccaggcaccccagcctgcggcggggccgccgcaccaggaggagccaggctgatggccgggaccggggcagcaaccccagcctggagagcaccagcagcgagctgagcaccagcaccagcgagggcagcctgagcgccatgagcggcagaaatgagctgcacagccggctgcacccccacccccagagcagcctcatccccatgatgttcagccccccagagagcctgctggccagctgcatcctgcggggcaactttgctgaggcccaccaggtgctcttcaccttcaacctgaagagcagccccagcagcggggagctgatgttcatggagcgctaccaggaggtgatccaggagctggcccaggtggagcacaagattgagaaccagaacagtgatgctggcagcagcaccatccggaggacaggcagcggccgcagcaccctgcaggccatcggcagcgctgctgctgctggcatggtgttctacagcatcagtgatgtgacagacaagctgctgaacaccagcggggaccccatccccatgctgcaggaggacttctggatcagcacagccctggtggagcccacagcccccctgcgggaggtgctggaggacctgagccccccagccatggccgcctttgacctggcctgcagccagtgccagctgtggaagacctgcaagcagctgctggagacagctgagcggcggctgaacagcagcctggagcggcggggcagaagaattgaccacgtgctgctgaatgctgatggcatccggggcttccctgtggtgctgcagcagatcagcaagagcctgaactacctgctgatgtctgccagccagaccaagtctgagagcgtggaggagaagggcggcggccccccacgctgcagcatcacagagctgctgcagatgtgctggcccagcctgtctgaggactgtgtggccagccacaccaccctgagccagcagctggaccaggtgctgcagagcctgcgggaggccctggagctgcctgagcccaggaccccacccctgagcagcctggtggagcaggccgcccagaaggcccctgaggccgaggcccaccctgtgcagatccagacccagctgctgcagaagaacctgggcaagcagacccccagcggcagccggcagatggactacctgggcaccttcttctcctactgcagcaccctggccgctgtgctgctgcagagcctgagcagcgagccagaccacgtggaggtgaaggtgggcaacccctttgtgctgctgcagcagagcagcagccagctggtgagccacctgctgtttgagcggcaggtgcccccagagcggctggccgccctgctggcccaggagaacctgagcctgtctgtgccccaggtgattgtgtcctgctgctgtgagcccctggccctgtgcagcagccggcagagccagcagaccagcagcctgctgacccggctgggcaccctggcccagctgcacgccagccactgcctggatgacctgcccctgagcacccccagcagccccaggaccacagagaaccccaccctggagaggaagccctacagcagcccccgggacagcagcctgcctgccctgaccagcagcgccctggccttcctgaagagccgcagcaagctgctggccaccgtggcctgcctgggcgccagcccccggctgaaggtgtccaagcccagcctgtcctggaaggagctgcggggccggcgggaggtgcccctggccgctgagcaggtggccagagaatgtgagcggctgctggagcagttccccctgtttgaggccttcctgctggccgcctgggagcccctgcggggcagcctgcagcagggccagagcctggccgtgaacctgtgtggctgggccagcctgagcacagtgctgctgggcctgcacagccccatcgccctggatgtgctgtctgaggcctttgaggagagcctggtggcccgggactggagccgggccctgcagctgacagaggtgtatggaagagatgtggatgacctgagcagcatcaaggatgctgtgctgagctgtgctgtggcctgtgacaaggagggctggcagtacctgtttcctgtgaaggatgccagcctgcggagccggctggccctgcagtttgtggaccgctggcccctggagagctgcctggagatcctggcctactgcatcagtgacacagctgtgcaggagggcctgaagtgtgagctgcagaggaagctggccgagctgcaggtgtaccagaagatcctgggcctgcagagcccccctgtgtggtgtgactggcagaccctgcggagctgctgcgtggaggaccccagcacagtgatgaacatgatcctggaggcccaggagtatgagctgtgtgaggagtggggctgcctgtaccccatcccccgggagcacctgatcagcctgcaccagaagcacctgctgcacctgctggagcggcgggaccatgacaaggccctgcagctgctgcggcgcatcccagaccccaccatgtgcctggaggtgacagagcagagcctggaccagcacaccagcctggccaccagccacttcctggccaactacctgaccacccacttctacggccagctgacagctgtgcgccaccgggagatccaggccctgtatgtgggcagcaagatcctgctgaccctgcctgagcagcaccgggccagctacagccacctgagcagcaaccccctcttcatgctggagcagctgctgatgaacatgaaggtggactgggccaccgtggccgtgcagaccctgcagcagctgctggtgggccaggagatcggcttcaccatggatgaggtggacagcctgctgagccgctatgcagagaaggccctggacttcccctacccccagcgggagaagagaagtgacagcgtcatccacctgcaggagatcgtgcaccaggccgctgaccctgagaccctgcccaggagccccagcgctgagttctccccagctgcccctcctggcatcagcagcatccacagccccagcctgcgggagaggagcttcccccccacccagcccagccaggagtttgtgcccccagccaccccaccagcccggcaccagtgggtgcctgatgaaacagagagcatctgcatggtgtgctgccgggagcacttcaccatgttcaacagaagacaccactgccgccgctgtggccgcctggtgtgcagcagctgcagcaccaagaagatggtggtggagggctgccgggagaacccagcccgggtgtgtgaccagtgctacagctactgcaacaaggatgtgcctgaggagcccagcgagaagccagaggccctggacagcagcaagaatgaaagccccccctacagctttgtggtgcgggtgcccaaggcagatgaggtggagtggatcctggacctgaaggaggaggagaatgagctggtgcgctctgagttctactatgagcaggcccccagcgccagcctgtgcatcgccatcctgaacctgcaccgggacagcatcgcctgtggccaccagctgattgagcactgctgccgcctgagcaagggcctgaccaaccctgaggtggatgctggcctgctgacagacatcatgaagcagctgctcttcagcgccaagatgatgtttgtgaaggccggccagagccaggacctggccctgtgtgacagctacatcagcaaggtggatgtgctgaacatcctggtggccgccgcctaccgccacgtgcccagcctggaccagatcctgcagcctgctgctgtgacccggctgaggaaccagctgctggaggccgagtactaccagctgggcgtggaggtgtccaccaagacaggcctggacaccactggagcctggcacgcctggggcatggcctgcctgaaggccggcaacctgacagctgcccgggagaagttcagccgctgcctgaagcccccatttgacctgaaccagctgaaccacggcagccggctggtgcaggatgtggtggagtacctggagagcacagtgcggccctttgtgtccctgcaggatgatgactactttgccaccctgcgggagctggaggccaccctgcggacccagagcctgagcctggccgtcatccctgagggcaagatcatgaacaacacctactaccaggagtgcctcttctacctgcacaactacagcaccaacctggccatcatctccttctacgtgcgccacagctgcctgcgggaggccctgctgcacctgctgaacaaggagagccccccagaggtgttcatcgagggcatcttccagcccagctacaagagcggcaagctgcacaccctggagaacctgctggagagcattgaccccaccctggagagctggggcaagtacctgattgctgcctgccagcacctgcagaagaagaactactaccacatcctgtatgagctgcagcagttcatgaaggaccaggtgcgggccgccatgacctgcatccgcttcttcagccacaaggccaagagctacacagagctgggggagaagctgtcctggctgctgaaggccaaggaccacctgaagatctacctgcaggagaccagccgcagcagcggcaggaagaagaccaccttcttcaggaagaagatgacagctgctgatgtgagccgccacatgaacaccctgcagctgcagatggaggtgacccgcttcctgcaccgctgtgagagcgctggcaccagccagatcaccaccctgcccctgcccaccctgtttggaaacaaccacatgaagatggatgtggcctgcaaggtgatgctgggcggcaagaatgtggaggatggcttcggcatcgccttccgggtgctgcaggacttccagctggatgctgccatgacctactgcagagctgcccggcagctggtggagaaggagaagtacagcgagatccagcagctgctgaagtgtgtgtctgagagcggcatggccgccaagagtgatggagacaccatcctgctgaactgcctggaggccttcaagagaattcctccccaggagctggagggcctcatccaggccatccacaatgatgacaacaaggtgcgggcctacctgatctgctgcaagctgcggagcgcctacctgattgctgtgaagcaggagcacagccgggccacagccctggtgcagcaggtgcagcaggccgccaagagcagtggagatgctgtggtgcaggacatctgtgcccagtggctgctgaccagccaccccaggggggcccacggccctggcagcaggaagtag

SEQ ID NO: 177126 - DNA, 7557 bp, synthetic construct
  misc_feature 1..7557: note = Description of Artificial Sequence: Synthetic coding sequence
  source 1..7557: mol_type = other DNA
atgaaccacccctttgggaaggaggaggccgccagccagaagcagctgtttggcttcttctgtgagtgcctgcggcggggggagtgggagctggcccaggcctgtgtgccccagctgcaggagggccagggcgacatccccaagagggtggaggacatcctgcaggccctggtggtgtgccccaacctgctgcgctgtggccaggacatcaacccccagagggtggcctgggtgtggctgctggtgctggagaagtggctggcccgggagaagaagctgctgcctgtggtgttccggaggaagctggagttcctgctgctgtctgaggacctgcagggcgacatccctgagaacatcctggaggagctgtatgagaccctgacccagggcgctgtgggccacgtgcctgatggcaacccccggcgggagagctggaccccccggctgagcagcgaggccgtgtctgtgctgtgggacctgctgcggcagagcccccagcctgcccaggccctgctggagctgctgctggaggaggatgatggcaccggcctgtgccactggcccctgcagaatgccctggtggacctgatcaggaaggccctgcggaccctgcgctgcccagctgagcccctgggcgtggagctgcacctgctgtgtgaggagctgctggaggcctgcaggacagagggcagccccctgcgggaggagcggctgctgagctgcctgctgcacaaggccagccggggcctgctgagcctgtatggccacacctatgcagagaaggtgacagagaagccaccccgggccacagccagcggcaaggtgtccccagaccacctggaccctgagcgggccatgctggccctcttcagcaaccccaacccagctgaggcctggaaggtggcctacttctactgcctgagcaacaacaagcacttcctggagcagatcctggtgacagccctgaccctgctgaaggaggaggacttccccaacctgggctgcctgctggaccgggagttccggcccctgagctgcctgctggtgctgctgggctggacccactgccagagcctggagagcgccaagaggctgctgcagaccctgcacaggacccagggccctggctgtgatgagctgctgagagatgcctgtgatggcctgtgggcccacctggaggtgctggagtggtgcatccagcagagcagcaaccccatccccaagagggacctgctgtaccacctgcacggcggggacagccacagcgtgctgtacaccctgcaccacctgaccaacctgcctgccctgcgggaggaggatgtgctgaagctgctgcagaaggtgcctgccaaggacccccagcaggagccagatgctgtggatgcccctgtgcctgagcacctgagccagtgccagaacctgaccctgtaccagggcttctgtgccatgaagtatgccatctatgccctgtgtgtgaacagccaccagcacagccagtgccaggactgcaaggacagcctgtctgaggacctggccagcgccacagagcccgccaatgacagcctgagcagccctggagctgccaacctcttcagcacctacctggcccgctgccagcagtacctgtgcagcatcccagacagcctgtgcctggagctgctggagaacatcttcagcctgctgctgatcaccagcgctgacctgcaccctgagccccacctgcctgaggactatgcagaagatgatgacatcgagggcaagagccccagcggcctgcggagccccagcgagagcccccagcacatcgcccaccctgagaggaagtctgagcggggcagcctgggcgtgcccaagaccctggcctacaccatgcccagccacgtgaaggccgagcccaaggacagctacccaggcccccaccgccacagcttcctggacctgaagcacttcaccagcggcatcagcggcttcctggctgatgaatttgccatcggggccttcctgcggctgctgcaggagcagctggatgagatcagcagccgcagccccccagagaagcccaagcaggagagccagagctgcagcggcagcagagatggcctgcagagccggctgcaccggctgagcaaggtggtgtctgaggcccagtggaggcacaaggtggtgaccagcaaccacaggtctgaggagcagcccagccgccgctaccagcctgccaccaggcaccccagcctgcggcggggccgccgcacccggcgcagccaggctgatggccgggaccggggcagcaaccccagcctggagagcaccagcagcgagctgagcaccagcaccagcgagggcagcctgagcgccatgtctggaagaaatgagctgcacagccggctgcacccccacccccagagcagcctcatccccatgatgttcagccccccagagagcctgctggccagctgcatcctgcggggcaactttgctgaggcccaccaggtgctcttcaccttcaacctgaagagcagccccagcagtggagagctgatgttcatggagcgctaccaggaggtgatccaggagctggcccaggtggagcacaagattgagaaccagaacagtgatgctggcagcagcaccatcagaagaactggaagtggccgcagcaccctgcaggccatcggcagcgctgctgctgctggcatggtgttctacagcatcagtgatgtgacagacaagctgctgaacaccagcggggaccccatccccatgctgcaggaggacttctggatcagcacagccctggtggagcccacagcccccctgcgggaggtgctggaggacctgagccccccagccatggccgcctttgacctggcctgcagccagtgccagctgtggaagacctgcaagcagctgctggagacagctgagcggcggctgaacagcagcctggagcggcggggcagaagaattgaccacgtgctgctgaatgctgatggcatccggggcttccctgtggtgctgcagcagatcagcaagagcctgaactacctgctgatgtctgccagccagaccaagtctgagagcgtggaggagaagggcggcggccccccacgctgcagcatcacagagctgctgcagatgtgctggcccagcctgtctgaggactgtgtggccagccacaccaccctgagccagcagctggaccaggtgctgcagagcctgcgggaggccctggagctgcctgagcccaggaccccacccctgagcagcctggtggagcaggccgcccagaaggcccctgaggccgaggcccaccctgtgcagatccagacccagctgctgcagaagaacctgggcaagcagaccccatctggcagccggcagatggactacctgggcaccttcttctcctactgcagcaccctggccgctgtgctgctgcagagcctgagcagcgagccagaccacgtggaggtgaaggtgggcaacccctttgtgctgctgcagcagagcagcagccagctggtgagccacctgctgtttgagcggcaggtgcccccagagcggctggccgccctgctggcccaggagaacctgagcctgtctgtgccccaggtgattgtgtcctgctgctgtgagcccctggccctgtgcagcagccggcagagccagcagaccagcagcctgctgacccggctgggcaccctggcccagctgcacgccagccactgcctggatgacctgcccctgagcacccccagcagccccaggaccacagagaaccccaccctggagaggaagccctacagcagcccccgggacagcagcctgcctgccctgaccagcagcgccctggccttcctgaagagccgcagcaagctgctggccaccgtggcctgcctgggcgccagcccccggctgaaggtgtccaagcccagcctgtcctggaaggagctgcggggcagaagagaggtgcccctggccgctgagcaggtggcccgggagtgtgagcggctgctggagcagttccccctgtttgaggccttcctgctggccgcctgggagcccctgcggggcagcctgcagcagggccagagcctggccgtgaacctgtgtggctgggccagcctgagcacagtgctgctgggcctgcacagccccatcgccctggatgtgctgtctgaggcctttgaggagagcctggtggcccgggactggagccgggccctgcagctgacagaggtgtatggaagagatgtggatgacctgagcagcatcaaggatgctgtgctgagctgtgctgtggcctgtgacaaggagggctggcagtacctgtttcctgtgaaggatgccagcctgcggagccggctggccctgcagtttgtggaccgctggcccctggagagctgcctggagatcctggcctactgcatcagtgacacagctgtgcaggagggcctgaagtgtgagctgcagaggaagctggccgagctgcaggtgtaccagaagatcctgggcctgcagagcccccctgtgtggtgtgactggcagaccctgcggagctgctgcgtggaggaccccagcacagtgatgaacatgatcctggaggcccaggagtatgagctgtgtgaggagtggggctgcctgtaccccatcccccgggagcacctgatcagcctgcaccagaagcacctgctgcacctgctggagcggcgggaccatgacaaggccctgcagctgctgcggcgcatcccagaccccaccatgtgcctggaggtgacagagcagagcctggaccagcacaccagcctggccaccagccacttcctggccaactacctgaccacccacttctacggccagctgacagctgtgcgccaccgggagatccaggccctgtatgtgggcagcaagatcctgctgaccctgcctgagcagcaccgggccagctacagccacctgagcagcaaccccctcttcatgctggagcagctgctgatgaacatgaaggtggactgggccaccgtggccgtgcagaccctgcagcagctgctggtgggccaggagatcggcttcaccatggatgaggtggacagcctgctgagccgctatgcagagaaggccctggacttcccctacccccagcgggagaagagaagtgacagcgtcatccacctgcaggagatcgtgcaccaggccgctgaccctgagaccctgcccaggagccccagcgctgagttcagccctgctgcccctcctggcatcagcagcatccacagccccagcctgcgggagaggagcttcccccccacccagcccagccaggagtttgtgcccccagccaccccaccagcccggcaccagtgggtgcctgatgaaacagagagcatctgcatggtgtgctgccgggagcacttcaccatgttcaacagaagacaccactgcagaagatgtggccgcctggtgtgcagcagctgcagcaccaagaagatggtggtggagggctgcagagaaaatcctgcccgggtgtgtgaccagtgctacagctactgcaacaaggatgtgcctgaggagcccagcgagaagccagaggccctggacagcagcaagaatgaaagccccccctacagctttgtggtgcgggtgcccaaggcagatgaggtggagtggatcctggacctgaaggaggaggagaatgagctggtgcgctctgagttctactatgagcaggcccccagcgccagcctgtgcatcgccatcctgaacctgcaccgggacagcatcgcctgtggccaccagctgattgagcactgctgccgcctgagcaagggcctgaccaaccctgaggtggatgctggcctgctgacagacatcatgaagcagctgctcttcagcgccaagatgatgtttgtgaaggccggccagagccaggacctggccctgtgtgacagctacatcagcaaggtggatgtgctgaacatcctggtggccgccgcctacagacatgtgcccagcctggaccagatcctgcagcctgctgctgtgacccggctgaggaaccagctgctggaggccgagtactaccagctgggcgtggaggtgtccaccaagacaggcctggacaccaccggggcctggcacgcctggggcatggcctgcctgaaggccggcaacctgacagctgcccgggagaagttcagccgctgcctgaagcccccatttgacctgaaccagctgaaccacggcagccggctggtgcaggatgtggtggagtacctggagagcacagtgcggccctttgtgtccctgcaggatgatgactactttgccaccctgcgggagctggaggccaccctgcggacccagagcctgagcctggccgtcatccctgagggcaagatcatgaacaacacctactaccaggagtgcctcttctacctgcacaactacagcaccaacctggccatcatctccttctacgtgcgccacagctgcctgcgggaggccctgctgcacctgctgaacaaggagagccccccagaggtgttcatcgagggcatcttccagcccagctacaagagcggcaagctgcacaccctggagaacctgctggagagcattgaccccaccctggagagctggggcaagtacctgattgctgcctgccagcacctgcagaagaagaactactaccacatcctgtatgagctgcagcagttcatgaaggaccaggtgcgggccgccatgacctgcatccgcttcttcagccacaaggccaagagctacacagagctgggggagaagctgtcctggctgctgaaggccaaggaccacctgaagatctacctgcaggagaccagccgcagcagcggcaggaagaagaccaccttcttcaggaagaagatgacagctgctgatgtgagccgccacatgaacaccctgcagctgcagatggaggtgacccgcttcctgcaccgctgtgagagcgctggcaccagccagatcaccaccctgcccctgcccaccctgtttggaaacaaccacatgaagatggatgtggcctgcaaggtgatgctgggcggcaagaatgtggaggatggctttggaattgccttccgggtgctgcaggacttccagctggatgctgccatgacctactgccgggccgcccggcagctggtggagaaggagaagtacagcgagatccagcagctgctgaagtgtgtgtctgagagcggcatggccgccaagagtgatggagacaccatcctgctgaactgcctggaggccttcaagaggatccccccccaggagctggagggcctcatccaggccatccacaatgatgacaacaaggtgcgggcctacctgatctgctgcaagctgcggagcgcctacctgattgctgtgaagcaggagcacagccgggccacagccctggtgcagcaggtgcagcaggccgccaagagcagtggagatgctgtggtgcaggacatctgtgcccagtggctgctgaccagccaccccaggggggcccacggccctggcagcaggaagtag

SEQ ID NO: 177127 - DNA, 1119 bp, synthetic construct
  misc_feature 1..1119: note = Description of Artificial Sequence: Synthetic coding sequence
  source 1..1119: mol_type = other DNA
atgcagaccagcgagcgggagggcagcggccctgagctgagccccagcgtgatgcctgaggcccccctggagagcccccccttccccaccaagagccctgcctttgacctcttcaacctggtgctgagctacaagaggctggagatctacctggagcccctgaaggatgctggggcctggtacagcgtgggcgccctgatgatctctgtgcctgccctgctgggctacctgcaggaggtgtgccgggcccggctgcctgacagcgagctgatgaggaggaagtaccacagcgtgcggcaggaggacctgcagaggggccgcctgagcaggcctgaggccgtggccgaggtgaagagcttcctgatccagctggaggccttcctgagccggctgtgctgcacctgtgaggccgcctacagagtgctgcactgggagaaccctgtggtgagcagccagttctacggggccctgctgggcaccgtgtgcatgctgtacctgctgcccctgtgctgggtgctgaccctgctgaacagcaccctcttcctgggcaatgtggagttcttccgggtggtgtctgagtaccgggccagcctgcagcagaggatgaaccccaagcaggaggagcacgcctttgagagccccccacctccagatgtgggcggcaaggatggcctgatggacagcaccccagccctgacccccacagaggacctgaccccaggctctgtggaggaggccgaggaggccgagccagatgaggagttcaaggatgccattgaagaagatgatgaaggagccccctgcccagcagaagatgagctggccctgcaggacaatggcttcctgagcaagaatgaggtgctgcggagcaaggtgtcccggctgacagagcggctgaggaagcgctaccccaccaacaactttggaaactgcaccggctgcagcgccaccttctctgtgctgaagaagaggaggagctgcagcaactgtggcaacagcttctgcagccgctgctgcagcttcaaggtgcccaagagctccatgggcgccacagcccctgaggcccagcgggagaccgtgtttgtgtgtgccagctgcaaccagaccctgagcaagtag

SEQ ID NO: 177128 - DNA, 1251 bp, synthetic construct
  misc_feature 1..1251: note = Description of Artificial Sequence: Synthetic coding sequence
  source 1..1251: mol_type = other DNA
atgcagaccagcgagcgggagggcagcggccctgagctgagccccagcgtgatgcctgaggcccccctggagagcccccccttccccaccaagagccctgcctttgacctcttcaacctggtgctgagctacaagaggctggagatctacctggagcccctgaaggatgctggagatggagtgcgctacctgctgcgctggcagatgcccctgtgcagcctgctgacctgcctgggcctgaatgtgctcttcctgaccctgaatgaaggagcctggtacagcgtgggcgccctgatgatctctgtgcctgccctgctgggctacctgcaggaggtgtgccgggcccggctgcctgacagcgagctgatgaggaggaagtaccacagcgtgcggcaggaggacctgcagaggggccgcctgagcaggcctgaggccgtggccgaggtgaagagcttcctgatccagctggaggccttcctgagccggctgtgctgcacctgtgaggccgcctacagagtgctgcactgggagaaccctgtggtgagcagccagttctacggggccctgctgggcaccgtgtgcatgctgtacctgctgcccctgtgctgggtgctgaccctgctgaacagcaccctcttcctgggcaatgtggagttcttccgggtggtgtctgagtaccgggccagcctgcagcagaggatgaaccccaagcaggaggagcacgcctttgagagccccccacctccagatgtgggcggcaaggatggcctgatggacagcaccccagccctgacccccacagagagcctgagcagccaggacctgaccccaggctctgtggaggaggccgaggaggccgagccagatgaggagttcaaggatgccatcgaggagacccacctggtggtgctggaggatgatgaaggagccccctgcccagcagaagatgagctggccctgcaggacaatggcttcctgagcaagaatgaggtgctgcggagcaaggtgtcccggctgacagagcggctgaggaagcgctaccccaccaacaactttggaaactgcaccggctgcagcgccaccttctctgtgctgaagaagaggaggagctgcagcaactgtggcaacagcttctgcagccgctgctgcagcttcaaggtgcccaagagctccatgggcgccacagcccctgaggcccagcgggagaccgtgtttgtgtgtgccagctgcaaccagaccctgagcaagtag

SEQ ID NO: 177129 - DNA, 957 bp, synthetic construct
  misc_feature 1..957: note = Description of Artificial Sequence: Synthetic coding sequence
  source 1..957: mol_type = other DNA
atgcagaccagcgagcgggagggcagcggccctgagctgagccccagcgtgatgcctgaggcccccctggagagcccccccttccccaccaagagccctgcctttgacctcttcaacctggtgctgagctacaagaggctggagatctacctggagcccctgaaggatgctggagatggagtgcgctacctgctgagcctcatccagctggaggccttcctgagccggctgtgctgcacctgtgaggccgcctacagagtgctgcactgggagaaccctgtggtgagcagccagttctacggggccctgctgggcaccgtgtgcatgctgtacctgctgcccctgtgctgggtgctgaccctgctgaacagcaccctcttcctgggcaatgtggagttcttccgggtggtgtctgagtaccgggccagcctgcagcagaggatgaaccccaagcaggaggagcacgcctttgagagccccccacctccagatgtgggcggcaaggatggcctgatggacagcaccccagccctgacccccacagaggacctgaccccaggctctgtggaggaggccgaggaggccgagccagatgaggagttcaaggatgccattgaagaagatgatgaaggagccccctgcccagcagaagatgagctggccctgcaggacaatggcttcctgagcaagaatgaggtgctgcggagcaaggtgtcccggctgacagagcggctgaggaagcgctaccccaccaacaactttggaaactgcaccggctgcagcgccaccttctctgtgctgaagaagaggaggagctgcagcaactgtggcaacagcttctgcagccgctgctgcagcttcaaggtgcccaagagctccatgggcgccacagcccctgaggcccagcgggagaccgtgtttgtgtgtgccagctgcaaccagaccctgagcaagtag

SEQ ID NO: 177130 - DNA, 1215 bp, synthetic construct
  misc_feature 1..1215: note = Description of Artificial Sequence: Synthetic coding sequence
  source 1..1215: mol_type = other DNA
atgcagaccagcgagcgggagggcagcggccctgagctgagccccagcgtgatgcctgaggcccccctggagagcccccccttccccaccaagagccctgcctttgacctcttcaacctggtgctgagctacaagaggctggagatctacctggagcccctgaaggatgctggagatggagtgcgctacctgctgcgctggcagatgcccctgtgcagcctgctgacctgcctgggcctgaatgtgctcttcctgaccctgaatgaaggagcctggtacagcgtgggcgccctgatgatctctgtgcctgccctgctgggctacctgcaggaggtgtgccgggcccggctgcctgacagcgagctgatgaggaggaagtaccacagcgtgcggcaggaggacctgcagaggggccgcctgagcaggcctgaggccgtggccgaggtgaagagcttcctgatccagctggaggccttcctgagccggctgtgctgcacctgtgaggccgcctacagagtgctgcactgggagaaccctgtggtgagcagccagttctacggggccctgctgggcaccgtgtgcatgctgtacctgctgcccctgtgctgggtgctgaccctgctgaacagcaccctcttcctgggcaatgtggagttcttccgggtggtgtctgagtaccgggccagcctgcagcagaggatgaaccccaagcaggaggagcacgcctttgagagccccccacctccagatgtgggcggcaaggatggcctgatggacagcaccccagccctgacccccacagaggacctgaccccaggctctgtggaggaggccgaggaggccgagccagatgaggagttcaaggatgccattgaagaagatgatgaaggagccccctgcccagcagaagatgagctggccctgcaggacaatggcttcctgagcaagaatgaggtgctgcggagcaaggtgtcccggctgacagagcggctgaggaagcgctaccccaccaacaactttggaaactgcaccggctgcagcgccaccttctctgtgctgaagaagaggaggagctgcagcaactgtggcaacagcttctgcagccgctgctgcagcttcaaggtgcccaagagctccatgggcgccacagcccctgaggcccagcgggagaccgtgtttgtgtgtgccagctgcaaccagaccctgagcaagtag

SEQ ID NO: 177131 - DNA, 936 bp, synthetic construct
  misc_feature 1..936: note = Description of Artificial Sequence: Synthetic coding sequence
  source 1..936: mol_type = other DNA
atgatctctgtgcctgccctgctgggctacctgcaggaggtgtgccgggcccggctgcctgacagcgagctgatgaggaggaagtaccacagcgtgcggcaggaggacctgcagaggggccgcctgagcaggcctgaggccgtggccgaggtgaagagcttcctgatccagctggaggccttcctgagccggctgtgctgcacctgtgaggccgcctacagagtgctgcactgggagaaccctgtggtgagcagccagttctacggggccctgctgggcaccgtgtgcatgctgtacctgctgcccctgtgctgggtgctgaccctgctgaacagcaccctcttcctgggcaatgtggagttcttccgggtggtgtctgagtaccgggccagcctgcagcagaggatgaaccccaagcaggaggagcacgcctttgagagccccccacctccagatgtgggcggcaaggatggcctgatggacagcaccccagccctgacccccacagagagcctgagcagccaggacctgaccccaggctctgtggaggaggccgaggaggccgagccagatgaggagttcaaggatgccatcgaggaggatgatgagggcgccccctgcccagcagaagatgagctggccctgcaggacaatggcttcctgagcaagaatgaggtgctgcggagcaaggtgtcccggctgacagagcggctgaggaagcgctaccccaccaacaactttggaaactgcaccggctgcagcgccaccttctctgtgctgaagaagagaagaagctgcagcaactgtggcaacagcttctgcagccgctgctgcagcttcaaggtgcccaagagctccatgggcgccacagcccctgaggcccagcgggagaccgtgtttgtgtgtgccagctgcaaccagaccctgagcaagtag

SEQ ID NO: 177132 - DNA, 861 bp, synthetic construct
  misc_feature 1..861: note = Description of Artificial Sequence: Synthetic coding sequence
  source 1..861: mol_type = other DNA
atgcagaccagcgagcgggagggcagcggccctgagctgagccccagcgtgatgcctgaggcccccctggagagcccccccttccccaccaagagccctgcctttgacctcttcaacctggtgctgagctacaagaggctggagatctacctggagcccctgaaggatgctggagatggagtgcgctacctgctgcgcttctacggggccctgctgggcaccgtgtgcatgctgtacctgctgcccctgtgctgggtgctgaccctgctgaacagcaccctcttcctgggcaatgtggagttcttccgggtggtgtctgagtaccgggccagcctgcagcagaggatgaaccccaagcaggaggagcacgcctttgagagccccccacctccagatgtgggcggcaaggatggcctgatggacagcaccccagccctgacccccacagaggacctgaccccaggctctgtggaggaggccgaggaggccgagccagatgaggagttcaaggatgccattgaagaagatgatgaaggagccccctgcccagcagaagatgagctggccctgcaggacaatggcttcctgagcaagaatgaggtgctgcggagcaaggtgtcccggctgacagagcggctgaggaagcgctaccccaccaacaactttggaaactgcaccggctgcagcgccaccttctctgtgctgaagaagaggaggagctgcagcaactgtggcaacagcttctgcagccgctgctgcagcttcaaggtgcccaagagctccatgggcgccacagcccctgaggcccagcgggagaccgtgtttgtgtgtgccagctgcaaccagaccctgagcaagtag

SEQ ID NO: 177133 - DNA, 1236 bp, synthetic construct
  misc_feature 1..1236: note = Description of Artificial Sequence: Synthetic coding sequence
  source 1..1236: mol_type = other DNA
atgcagaccagcgagcgggagggcagcggccctgagctgagccccagcgtgatgcctgaggcccccctggagagcccccccttccccaccaagagccctgcctttgacctcttcaacctggtgctgagctacaagaggctggagatctacctggagcccctgaaggatgctggagatggagtgcgctacctgctgcgctggcagatgcccctgtgcagcctgctgacctgcctgggcctgaatgtgctcttcctgaccctgaatgaaggagcctggtacagcgtgggcgccctgatgatctctgtgcctgccctgctgggctacctgcaggaggtgtgccgggcccggctgcctgacagcgagctgatgaggaggaagtaccacagcgtgcggcaggaggacctgcagaggggccgcctgagcaggcctgaggccgtggccgaggtgaagagcttcctgatccagctggaggccttcctgagccggctgtgctgcacctgtgaggccgcctacagagtgctgcactgggagaaccctgtggtgagcagccagttctacggggccctgctgggcaccgtgtgcatgctgtacctgctgcccctgtgctgggtgctgaccctgctgaacagcaccctcttcctgggcaatgtggagttcttccgggtggtgtctgagtaccgggccagcctgcagcagaggatgaaccccaagcaggaggagcacgcctttgagagccccccacctccagatgtgggcggcaaggatggcctgatggacagcaccccagccctgacccccacagaggacctgaccccaggctctgtggaggaggccgaggaggccgagccagatgaggagttcaaggatgccatcgaggagacccacctggtggtgctggaggatgatgagggcgccccctgcccagcagaagatgagctggccctgcaggacaatggcttcctgagcaagaatgaggtgctgcggagcaaggtgtcccggctgacagagcggctgaggaagcgctaccccaccaacaactttggaaactgcaccggctgcagcgccaccttctctgtgctgaagaagagaagaagctgcagcaactgtggcaacagcttctgcagccgctgctgcagcttcaaggtgcccaagagctccatgggcgccacagcccctgaggcccagcgggagaccgtgtttgtgtgtgccagctgcaaccagaccctgagcaagtag

SEQ ID NO: 177134 - DNA, 1185 bp, synthetic construct
  misc_feature 1..1185: note = Description of Artificial Sequence: Synthetic coding sequence
  source 1..1185: mol_type = other DNA
ctggagagcccccccttccccaccaagagccctgcctttgacctcttcaacctggtgctgagctacaagaggctggagatctacctggagcccctgaaggatgctggagatggagtgcgctacctgctgcgctggcagatgcccctgtgcagcctgctgacctgcctgggcctgaatgtgctcttcctgaccctgaatgaaggagcctggtacagcgtgggcgccctgatgatctctgtgcctgccctgctgggctacctgcaggaggtgtgccgggcccggctgcctgacagcgagctgatgaggaggaagtaccacagcgtgcggcaggaggacctgcagaggggccgcctgagcaggcctgaggccgtggccgaggtgaagagcttcctgatccagctggaggccttcctgagccggctgtgctgcacctgtgaggccgcctacagagtgctgcactgggagaaccctgtggtgagcagccagttctacggggccctgctgggcaccgtgtgcatgctgtacctgctgcccctgtgctgggtgctgaccctgctgaacagcaccctcttcctgggcaatgtggagttcttccgggtggtgtctgagtaccgggccagcctgcagcagaggatgaaccccaagcaggaggagcacgcctttgagagccccccacctccagatgtgggcggcaaggatggcctgatggacagcaccccagccctgacccccacagagagcctgagcagccaggacctgaccccaggctctgtggaggaggccgaggaggccgagccagatgaggagttcaaggatgccatcgaggagacccacctggtggtgctggaggatgatgaaggagccccctgcccagcagaagatgagctggccctgcaggacaatggcttcctgagcaagaatgaggtgctgcggagcaaggtgtcccggctgacagagcggctgaggaagcgctaccccaccaacaactttggaaactgcaccggctgcagcgccaccttctctgtgctgaagaagaggaggagctgcagcaactgtggcaacagcttctgcagccgctgctgcagcttcaaggtgcccaagagctccatgggcgccacagcccctgaggcccagcgggagaccgtgtttgtgtgtgccagctgcaaccagaccctgagcaagtag

SEQ ID NO: 177135 - DNA, 1047 bp, synthetic construct
  misc_feature 1..1047: note = Description of Artificial Sequence: Synthetic coding sequence
  source 1..1047: mol_type = other DNA
atgcagaccagcgagcgggagggcagcggccctgagctgagccccagcgtgatgcctgaggcccccctggagagcccccccttccccaccaagagccctgcctttgacctcttcaacctggtgctgagctacaagaggctggagatctacctggagcccctgaaggatgctggagatggagtgcgctacctgctgcgctggcagatgcccctgtgcagcctgctgacctgcctgggcctgaatgtgctcttcctgaccctgaatgaaggagcctggtacagcgtgggcgccctgatgatctctgtgcctgccctgctgggctacctgcaggaggtgtgccgggcccggctgcctgacagcgagctgatgaggaggaagtaccacagcgtgcggcaggaggacctgcagaggggccgcctgagcaggcctgaggccgtggccgaggtgaagagcttcctgatccagctggaggccttcctgagccggctgtgctgcacctgtgaggccgcctacagagtgctgcactgggagaaccctgtggtgagcagccagttctacggggccctgctgggcaccgtgtgcatgctgtacctgctgcccctgtgctgggtgctgaccctgctgaacagcaccctcttcctgggcaatgtggagttcttccgggtggtgtctgagtaccgggccagcctgcagcagaggatgaaccccaagcaggaggagcacgcctttgagagccccccacctccagatgtgggcggcaaggatggcctgatggacagcaccccagccctgacccccacagaggacctgaccccaggctctgtggaggaggccgaggaggccgagccagatgaggagttcaaggatgccattgaagaagatgatgaaggagccccctgcccagcagaagatgagctggccctgcaggacaatggcttcctgagcaagaatgaggtgctgcggagcaaggtgtcccggctgacagagcggctgaggaagcgctaccccaccaacaactttggagtgactggagctggcagcagctag

SEQ ID NO: 177136 - DNA, 2664 bp, synthetic construct
  misc_feature 1..2664: note = Description of Artificial Sequence: Synthetic coding sequence
  source 1..2664: mol_type = other DNA
atgatgaaccgcttcaggaagtggctgtacaagcccaagagaagtgacccccagctgctggcccgcttctactatgcagatgaggagctgaaccaggtggccgctgagctggacagcctggatggcaggaaggacccccagcgctgcaccctgctggtgtcccagttccgcagctgccaggacaacgtgctgaacatcatcaaccagatcatggatgagtgcatcccccaggaccgggccccccgggacttctgtgtgaagtttcctgaggagatcagacatgacaacctggccggccagctgtggtttggagctgagtgcctggccgccggcagcatcatcatgaaccgggagctggagagcatggccatgaggcccctggccaaggagctgaccaggagcctggaggatgtgcggggggccctgcgggaccaggccctgcgggacctgaacacctacacagagaagatgagggaggccctgcggcactttgatgtgctgtttgctgagtttgagctgtcctatgtgtctgccatggtgcctgtgaagagcccccgggagtactacgtgcagcaggaggtgattgtgctcttctgtgaaacagtggagcgggccctggactttggctacctgacccaggacatgattgatgattatgagcccgccctgatgttcagcatcccccggctggccatcgtgtgtggcctggtggtgtatgcagatggccccctgaacctggacaggaaggtggaggacatgtctgagctgttccggcccttccacaccctgctgaggaagatccgggacctgctgcagaccctgacagaggaggagctgcacaccctggagaggaacctgtgcatcagccaggatgtggagttccccatccgggcagatgtgcagggccctgctgccctggccccagccctgagcgcccccctgcccccagagggccccctgagcgccaaggccaaggaccctgatgctgagctggcctgcagcatgcagtatgatgaccaggagctggagcagctgagcaggatggtgcacagagctggagatgagatgagcagcctgctgagcccccccatcgcctgccagagccctgcccacaggcctggagctgagggcagccctggaggagaggccagccctggccggccccggctgcggagcggcagtgatgaggaggagagggtcttcttcatggatgatgtggagggcacagctgaggccctggcccggcctgagagccctgctggccccttcggctgggccggcagcacctgggccgacccccaggagaagggccagggcggccctggaggagctgctggcatcagcctgcctgccagcgagaaggaggaggacctgagcaacaacaacctggaggccgagggcacagatggagccagcctggccggcaccagcagctgcagctgcctggacagccggctgcacctggatggctgggaggtgggcgcagatgatgctgagacagctgagatgattgcccacaggactggaggcatgaagctgagcgccaccgtcatcttcaaccccaagagccccaccagcctggacagcgctgtggccacccaggaggccgccagcgagcctgtggccgagggcatggatggcggcccccacaagctgagcactggagccaccaactgcctgctgcacagctgtgtgtgctgcggcagctgtggggacagcagagaagatgtggtggagcggctgcgggagaagtgcagccctggaggagtgattggagccagctatgctgctggcctggccaaggccagtgaccgggcccctgagcggcaggaggaggcccctcctccttctgaagatgccagcaatggccgggagcccaaggcccccaccagtgacaagtgcctgccccacaccagcggcagccaggtggacacagccagcggcctgcagggcgaggccggcgtggccggccagcaggagcctgaggcccgggagctgcacgccggcagccccagcgcccacgaggccccccaggccctgagcggcagcagcagcagcacagctggcagctgcagcagtgacaagatgggccctgaggccgccccagctgccacccatgctgccccccaggccacccgggagaagatccgcagccgcttccacggcagccatgacctgatccaccggctgtttgtgtgcatctctggagtggccgaccagctgcagaccaactatgccagtgacctgcggagcatcctgaagaccctgtttgaggtgatggccaccaagccagagacagatgacaaggagaagctgaggaaggtgacccagaccctgcggtctgctgccctggaggactgtgccctgtgccaggagaccctgagcagcagcgagctggccgccaagaccagagatggagactttgaagatcctcctgagtgggtgcctgatgaggcctgtggcttctgcacagcctgcaaggcccccttcaccgtcatccggaggaagcaccactgccgcagctgtgggaagatcttctgcagccgctgcagcagccacagcgcccccctgcccaggtatggccaggtgaagcctgtgcgggtgtgcacccactgctacatgttccacgtgacccccttctacagcgacaaggccggcctgtag

SEQ ID NO: 177137 - DNA, 2574 bp, synthetic construct
  misc_feature 1..2574: note = Description of Artificial Sequence: Synthetic coding sequence
  source 1..2574: mol_type = other DNA
atgatgaaccgcttcaggaagtggctgtacaagcccaagagaagtgacccccagctgctggcccgcttctactatgcagatgaggagctgaaccaggtggccgctgagctggacagcctggatggcaggaaggacccccagcgctgcaccctgctggtgtcccagttccgcagctgccaggacaacgtgctgaacatcatcaaccagatcatggatgagtgcatcccccaggaccgggccccccgggacttctgtgtgaagtttcctgaggagatcagacatgacaacctggccggccagctgtggtttggagctgagtgcctggccgccggcagcatcatcatgaaccgggagctggagagcatggccatgaggcccctggccaaggagctgaccaggagcctggaggatgtgcggggggccctgcgggaccaggccctgcgggacctgaacacctacacagagaagatgagggaggccctgcggcactttgatgtgctgtttgctgagtttgagctgtcctatgtgtctgccatggtgcctgtgaagagcccccgggagtactacgtgcagcaggaggtgattgtgctcttctgtgaaacagtggagagcggcctggtggtgtatgcagatggccccctgaacctggacaggaaggtggaggacatgtctgagctgttccggcccttccacaccctgctgaggaagatccgggacctgctgcagaccctgacagaggaggagctgcacaccctggagaggaacctgtgcatcagccaggatgtggagttccccatccgggcagatgtgcagggccctgctgccctggccccagccctgagcgcccccctgcccccagagggccccctgagcgccaaggccaaggaccctgatgctgagctggcctgcagcatgcagtatgatgaccaggagctggagcagctgagcaggatggtgcacagagctggagatgagatgagcagcctgctgagcccccccatcgcctgccagagccctgcccacaggcctggagctgagggcagccctggaggagaggccagccctggccggccccggctgcggagcggcagtgatgaggaggagagggtcttcttcatggatgatgtggagggcacagctgaggccctggcccggcctgagagccctgctggccccttcggctgggccggcagcacctgggccgacccccaggagaagggccagggcggccctggaggagctgctggcatcagcctgcctgccagcgagaaggaggaggacctgagcaacaacaacctggaggccgagggcacagatggagccagcctggccggcaccagcagctgcagctgcctggacagccggctgcacctggatggctgggaggtgggcgcagatgatgctgagacagctgagatgattgcccacaggactggaggcatgaagctgagcgccaccgtcatcttcaaccccaagagccccaccagcctggacagcgctgtggccacccaggaggccgccagcgagcctgtggccgagggcatggatggcggcccccacaagctgagcactggagccaccaactgcctgctgcacagctgtgtgtgctgcggcagctgtggggacagcagagaagatgtggtggagcggctgcgggagaagtgcagccctggaggagtgattggagccagctatgctgctggcctggccaaggccagtgaccgggcccctgagcggcaggaggaggcccctcctccttctgaagatgccagcaatggccgggagcccaaggcccccaccagtgacaagtgcctgccccacaccagcggcagccaggtggacacagccagcggcctgcagggcgaggccggcgtggccggccagcaggagcctgaggcccgggagctgcacgccggcagccccagcgcccacgaggccccccaggccctgagcggcagcagcagcagcacagctggcagctgcagcagtgacaagatgggccctgaggccgccccagctgccacccatgctgccccccaggccacccgggagaagatccgcagccgcttccacggcagccatgacctgatccaccggctgtttgtgtgcatctctggagtggccgaccagctgcagaccaactatgccagtgacctgcggagcatcctgaagaccctgtttgaggtgatggccaccaagccagagacagatgacaaggagaagctgaggaaggtgacccagaccctgcggtctgctgccctggaggactgtgccctgtgccaggagaccctgagcagcagcgagctggccgccaagaccagagatggagactttgaagatcctcctgagtgggtgcctgatgaggcctgtggcttctgcacagcctgcaaggcccccttcaccgtcatccggaggaagcaccactgccgcagctgtgggaagatcttctgcagccgctgcagcagccacagcgcccccctgcccaggtatggccaggtgaagcctgtgcgggtgtgcacccactgctacatgttccacgtgacccccttctacagcgacaaggccggcctgtag

SEQ ID NO: 177138 - DNA, 2454 bp, synthetic construct
  misc_feature 1..2454: note = Description of Artificial Sequence: Synthetic coding sequence
  source 1..2454: mol_type = other DNA
atggatgagtgcatcccccaggaccgggccccccgggacttctgtgtgaagtttcctgaggagatcagacatgacaacctggccggccagctgtggtttggagctgagtgcctggccgccggcagcatcatcatgaaccgggagctggagagcatggccatgaggcccctggccaaggagctgaccaggagcctggaggatgtgcggggggccctgcgggaccaggccctgcgggacctgaacacctacacagagaagatgagggaggccctgcggcactttgatgtgctgtttgctgagtttgagctgtcctatgtgtctgccatggtgcctgtgaagagcccccgggagtactacgtgcagcaggaggtgattgtgctcttctgtgaaacagtggagcgggccctggactttggctacctgacccaggacatgattgatgattatgagcccgccctgatgttcagcatcccccggctggccatcgtgtgtggcctggtggtgtatgcagatggccccctgaacctggacaggaaggtggaggacatgtctgagctgttccggcccttccacaccctgctgaggaagatccgggacctgctgcagaccctgacagaggaggagctgcacaccctggagaggaacctgtgcatcagccaggatgtggagttccccatccgggcagatgtgcagggccctgctgccctggccccagccctgagcgcccccctgcccccagagggccccctgagcgccaaggccaaggaccctgatgctgagctggcctgcagcatgcagtatgatgaccaggagctggagcagctgagcaggatggtgcacagagctggagatgagatgagcagcctgctgagcccccccatcgcctgccagagccctgcccacaggcctggagctgagggcagccctggaggagaggccagccctggccggccccggctgcggagcggcagtgatgaggaggagagggtcttcttcatggatgatgtggagggcacagctgaggccctggcccggcctgagagccctgctggccccttcggctgggccggcagcacctgggccgacccccaggagaagggccagggcggccctggaggagctgctggcatcagcctgcctgccagcgagaaggaggaggacctgagcaacaacaacctggaggccgagggcacagatggagccagcctggccggcaccagcagctgcagctgcctggacagccggctgcacctggatggctgggaggtgggcgcagatgatgctgagacagctgagatgattgcccacaggactggaggcatgaagctgagcgccaccgtcatcttcaaccccaagagccccaccagcctggacagcgctgtggccacccaggaggccgccagcgagcctgtggccgagggcatggatggcggcccccacaagctgagcactggagccaccaactgcctgctgcacagctgtgtgtgctgcggcagctgtggggacagcagagaagatgtggtggagcggctgcgggagaagtgcagccctggaggagtgattggagccagctatgctgctggcctggccaaggccagtgaccgggcccctgagcggcaggaggaggcccctcctccttctgaagatgccagcaatggccgggagcccaaggcccccaccagtgacaagtgcctgccccacaccagcggcagccaggtggacacagccagcggcctgcagggcgaggccggcgtggccggccagcaggagcctgaggcccgggagctgcacgccggcagccccagcgcccacgaggccccccaggccctgagcggcagcagcagcagcacagctggcagctgcagcagtgacaagatgggccctgaggccgccccagctgccacccatgctgccccccaggccacccgggagaagatccgcagccgcttccacggcagccatgacctgatccaccggctgtttgtgtgcatctctggagtggccgaccagctgcagaccaactatgccagtgacctgcggagcatcctgaagaccctgtttgaggtgatggccaccaagccagagacagatgacaaggagaagctgaggaaggtgacccagaccctgcggtctgctgccctggaggactgtgccctgtgccaggagaccctgagcagcagcgagctggccgccaagaccagagatggagactttgaagatcctcctgagtgggtgcctgatgaggcctgtggcttctgcacagcctgcaaggcccccttcaccgtcatccggaggaagcaccactgccgcagctgtgggaagatcttctgcagccgctgcagcagccacagcgcccccctgcccaggtatggccaggtgaagcctgtgcgggtgtgcacccactgctacatgttccacgtgacccccttctacagcgacaaggccggcctgtag

SEQ ID NO: 177139 - DNA, 1212 bp, synthetic construct
  misc_feature 1..1212: note = Description of Artificial Sequence: Synthetic coding sequence
  source 1..1212: mol_type = other DNA
atggagcccgccggcccctgtggcttctgcccagctggggaggtgcagcctgcccgctacacctgcccccgctgcaatgccccctactgcagcctgcgctgctaccgcacccacggcacctgtgccgagaacttctacagagaccaggtgctgggggagctgcggggctgcagcgccccacccagccggctggccagcgccctgcggcggctgcggcagcagcgggagacagaagatgagcctggagaggccggcctgagcagcggccctgcccctgggggcctgagcggcctgtgggagcggctggcccctggagagaaggccgcctttgagcggctgctgagcagaggagaggccggccgcctgctgcccccctggaggccctggtggtggaacagaggagctggcccccagctgctggaggagctggacaatgcccctggcagtgatgctgctgagctggagctggccccagcccggaccccaccagattctgtgaaggatgccagcgctgctgagcctgctgctgctgagcgggtgctgggagatgtgcctggggcctgcacccctgtggtgcccacccgcatcccagccatcgtgtccctgagccggggccctgtgagccccctggtgcgcttccagctgcccaacgtgctgtttgcctatgcccacaccctggccctgtaccacggcggagatgatgccctgctgagtgacttctgtgccaccctgctgggcgtgtctggggccctgggcgcccagcaggtgtttgccagcgctgaggaggccctgcaggccgccgcccacgtgctggaggccggggagcaccccccaggccccctgggcaccaggggggccatgcatgaggtggcccgcatcctgctgggggagggccccaccaaccagaagggctacaccctggccgccctgggggacctggcccagaccctgggccgggccaggaagcaggccgtggcccgggaggagcgggaccacctgtaccgggccaggaagaagtgccagttcctgctggcctggaccaatgaaaatgaggccgccctgacccccctggccctggactgtgcccgggcccaccaggcccatgctgtggtggccgaggaggtggccgccctgactggagagctggagcggctgtggggcggccctgtgcccccagcccccaggaccctcatcgaggagctgcccagctag

SEQ ID NO: 177140 - DNA, 1683 bp, synthetic construct
  misc_feature 1..1683: note = Description of Artificial Sequence: Synthetic coding sequence
  source 1..1683: mol_type = other DNA
atggccggcccccagcccctggccctgcagctggagcagctgctgaacccccggcccagcgaggccgaccctgaggccgaccctgaggaggccacagctgcccgggtgattgacagatttgatgaaggagaagatggagagggggacttcctggtggtgggcagcatcaggaagctggccagcgccagcctgctggacacagacaagcgctactgtgggaagaccaccagcaggaaggcctggaatgaagaccactgggagcagaccctgcccggcagcagtgatgaggagatcagtgatgaggagggcagcggagatgaagattctgagggcctgggcctggaggagtatgatgaagatgacctgggcgctgctgaggagcaggagtgtggggaccaccgggagagcaagaagagccgcagccacagcgccaagaccccaggcttctctgtgcagagcatcagtgactttgagaagttcaccaagggcatggatgacctgggcagcagcgaggaggaggaggatgaggagagcggcatggaggagggagatgatgctgaggacagccagggcgagagtgaagaagatcgggccggggacagaaattctgaagatgatggagtggtgatgaccttcagctctgtgaaggtgtctgaggaggtggagaagggccgggctgtgaagaaccagatcgccctgtgggaccagctgctggagggccgcatcaagctgcagaaggccctgctgaccaccaaccagctgccccagccagatgtgttccccctcttcaaggacaagggcggccctgagttcagcagcgccctgaagaacagccacaaggccctgaaggccctgctgcggagcctggtgggcctgcaggaggagctgctcttccagtacccagacacccgctacctggtggatggcaccaagcccaatgccggcagcgaggagatcagcagtgaagatgatgagctggtggaggagaagaagcagcagaggagaagagtgcctgccaagaggaagctggagatggaggactaccccagcttcatggccaagagatttgctgacttcaccgtgtacagaaacagaaccctgcagaagtggcatgacaagaccaagctggccagcggcaagctgggcaaaggatttggagcctttgagaggagcatcctgacccagattgaccacatcctgatggacaaggagcggctgctgcggaggacccagaccaagaggtctgtgtacagagtgctgggcaagccagagcctgctgcccagcctgtgcctgagagcctgcctggagagcctgagatcctgccccaggccccagccaatgcccacctgaaggacctggatgaggagatctttgatgatgatgacttctaccaccagctgctgcgggagctgattgaaaggaagaccagcagcctggaccccaatgaccaggtggccatgggccggcagtggctggccatccagaagctgcggagcaagatccacaagaaggtggacaggaaggccagcaaaggaaggaagctgcgcttccacgtgctgagcaagctgctgtccttcatggcccccatcgaccacaccaccatgaatgatgatgccaggacagagctgtaccgcagcctgtttggccagctgcaccccccagatgagggccacggggactag

SEQ ID NO: 177141 - DNA, 4134 bp, synthetic construct
  misc_feature 1..4134: note = Description of Artificial Sequence: Synthetic coding sequence
  source 1..4134: mol_type = other DNA
atggacaccagctctgtgggcggcctggagctgacagaccagacccctgtgctgctgggcagcacagccatggccaccagcctgaccaacgtgggcaacagcttcagcggccctgccaaccccctggtgagccgcagcaacaagttccagaacagctctgtggaggatgatgatgatgtggtgttcatcgagcctgtgcagcccccaccacccagcgtgcctgtggtggccgaccagaggaccatcaccttcaccagcagcaagaatgaggagctgcagggcaatgacagcaagatcacccccagcagcaaggagctggccagccagaagggctctgtgtctgagaccatcgtgattgatgatgaggaggacatggagaccaaccagggccaggagaagaacagcagcaacttcattgaaagaagacctcctgagaccaagaacagaacaaatgatgtggacttcagcaccagcagcttcagccgcagcaaggtgaatgccggcatgggcaacagcggcatcaccacagagccagacagcgagatccagatcgccaacgtgaccaccctggagaccggggtgtcctctgtgaatgatggccagctggagaacacagatggccgggacatgaacctgatgatcacccacgtgaccagcctgcagaacaccaacctgggagatgtgtccaatggcctgcagagcagcaactttggagtgaacatccagacctacacccccagcctgaccagccagaccaagacaggagtgggccccttcaaccctggccgcatgaatgtggccggagatgtgttccagaatggagagagcgccacccaccacaacccagacagctggatcagccagagcgccagcttccccaggaaccagaagcagcccggggtggacagcctgagccctgtggccagcctgcccaagcagatcttccagcccagcgtgcagcagcagcccaccaagcctgtgaaggtgacctgtgccaactgcaagaagcccctgcagaagggccagacagcctaccagaggaagggcagcgcccacctgttctgcagcaccacctgcctgagcagcttcagccacaagccagcccccaagaagctgtgtgtgatgtgcaagaaggacatcaccaccatgaagggcaccatcgtggcccaggtggacagcagcgagagcttccaggagttctgcagcaccagctgcctgagcctgtatgaggacaagcagaaccccaccaagggggccctgaacaagagccgctgcaccatctgtgggaagctgacagagatcagacatgaggtgtccttcaagaacatgacccacaagctgtgcagcgaccactgcttcaaccgctacaggatggccaacggcctcatcatgaactgctgtgagcagtgtggggagtacctgcccagcaaaggagctggcaacaacgtgctggtgattgatggccagcagaagcgcttctgctgccagagctgtgtgtctgagtacaagcaggtgggcagccaccccagcttcctgaaggaggtgcgggaccacatgcaggacagcttcctgatgcagcctgagaagtatggcaagctgaccacctgcaccggctgcaggacccagtgccgcttctttgacatgacccagtgcatcggccccaacggctacatggagccctactgcagcacagcctgcatgaacagccacaagaccaagtatgccaagagccagagcctgggcatcatctgccacttctgcaagaggaacagcctgccccagtaccaggccaccatgccagatggcaagctgtacaacttctgcaacagcagctgtgtggccaagttccaggccctgtccatgcagagcagccccaacggccagtttgtggcccccagcgacatccagctgaagtgcaactactgcaagaacagcttctgcagcaagccagagatcctggagtgggagaacaaggtgcaccagttctgcagcaagacctgcagtgatgactacaagaagctgcactgcatcgtgacctactgtgagtactgccaggaggagaagaccctgcatgaaacagtgaacttctctggagtgaagaggcccttctgcagcgagggctgcaagctgctgtacaagcaggactttgcccggcggctgggcctgcgctgtgtgacctgcaactactgcagccagctgtgcaagaagggggccaccaaggagctggatggagtggtgcgggacttctgcagcgaggactgctgcaagaagttccaggactggtactacaaggccgcccgctgtgactgctgcaagagccagggcaccctgaaggagcgggtgcagtggagaggagagatgaagcacttctgtgaccagcactgcctgctgcgcttctactgccagcagaatgagcccaacatgaccacccagaagggccctgagaacctgcactatgaccagggctgccagaccagcaggaccaagatgactggaagtgcccccccacccagccccacccccaacaaggagatgaagaacaaggctgtgctgtgcaagcccctgaccatgaccaaggccacctactgcaagccccacatgcagaccaagagctgccagacagatgacacctggaggacagaatatgtgcctgtgcccatccctgtgcctgtgtacatccctgtgcccatgcacatgtacagccagaacatccctgtgcccaccaccgtgcctgtgcctgtgcctgtgcctgtgttcctgcctgcccccctggacagcagcgagaagatcccagctgccatcgaggagctgaagagcaaggtgtccagtgatgccctggacacagagctgctgaccatgacagacatgatgtctgaagatgagggcaagacagagaccaccaacatcaacagcgtcatcatcgagacagacatcattggaagtgacctgctgaagaacagcgaccctgagacccagagctccatgccagatgtgccctatgagccagacctggacatcgagattgacttccccagggctgctgaggagctggacatggagaatgagttcctgctgccccctgtgtttggagaggagtatgaggagcagccccggcccaggagcaagaagaagggggccaagaggaaggctgtgtctggctaccagagccatgatgacagcagtgacaacagtgaatgttccttccccttcaagtacacctacggcgtgaatgcctggaagcactgggtgaagacccggcagctggatgaggacctgctggtgctggatgagctgaagagcagcaagtctgtgaagctgaaggaggacctgctgagccacaccacagctgagctgaactacggcctggcccactttgtgaatgagatccggcggcccaatggagaaaattatgccccagacagcatctactacctgtgcctgggcatccaggagtacctgtgtggcagcaacaggaaggacaacatcttcatcgaccccggctaccagacctttgagcaggagctgaacaagatcctgcgctcctggcagcccagcatcctgcctgatggcagcatcttcagccgggtggaggaggactacctgtggaggatcaagcagctgggcagccacagccctgtggccctgctgaacaccctcttctacttcaacaccaagtacttcggcctgaagacagtggagcagcacctgcggctgagctttggcaccgtcttccgccactggaagaagaaccccctgaccatggagaacaaggcctgcctgcgctaccaggtgagcagcctgtgtggcacagacaatgaagacaagatcaccaccgggaagaggaagcatgaagatgatgagcctgtgtttgagcagatcgagaacacagccaaccccagccgctgccctgtgaagatgtttgagtgctacctgagcaagagcccccagaacctgaaccagaggatggatgtgttctacctgcagcctgagtgcagcagcagcacagacagccctgtgtggtacaccagcaccagcctggacaggaacaccctggagaacatgctggtgcgggtgctgctggtgaaggacatctatgacaaggacaactatgagctggatgaggacacagactag

SEQ ID NO: 177142 - DNA, 4128 bp, synthetic construct
  misc_feature 1..4128: note = Description of Artificial Sequence: Synthetic coding sequence
  source 1..4128: mol_type = other DNA
atggacaccagctctgtgggcggcctggagctgacagaccagacccctgtgctgctgggcagcacagccatggccaccagcctgaccaacgtgggcaacagcttcagcggccctgccaaccccctggtgagccgcagcaacaagttccagaacagctctgtggaggatgatgatgatgtggtgttcatcgagcctgtgcagcccccaccacccagcgtgcctgtggtggccgaccagaggaccatcaccttcaccagcagcaagaatgaggagctgcagggcaatgacagcaagatcacccccagcagcaaggagctggccagccagaagggctctgtgtctgagaccatcgtgattgatgatgaggaggacatggagaccaaccagggccaggagaagaacagcagcaacttcattgaaagaagacctcctgagaccaagaacagaacaaatgatgtggacttcagcaccagcagcttcagccgcagcaaggtgaatgccggcatgggcaacagcggcatcaccacagagccagacagcgagatccagatcgccaacgtgaccaccctggagaccggggtgtcctctgtgaatgatggccagctggagaacacagatggccgggacatgaacctgatgatcacccacgtgaccagcctgcagaacaccaacctgggagatgtgtccaatggcctgcagagcagcaactttggagtgaacatccagacctacacccccagcctgaccagccagaccaagacaggagtgggccccttcaaccctggccgcatgaatgtggccggagatgtgttccagaatggagagagcgccacccaccacaacccagacagctggatcagccagagcgccagcttccccaggaaccagaagcagcccggggtggacagcctgagccctgtggccagcctgcccaagcagatcttccagcccagcgtgcagcagcagcccaccaagcctgtgaaggtgacctgtgccaactgcaagaagcccctgcagaagggccagacagcctaccagaggaagggcagcgcccacctgttctgcagcaccacctgcctgagcagcttcagccacaagccagcccccaagaagctgtgtgtgatgtgcaagaaggacatcaccaccatgaagggcaccatcgtggcccaggtggacagcagcgagagcttccaggagttctgcagcaccagctgcctgagcctgtatgaggacaagcagaaccccaccaagggggccctgaacaagagccgctgcaccatctgtgggaagctgacagagatcagacatgaggtgtccttcaagaacatgacccacaagctgtgcagcgaccactgcttcaaccgctacaggatggccaacggcctcatcatgaactgctgtgagcagtgtggggagtacctgcccagcaaaggagctggcaacaacgtgctggtgattgatggccagcagaagcgcttctgctgccagagctgtgtgtctgagtacaagcaggtgggcagccaccccagcttcctgaaggaggtgcgggaccacatgcaggacagcttcctgatgcagcctgagaagtatggcaagctgaccacctgcaccggctgcaggacccagtgccgcttctttgacatgacccagtgcatcggccccaacggctacatggagccctactgcagcacagcctgcatgaacagccacaagaccaagtatgccaagagccagagcctgggcatcatctgccacttctgcaagaggaacagcctgccccagtaccaggccaccatgccagatggcaagctgtacaacttctgcaacagcagctgtgtggccaagttccaggccctgtccatgcagagcagccccaacggccagtttgtggcccccagcgacatccagctgaagtgcaactactgcaagaacagcttctgcagcaagccagagatcctggagtgggaggccagcctgcaccagttctgcagcaagacctgcagtgatgactacaagaagctgcactgcatcgtgacctactgtgagtactgccaggaggagaagaccctgcatgaaacagtgaacttctctggagtgaagaggcccttctgcagcgagggctgcaagctgctgtacaagcaggactttgcccggcggctgggcctgcgctgtgtgacctgcaactactgcagccagctgtgcaagaagggggccaccaaggagctggatggagtggtgcgggacttctgcagcgaggactgctgcaagaagttccaggactggtactacaaggcctgtgactgctgcaagagccagggcaccctgaaggagcgggtgcagtggagaggagagatgaagcacttctgtgaccagcactgcctgctgcgcttctactgccagcagaatgagcccaacatgaccacccagaagggccctgagaacctgcactatgaccagggctgccagaccagcaggaccaagatgactggaagtgcccccccacccagccccacccccaacaaggagatgaagaacaaggctgtgctgtgcaagcccctgaccatgaccaaggccacctactgcaagccccacatgcagaccaagagctgccagacagatgacacctggaggacagaatatgtgcctgtgcccatccctgtgcctgtgtacatccctgtgcccatgcacatgtacagccagaacatccctgtgcccaccaccgtgcctgtgcctgtgcctgtgcctgtgttcctgcctgcccccctggacagcagcgagaagatcccagctgccatcgaggagctgaagagcaaggtgtccagtgatgccctggacacagagctgctgaccatgacagacatgatgtctgaagatgagggcaagacagagaccaccaacatcaacagcgtcatcatcgagacagacatcattggaagtgacctgctgaagaacagcgaccctgagacccagagctccatgccagatgtgccctatgagccagacctggacatcgagattgacttccccagggctgctgaggagctggacatggagaatgagttcctgctgccccctgtgtttggagaggagtatgaggagcagccccggcccaggagcaagaagaagggggccaagaggaaggctgtgtctggctaccagagccatgatgacagcagtgacaacagtgaatgttccttccccttcaagtacacctacggcgtgaatgcctggaagcactgggtgaagacccggcagctggatgaggacctgctggtgctggatgagctgaagagcagcaagtctgtgaagctgaaggaggacctgctgagccacaccacagctgagctgaactacggcctggcccactttgtgaatgagatccggcggcccaatggagaaaattatgccccagacagcatctactacctgtgcctgggcatccaggagtacctgtgtggcagcaacaggaaggacaacatcttcatcgaccccggctaccagacctttgagcaggagctgaacaagatcctgcgctcctggcagcccagcatcctgcctgatggcagcatcttcagccgggtggaggaggactacctgtggaggatcaagcagctgggcagccacagccctgtggccctgctgaacaccctcttctacttcaacaccaagtacttcggcctgaagacagtggagcagcacctgcggctgagctttggcaccgtcttccgccactggaagaagaaccccctgaccatggagaacaaggcctgcctgcgctaccaggtgagcagcctgtgtggcacagacaatgaagacaagatcaccaccgggaagaggaagcatgaagatgatgagcctgtgtttgagcagatcgagaacacagccaaccccagccgctgccctgtgaagatgtttgagtgctacctgagcaagagcccccagaacctgaaccagaggatggatgtgttctacctgcagcctgagtgcagcagcagcacagacagccctgtgtggtacaccagcaccagcctggacaggaacaccctggagaacatgctggtgcgggtgctgctggtgaaggacatctatgacaaggacaactatgagctggatgaggacacagactag

SEQ ID NO: 177143 - DNA, 4128 bp, synthetic construct; identical to SEQ ID NO: 177142
  misc_feature 1..4128: note = Description of Artificial Sequence: Synthetic coding sequence
  source 1..4128: mol_type = other DNA

SEQ ID NO: 177144 - DNA, 1134 bp, synthetic construct
  misc_feature 1..1134: note = Description of Artificial Sequence: Synthetic coding sequence
  source 1..1134: mol_type = other DNA
atgcaggacagcttcctgatgcagcctgagaagtatggcaagctgaccacctgcaccggctgcaggacccagtgccgcttctttgacatgacccagtgcatcggccccaacggctacatggagccctactgcagcacagcctgcatgaacagccacaagaccaagtatgccaagagccagagcctgggcatcatctgccacttctgcaagaggaacagcctgccccagtaccaggccaccatgccagatggcaagctgtacaacttctgcaacagcagctgtgtggccaagttccaggccctgtccatgcagagcagccccaacggccagtttgtggcccccagcgacatccagctgaagtgcaactactgcaagaacagcttctgcagcaagccagagatcctggagtgggagaacaaggtgcaccagttctgcagcaagacctgcagtgatgactacaagaagctgcactgcatcgtgacctactgtgagtactgccaggaggagaagaccctgcatgaaacagtgaacttctctggagtgaagaggcccttctgcagcgagggctgcaagctgctgtacaagcaggactttgcccggcggctgggcctgcgctgtgtgacctgcaactactgcagccagctgtgcaagaagggggccaccaaggagctggatggagtggtgcgggacttctgcagcgaggactgctgcaagaagttccaggactggtactacaaggccgcccgctgtgactgctgcaagagccagggcaccctgaaggagcgggtgcagtggagaggagagatgaagcacttctgtgaccagcactgcctgctgcgcttctactgccagcagaatgagcccaacatgaccacccagaagggccctgagaacctgcactatgaccagggctgccagaccagcaggaccaagatgactggaagtgcccccccacccagccccacccccaacaaggagatgaagaacaaggctgtgctgtgcaagcccctgaccatgaccaaggccacctactgcaagccccacatgcagaccaagagctgccagacagacatcacctggaggatccagcacctgatcctgaaccactatgaccagagcctcatcaaggcctag

SEQ ID NO: 177145 - DNA, 4134 bp, synthetic construct; identical to SEQ ID NO: 177141
  misc_feature 1..4134: note = Description of Artificial Sequence: Synthetic coding sequence
  source 1..4134: mol_type = other DNA

SEQ ID NO: 177146 - DNA, 4113 bp, synthetic construct
  misc_feature 1..4113: note = Description of Artificial Sequence: Synthetic coding sequence
  source 1..4113: mol_type = other DNA
atggaccccagcgacttccccagcccctttgaccccctgaccctgcctgagaagcccctggccggggacctgcctgtggacatggagtttggagaggacctgctggagagccagacagcccccacccggggctgggcccctcctggccccagccccagcagcggggccctggacctgctggacaccccagctggcctggagaaggaccccggggtgctggatggagccacagagctgctgggcctgggcggcctgctgtacaaggcccccagccccccagaggtggaccacggccctgagggcaccctggcctgggatgctggggaccagaccctggagcccggccctgggggccagaccccagaggtggtgcccccagaccccggggccggggccaacagctgcagccctgagggcctgctggagcccctggccccagacagccccatcaccctgcagagcccccacatcgaggaggaggagaccaccagcatcgccacagcccggcggggcagccctggccaggaggaggagctgccccagggccagccccagagccccaatgccccacccagccccagcgtgggggagaccctgggagatggcatcaacagcagccagaccaagccaggcggcagcagccccccagcccaccccagcctgcctggagatggcctgacagccaaggccagcgagaagcccccagagaggaagaggtctgagcgggtgcggcgggcagagccccccaagccagaggtggtggacagcacagagagcatccctgtgtctgatgaagattctgatgccatggtggatgaccccaatgatgaagattttgtgcccttccggcccaggaggagccccaggatgagcctgcggagctctgtgtcccagagagctggccgctctgctgtgggcaccaagatgacctgtgcccactgcaggacccccctgcagaagggccagacagcctaccagaggaagggcctgccccagctgttctgcagcagcagctgcctgaccaccttcagcaagaagcccagcggcaagaagacctgcaccttctgcaagaaggagatctggaacaccaaggacagcgtggtggcccagacaggcagcggcggcagcttccacgagttctgcacctctgtgtgcctgagcctgtatgaggcccagcagcagaggcccatcccccagagcggggaccctgcagatgccacccgctgcagcatctgccagaagacaggagaggtgctgcacgaggtgtccaatggatctgtggtgcaccggctgtgcagcgacagctgcttcagcaagttccgggccaacaagggcctgaagaccaactgctgtgaccagtgtggggcctacatctacaccaagacaggcagccctggccctgagctgctcttccacgagggccagcagaagcgcttctgcaacaccacctgcctgggcgcctacaagaagaagaacaccagggtgtacccctgtgtgtggtgcaagaccctgtgcaagaactttgagatgctgagccacgtggacagaaatggcaagaccagcctcttctgcagcctgtgctgcaccaccagctacaaggtgaagcaggccggcctgaccggccccccccggccctgcagcttctgccgccgcagcctgagtgacccctgctactacaacaaggtggacagaacagtgtaccagttctgcagccccagctgctggaccaagttccagaggaccagccctgagggcggcatccacctgagctgccactactgccacagcctcttcagcggcaagccagaggtgctggactggcaggaccaggtgttccagttctgctgccgggactgctgtgaggacttcaagaggctgcggggcgtggtgtcccagtgtgagcactgccggcaggagaagctgctgcacgagaagctgcgcttctctggagtggagaagagcttctgcagcgagggctgtgtgctgctgtacaagcaggacttcaccaagaagctgggcctgtgctgcatcacctgcacctactgcagccagacctgccagaggggcgtgacagagcagctggatggcagcacctgggacttctgcagcgaggactgcaagagcaagtacctgctgtggtactgcaaggccgcccgctgccacgcctgcaagaggcagggcaagctgctggagaccatccactggaggggccagatccgccacttctgcaaccagcagtgcctgctgcgcttctacagccagcagaaccagcccaacctggacacccagagcggccctgagagcctgctgaacagccagagccctgagagcaagccccagacccccagccagaccaaggtggagaacagcaacacagtgaggaccccagaggagaatggaaacctgggcaagatccctgtgaagaccaggtctgcccccacagcccccaccccacctcctcctcctcctccagccacccccaggaagaacaaggccgccatgtgcaagcccctgatgcagaacagaggagtgtcctgcaaggtggagatgaagagcaagggcagccagacagaggagtggaagccccaggtgattgtgctgcccatccctgtgcccatctttgtgcctgtgcccatgcacctgtactgccagaaggtgcctgtgcccttctccatgcccatccctgtgcctgtgcccatgttcctgcccaccaccctggagagcacagacaagatcgtggagaccatcgaggagctgaaggtgaagatccccagcaaccccctggaggccgacatcctggccatggccgagatgattgctgaggccgaggagctggacaaggccagcagtgacctgtgtgacctggtgagcaaccagagcgctgagggcctgctggaggactgtgacctgtttggacctgccagagatgatgtgctggccatggctgtgaagatggccaacgtgctggatgagcccggccaggacctggaggccgacttccccaagaaccccctggacatcaaccccagcgtggacttcctgtttgactgtggcctggtgggcccagaagatgtgtccacagagcaggacctgcccaggaccatgaggaagggccagaagaggctggtgctgtctgagagctgcagccgggacagcatgagcagccagcccagctgcaccggcctgaactacagctatggagtgaatgcctggaagtgctgggtgcagagcaaatatgccaatggagagaccagcaaaggagatgagctgcgcttcggccccaagcccatgaggatcaaggaggacatcctggcctgcagcgctgctgagctgaactacggcctggcccagtttgtgcgggagatcacccggcccaacggggagagatatgagccagacagcatctactacctgtgcctgggcatccagcagtacctgctggagaacaacaggatggtgaacatcttcacagacctgtactacctgacctttgtgcaggagctgaacaagagcctgagcacctggcagcccaccctgctgcccaacaacacagtgttcagccgggtggaggaggagcacctgtgggagtgcaagcagctgggcgtgtacagcccctttgtgctgctgaacaccctgatgttcttcaacaccaagttcttcggcctgcagacagctgaggagcacatgcagctgtccttcaccaacgtggtgcggcagagcaggaagtgcaccaccccccggggcaccaccaaggtggtgtccatccgctactatgcccctgtgcggcagaggaagggccgggacaccggccctgggaagaggaagagagaagatgaggcccccatcctggagcagagagaaaataggatgaaccccctgcgctgccctgtgaagttctatgagttctacctgagcaagtgcccagagagcctgcggaccagaaatgatgtgttctacctgcagcctgagaggagctgcatcgccgagagccccctgtggtacagcgtcatccccatggaccgctccatgctggagagcatgctgaaccgcatcctggccgtgcgggagatctatgaggagctgggccggcctggagaggaggacctggactag

SEQ ID NO: 177147 - DNA, 4113 bp, synthetic construct; identical to SEQ ID NO: 177146
  misc_feature 1..4113: note = Description of Artificial Sequence: Synthetic coding sequence
  source 1..4113: mol_type = other DNA

SEQ ID NO: 177148 - DNA, 1050 bp, synthetic construct
  misc_feature 1..1050: note = Description of Artificial Sequence: Synthetic coding sequence
  source 1..1050: mol_type = other DNA
atggaccccagcgacttccccagcccctttgaccccctgaccctgcctgagaagcccctggccggggacctgcctgtggacatggagtttggagaggacctgctggagagccagacagcccccacccggggctgggcccctcctggccccagccccagcagcggggccctggacctgctggacaccccagctggcctggagaaggaccccggggtgctggatggagccacagagctgctgggcctgggcggcctgctgtacaaggcccccagccccccagaggtggaccacggccctgagggcaccctggcctgggatgctggggaccagaccctggagcccggccctgggggccagaccccagaggtggtgcccccagaccccggggccggggccaacagctgcagccctgagggcctgctggagcccctggccccagacagccccatcaccctgcagagcccccacatcgaggaggaggagaccaccagcatcgccacagcccggcggggcagccctggccaggaggaggagctgccccagggccagccccagagccccaatgccccacccagccccagcgtgggggagaccctgggagatggcatcaacagcagccagaccaagccaggcggcagcagccccccagcccaccccagcctgcctggagatggcctgacagccaaggccagcgagaagcccccagagcgggtgcagaagaggtctgagcgggtgcggcgggcagagccccccaagccagaggtggtggacagcacagagagccgccgcagcggcacccccaggacccggctgtggaggcggctggtgctggaggcccccagcatgagcagcgcccaccccagcgtgagcccctgcatgaggcccagcagcagcgcccggagccccagcctgggcatcccccccaccctgctggccgccgcctatgcccggcggctggagaggagctgcaccaggtctgccatggccgcctggtacacaggcagcgctgccatcctggccagccccaacagcggccccacccgggactag

SEQ ID NO: 177149 - DNA, 1488 bp, synthetic construct
  misc_feature 1..1488: note = Description of Artificial Sequence: Synthetic coding sequence
  source 1..1488: mol_type = other DNA
atggaccccagcgacttccccagcccctttgaccccctgaccctgcctgagaagcccctggccggggacctgcctgtggacatggagtttggagaggacctgctggagagccagacagcccccacccggggctgggcccctcctggccccagccccagcagcggggccctggacctgctggacaccccagctggcctggagaaggaccccggggtgctggatggagccacagagctgctgggcctgggcggcctgctgtacaaggcccccagccccccagaggtggaccacggccctgagggcaccctggcctgggatgctggggaccagaccctggagcccggccctgggggccagaccccagaggtggtgcccccagaccccggggccggggccaacagctgcagccctgagggcctgctggagcccctggccccagacagccccatcaccctgcagagcccccacatcgaggaggaggagaccaccagcatcgccacagcccggcggggcagccctggccaggaggaggagctgccccagggccagccccagagccccaatgccccacccagccccagcgtgggggagaccctgggagatggcatcaacagcagccagaccaagccaggcggcagcagccccccagcccaccccagcctgcctggagatggcctgacagccaaggccagcgagaagcccccagagaggaagaggtctgagcgggtgcggcgggcagagccccccaagccagaggtggtggacagcacagagagcatccctgtgtctgatgaagattctgatgccatggtggatgaccccaatgatgaagattttgtgcccttccggcccaggaggagccccaggatgagcctgcggagctctgtgtcccagagagctggccgctctgctgtgggcaccaagatgacctgtgcccactgcaggacccccctgcagaagggccagacagcctaccagaggaagggcctgccccagctgttctgcagcagcagctgcctgaccaccttcagcaagaagcccagcggcaagaagacctgcaccttctgcaagaaggagatctggaacaccaaggacagcgtggtggcccagacaggcagcggcggcagcttccacgagttctgcacctctgtgtgcctgagcctgtatgaggcccagcagcagaggcccatcccccagagcggggaccctgcagatgccacccgctgcagcatctgccagaagacaggagaggtgctgcacgaggtgtccaatggatctgtggtgcaccggctgtgcagcgacagctgcttcagcaagttccgggccaacaagggcctgaagaccaactgctgtgaccagtgtggggcctacatctacaccaagacaggcagccctggccctgagctgctcttccacgagggccagcagaagcgcttctgcaacaccacctgcctgggcgcctacaagaaggtgggcccccgggagtag

SEQ ID NO: 177150 - DNA, 1494 bp, synthetic construct
  misc_feature 1..1494: note = Description of Artificial Sequence: Synthetic coding sequence
  source 1..1494: mol_type = other DNA
atggaccccagcgacttccccagcccctttgaccccctgaccctgcctgagaagcccctggccggggacctgcctgtggacatggagtttggagaggacctgctggagagccagacagcccccacccggggctgggcccctcctggccccagccccagcagcggggccctggacctgctggacaccccagctggcctggagaaggaccccggggtgctggatggagccacagagctgctgggcctgggcggcctgctgtacaaggcccccagccccccagaggtggaccacggccctgagggcaccctggcctgggatgctggggaccagaccctggagcccggccctgggggccagaccccagaggtggtgcccccagaccccggggccggggccaacagctgcagccctgagggcctgctggagcccctggccccagacagccccatcaccctgcagagcccccacatcgaggaggaggagaccaccagcatcgccacagcccggcggggcagccctggccaggaggaggagctgccccagggccagccccagagccccaatgccccacccagccccagcgtgggggagaccctgggagatggcatcaacagcagccagaccaagccaggcggcagcagccccccagcccaccccagcctgcctggagatggcctgacagccaaggccagcgagaagcccccagagcgggtgcagaagaggtctgagcgggtgcggcgggcagagccccccaagccagaggtggtggacagcacagagagcatccctgtgtctgatgaagattctgatgccatggtggatgaccccaatgatgaagattttgtgcccttccggcccaggaggagccccaggatgagcctgcggagctctgtgtcccagagagctggccgctctgctgtgggcaccaagatgacctgtgcccactgcaggacccccctgcagaagggccagacagcctaccagaggaagggcctgccccagctgttctgcagcagcagctgcctgaccaccttcagcaagaagcccagcggcaagaagacctgcaccttctgcaagaaggagatctggaacaccaaggacagcgtggtggcccagacaggcagcggcggcagcttccacgagttctgcacctctgtgtgcctgagcctgtatgaggcccagcagcagaggcccatcccccagagcggggaccctgcagatgccacccgctgcagcatctgccagaagacaggagaggtgctgcacgaggtgtccaatggatctgtggtgcaccggctgtgcagcgacagctgcttcagcaagttccgggccaacaagggcctgaagaccaactgctgtgaccagtgtggggcctacatctacaccaagacaggcagccctggccctgagctgctcttccacgagggccagcagaagcgcttctgcaacaccacctgcctgggcgcctacaagaaggtgggcccccgggagtag

SEQ ID NO: 177151 - DNA, 3843 bp, synthetic construct
  misc_feature 1..3843: note = Description of Artificial Sequence: Synthetic coding sequence
  source 1..3843: mol_type = other DNA
atggaccccagcgacttccccagcccctttgaccccctgaccctgcctgagaagcccctggccggggacctgcctgtggacatggagtttggagaggacctgctggagagccagacagcccccacccggggctgggcccctcctggccccagccccagcagcggggccctggacctgctggacaccccagctggcctggagaaggaccccggggtgctggatggagccacagagctgctgggcctgggcggcctgctgtacaaggcccccagccccccagaggtggaccacggccctgagggcaccctggcctgggatgctggggaccagaccctggagcccggccctgggggccagaccccagaggtggtgcccccagaccccggggccggggccaacagctgcagccctgagggcctgctggagcccctggccccagacagccccatcaccctgcagagcccccacatcgaggaggaggagaccaccagcatcgccacagcccggcggggcagccctggccaggaggaggagctgccccagggccagccccagagccccaatgccccacccagccccagcgtgggggagaccctgggagatggcatcaacagcagccagaccaagccaggcggcagcagccccccagcccaccccagcctgcctggagatggcctgacagccaaggccagcgagaagcccccagagcgggtgcagaagaggtctgagcgggtgcggcgggcagagccccccaagccagaggtggtggacagcacagagagcatccctgtgtctgatgaagattctgatgccatggtggatgaccccaatgatgaagattttgtgcccttccggcccaggaggagccccaggatgagcctgcggagctctgtgtcccagagagctggccgctctgctgtgggcaccaagatgacctgtgcccactgcaggacccccctgcagaagggccagacagcctaccagaggaagggcctgccccagctgttctgcagcagcagctgcctgaccaccttcagcaagaagcccagcggcaagaagacctgcaccttctgcaagaaggagatctggaacaccaaggacagcgtggtggcccagacaggcagcggcggcagcttccacgagttctgcacctctgtgtgcctgagcctgtatgaggcccagcagcagaggcccatcccccagagcggggaccctgcagatgccacccgctgcagcatctgccagaagacaggagaggtgctgcacgaggtgtccaatggatctgtggtgcaccggctgtgcagcgacagctgcttcagcaagttccgggccaacaagggcctgaagaccaactgctgtgaccagtgtggggcctacatctacaccaagacaggcagccctggccctgagctgctcttccacgagggccagcagaagcgcttctgcaacaccacctgcctgggcgcctacaagaagaagaacaccagggtgtacccctgtgtgtggtgcaagaccctgtgcaagaactttgagatgctgagccacgtggacagaaatggcaagaccagcctcttctgcagcctgtgctgcaccaccagctacaaggtgaagcaggccggcctgaccggccccccccggccctgcagcttctgccgccgcagcctgagtgacccctgctactacaacaaggtggacagaacagtgtaccagttctgcagccccagctgctggaccaagttccagaggaccagccctgagggcggcatccacctgagctgccactactgccacagcctcttcagcggcaagccagaggtgctggactggcaggaccaggtgttccagttctgctgccgggactgctgtgaggacttcaagaggctgcggggcgtggtgtcccagtgtgagcactgccggcaggagaagctgctgcacgagaagctgcgcttctctggagtggagaagagcttctgcagcgagggctgtgtgctgctgtacaagcaggacttcaccaagaagctgggcctgtgctgcatcacctgcacctactgcagccagacctgccagaggggcgtgacagagcagctggatggcagcacctgggacttctgcagcgaggactgcaagagcaagtacctgctgtggtactgcaaggccgcccgctgccacgcctgcaagaggcagggcaagctgctggagaccatccactggaggggccagatccgccacttctgcaaccagcagtgcctgctgcgcttctacagccagcagaaccagcccaacctggacacccagagcggccctgagagcctgctgaacagccagagccctgagagcaagccccagacccccagccagaccaaggtggagaacagcaacacagtgaggaccccagaggagaatggaaacctgggcaagatccctgtgaagaccaggtctgcccccacagcccccaccccacctcctcctcctcctccagccacccccaggaagaacaaggccgccatgtgcaagcccctgatgcagaacagaggagtgtcctgcaaggtggagatgaagagcaagggcagccagacagaggagtggaagccccaggtgattgtgctgcccatccctgtgcccatctttgtgcctgtgcccatgcacctgtactgccagaaggtgcctgtgcccttctccatgcccatccctgtgcctgtgcccatgttcctgcccaccaccctggagagcacagacaagatcgtggagaccatcgaggagctgaaggtgaagatccccagcaaccccctggaggccgacatcctggccatggccgagatgattgctgaggccgaggagctggacaaggccagcagtgacctgtgtgacctggtgagcaaccagagcgctgagggcctgctggaggactgtgacctgtttggacctgccagagatgatgtgctggccatggctgtgaagatggccaacgtgctggatgagcccggccaggacctggaggccgacttccccaagaaccccctggacatcaaccccagcgtggacttcctgtttgactgtggcctggtgggcccagaagatgtgtccacagagcaggacctgcccaggaccatgaggaagggccagaagaggctggtgctgtctgagagctgcagccgggacagcatgagcagccagcccagctgcaccggcctgaactacagctatggagtgaatgcctggaagtgctgggtgcagagcaaatatgccaatggagagaccagcaaggccaagcccatgaggatcaaggaggacatcctggcctgcagcgctgctgagctgaactacggcctggcccagtttgtgcgggagatcacccggcccaatggagagagatatgagccagacagcatctactacctgtgcctgggcatccagcagtacctgctggagaacaacaggatggtgaacatcttcacagacctgtactacctgacctttgtgcaggagctgaacaagagcctgagcacctggcagcccaccctgctgcccaacaacacaggccctgggaagaggaagagagaagatgaggcccccatcctggagcagagagaaaataggatgaaccccctgcgctgccctgtgaagttctatgagttctacctgagcaagtgcccagagagcctgcggaccagaaatgatgtgttctacctgcagcctgagaggagctgcatcgccgagagccccctgtggtacagcgtcatccccatggaccgctccatgctggagagcatgctgaaccgcatcctggccgtgcgggagatctatgaggagctgggccggcctggagaggaggacctggactag

SEQ ID NO: 177152 - DNA, 4119 bp, synthetic construct
  misc_feature 1..4119: note = Description of Artificial Sequence: Synthetic coding sequence
  source 1..4119: mol_type = other DNA
atggaccccagcgacttccccagcccctttgaccccctgaccctgcctgagaagcccctggccggggacctgcctgtggacatggagtttggagaggacctgctggagagccagacagcccccacccggggctgggcccctcctggccccagccccagcagcggggccctggacctgctggacaccccagctggcctggagaaggaccccggggtgctggatggagccacagagctgctgggcctgggcggcctgctgtacaaggcccccagccccccagaggtggaccacggccctgagggcaccctggcctgggatgctggggaccagaccctggagcccggccctgggggccagaccccagaggtggtgcccccagaccccggggccggggccaacagctgcagccctgagggcctgctggagcccctggccccagacagccccatcaccctgcagagcccccacatcgaggaggaggagaccaccagcatcgccacagcccggcggggcagccctggccaggaggaggagctgccccagggccagccccagagccccaatgccccacccagccccagcgtgggggagaccctgggagatggcatcaacagcagccagaccaagccaggcggcagcagccccccagcccaccccagcctgcctggagatggcctgacagccaaggccagcgagaagcccccagagcgggtgcagaagaggtctgagcgggtgcggcgggcagagccccccaagccagaggtggtggacagcacagagagcatccctgtgtctgatgaagattctgatgccatggtggatgaccccaatgatgaagattttgtgcccttccggcccaggaggagccccaggatgagcctgcggagctctgtgtcccagagagctggccgctctgctgtgggcaccaagatgacctgtgcccactgcaggacccccctgcagaagggccagacagcctaccagaggaagggcctgccccagctgttctgcagcagcagctgcctgaccaccttcagcaagaagcccagcggcaagaagacctgcaccttctgcaagaaggagatctggaacaccaaggacagcgtggtggcccagacaggcagcggcggcagcttccacgagttctgcacctctgtgtgcctgagcctgtatgaggcccagcagcagaggcccatcccccagagcggggaccctgcagatgccacccgctgcagcatctgccagaagacaggagaggtgctgcacgaggtgtccaatggatctgtggtgcaccggctgtgcagcgacagctgcttcagcaagttccgggccaacaagggcctgaagaccaactgctgtgaccagtgtggggcctacatctacaccaagacaggcagccctggccctgagctgctcttccacgagggccagcagaagcgcttctgcaacaccacctgcctgggcgcctacaagaagaagaacaccagggtgtacccctgtgtgtggtgcaagaccctgtgcaagaactttgagatgctgagccacgtggacagaaatggcaagaccagcctcttctgcagcctgtgctgcaccaccagctacaaggtgaagcaggccggcctgaccggccccccccggccctgcagcttctgccgccgcagcctgagtgacccctgctactacaacaaggtggacagaacagtgtaccagttctgcagccccagctgctggaccaagttccagaggaccagccctgagggcggcatccacctgagctgccactactgccacagcctcttcagcggcaagccagaggtgctggactggcaggaccaggtgttccagttctgctgccgggactgctgtgaggacttcaagaggctgcggggcgtggtgtcccagtgtgagcactgccggcaggagaagctgctgcacgagaagctgcgcttctctggagtggagaagagcttctgcagcgagggctgtgtgctgctgtacaagcaggacttcaccaagaagctgggcctgtgctgcatcacctgcacctactgcagccagacctgccagaggggcgtgacagagcagctggatggcagcacctgggacttctgcagcgaggactgcaagagcaagtacctgctgtggtactgcaaggccgcccgctgccacgcctgcaagaggcagggcaagctgctggagaccatccactggaggggccagatccgccacttctgcaaccagcagtgcctgctgcgcttctacagccagcagaaccagcccaacctggacacccagagcggccctgagagcctgctgaacagccagagccctgagagcaagccccagacccccagccagaccaaggtggagaacagcaacacagtgaggaccccagaggagaatggaaacctgggcaagatccctgtgaagaccaggtctgcccccacagcccccaccccacctcctcctcctcctccagccacccccaggaagaacaaggccgccatgtgcaagcccctgatgcagaacagaggagtgtcctgcaaggtggagatgaagagcaagggcagccagacagaggagtggaagccccaggtgattgtgctgcccatccctgtgcccatctttgtgcctgtgcccatgcacctgtactgccagaaggtgcctgtgcccttctccatgcccatccctgtgcctgtgcccatgttcctgcccaccaccctggagagcacagacaagatcgtggagaccatcgaggagctgaaggtgaagatccccagcaaccccctggaggccgacatcctggccatggccgagatgattgctgaggccgaggagctggacaaggccagcagtgacctgtgtgacctggtgagcaaccagagcgctgagggcctgctggaggactgtgacctgtttggacctgccagagatgatgtgctggccatggctgtgaagatggccaacgtgctggatgagcccggccaggacctggaggccgacttccccaagaaccccctggacatcaaccccagcgtggacttcctgtttgactgtggcctggtgggcccagaagatgtgtccacagagcaggacctgcccaggaccatgaggaagggccagaagaggctggtgctgtctgagagctgcagccgggacagcatgagcagccagcccagctgcaccggcctgaactacagctatggagtgaatgcctggaagtgctgggtgcagagcaaatatgccaatggagagaccagcaaaggagatgagctgcgcttcggccccaagcccatgaggatcaaggaggacatcctggcctgcagcgctgctgagctgaactacggcctggcccagtttgtgcgggagatcacccggcccaacggggagagatatgagccagacagcatctactacctgtgcctgggcatccagcagtacctgctggagaacaacaggatggtgaacatcttcacagacctgtactacctgacctttgtgcaggagctgaacaagagcctgagcacctggcagcccaccctgctgcccaacaacacagtgttcagccgggtggaggaggagcacctgtgggagtgcaagcagctgggcgtgtacagcccctttgtgctgctgaacaccctgatgttcttcaacaccaagttcttcggcctgcagacagctgaggagcacatgcagctgtccttcaccaacgtggtgcggcagagcaggaagtgcaccaccccccggggcaccaccaaggtggtgtccatccgctactatgcccctgtgcggcagaggaagggccgggacaccggccctgggaagaggaagagagaagatgaggcccccatcctggagcagagagaaaataggatgaaccccctgcgctgccctgtgaagttctatgagttctacctgagcaagtgcccagagagcctgcggaccagaaatgatgtgttctacctgcagcctgagaggagctgcatcgccgagagccccctgtggtacagcgtcatccccatggaccgctccatgctggagagcatgctgaaccgcatcctggccgtgcgggagatctatgaggagctgggccggcctggagaggaggacctggactag

SEQ ID NO: 177153 - DNA, 4077 bp, synthetic construct
  misc_feature 1..4077: note = Description of Artificial Sequence: Synthetic coding sequence
  source 1..4077: mol_type = other DNA
atggaccccagcgacttccccagcccctttgaccccctgaccctgcctgagaagcccctggccggggacctgcctgtggacatggagtttggagaggacctgctggagagccagacagcccccacccggggctgggcccctcctggccccagccccagcagcggggccctggacctgctggacaccccagctggcctggagaaggaccccggggtgctggatggagccacagagctgctgggcctgggcggcctgctgtacaaggcccccagccccccagaggtggaccacggccctgagggcaccctggcctgggatgctggggaccagaccctggagcccggccctgggggccagaccccagaggtggtgcccccagaccccggggccggggccaacagctgcagccctgagggcctgctggagcccctggccccagacagccccatcaccctgcagagcccccacatcgaggaggaggagaccaccagcatcgccacagcccggcggggcagccctggccaggaggaggagctgccccagggccagccccagagccccaatgccccacccagccccagcgtgggggagaccctgggagatggcatcaacagcagccagaccaagccaggcggcagcagccccccagcccaccccagcctgcctggagatggcctgacagccaaggccagcgagaagcccccagagaggaagaggtctgagcgggtgcggcgggcagagccccccaagccagaggtggtggacagcacagagagcatccctgtgtctgatgaagattctgatgccatggtggatgaccccaatgatgaagattttgtgcccttccggcccaggaggagccccaggatgagcctgcggagctctgtgtcccagagagctggccgctctgctgtgggcaccaagatgacctgtgcccactgcaggacccccctgcagaagggccagacagcctaccagaggaagggcctgccccagctgttctgcagcagcagctgcctgaccaccttcagcaagaagcccagcggcaagaagacctgcaccttctgcaagaaggagatctggaacaccaaggacagcgtggtggcccagacaggcagcggcggcagcttccacgagttctgcacctctgtgtgcctgagcctgtatgaggcccagcagcagaggcccatcccccagagcggggaccctgcagatgccacccgctgcagcatctgccagaagacaggagaggtgctgcacgaggtgtccaatggatctgtggtgcaccggctgtgcagcgacagctgcttcagcaagttccgggccaacaagggcctgaagaccaactgctgtgaccagtgtggggcctacatctacaccaagacaggcagccctggccctgagctgctcttccacgagggccagcagaagcgcttctgcaacaccacctgcctgggcgcctacaagaagaagaacaccagggtgtacccctgtgtgtggtgcaagaccctgtgcaagaactttgagatgctgagccacgtggacagaaatggcaagaccagcctcttctgcagcctgtgctgcaccaccagctacaaggtgaagcaggccggcctgaccggccccccccggccctgcagcttctgccgccgcagcctgagtgacccctgctactacaacaaggtggacagaacagtgtaccagttctgcagccccagctgctggaccaagttccagaggaccagccctgagggcggcatccacctgagctgccactactgccacagcctcttcagcggcaagccagaggtgctggactggcaggaccaggtgttccagttctgctgccgggactgctgtgaggacttcaagaggctgcggggcgtggtgtcccagtgtgagcactgccggcaggagaagctgctgcacgagaagctgcgcttctctggagtggagaagagcttctgcagcgagggctgtgtgctgctgtacaagcaggacttcaccaagaagctgggcctgtgctgcatcacctgcacctactgcagccagacctgccagaggggcgtgacagagcagctggatggcagcacctgggacttctgcagcgaggactgcaagagcaagtacctgctgtggtactgcaaggccgcccgctgccacgcctgcaagaggcagggcaagctgctggagaccatccactggaggggccagatccgccacttctgcaaccagcagtgcctgctgcgcttctacagccagcagaaccagcccaacctggacacccagagcggccctgagagcctgctgaacagccagagccctgagagcaagccccagacccccagccagaccaaggtggagaacagcaacaccatccctgtgaagaccaggtctgcccccacagcccccaccccacctcctcctcctcctccagccacccccaggaagaacaaggccgccatgtgcaagcccctgatgcagaacagaggagtgtcctgcaaggtggagatgaagagcaagggcagccagacagaggagtggaagccccaggtgattgtgctgcccatccctgtgcccatctttgtgcctgtgcccatgcacctgtactgccagaaggtgcctgtgcccttctccatgcccatccctgtgcctgtgcccatgttcctgcccaccaccctggagagcacagacaagatcgtggagaccatcgaggagctgaaggtgaagatccccagcaaccccctggaggccgacatcctggccatggccgagatgattgctgaggccgaggagctggacaaggccagcagtgacctgtgtgacctggtgagcaaccagagcgctgagggcctgctggaggactgtgacctgtttggacctgccagagatgatgtgctggccatggctgtgaagatggccaacgtgctggatgagcccggccaggacctggaggccgacttccccaagaaccccctggacatcaaccccagcgtggacttcctgtttgactgtggcctggtgggcccagaagatgtgtccacagagcaggacctgcccaggaccatgaggaagggccagaagaggctggtgctgtctgagagctgcagccgggacagcatgagcagccagcccagctgcaccggcctgaactacagctatggagtgaatgcctggaagtgctgggtgcagagcaaatatgccaatggagagaccagcaaaggagatgagctgcgcttcggccccaagcccatgaggatcaaggaggacatcctggcctgcagcgctgctgagctgaactacggcctggcccagtttgtgcgggagatcacccggcccaacggggagagatatgagccagacagcatctactacctgtgcctgggcatccagcagtacctgctggagaacaacaggatggtgaacatcttcacagacctgtactacctgacctttgtgcaggagctgaacaagagcctgagcacctggcagcccaccctgctgcccaacaacacagtgttcagccgggtggaggaggagcacctgtgggagtgcaagcagctgggcgtgtacagcccctttgtgctgctgaacaccctgatgttcttcaacaccaagttcttcggcctgcagacagctgaggagcacatgcagctgtccttcaccaacgtggtgcggcagagcaggaagtgcaccaccccccggggcaccaccaaggtggtgtccatccgctactatgcccctgtgcggcagaggaagggccgggacaccggccctgggaagaggaagagagaagatgaggcccccatcctggagcagagagaaaataggatgaaccccctgcgctgccctgtgaagttctatgagttctacctgagcaagtgcccagagagcctgcggaccagaaatgatgtgttctacctgcagcctgagaggagctgcatcgccgagagccccctgtggtacagcgtcatccccatggaccgctccatgctggagagcatgctgaaccgcatcctggccgtgcgggagatctatgaggagctgggccggcctggagaggaggacctggactag

SEQ ID NO: 177154 - DNA, 2112 bp, synthetic construct; identical to SEQ ID NO: 176438
  misc_feature 1..2112: note = Description of Artificial Sequence: Synthetic coding sequence
  source 1..2112: mol_type = other DNA

SEQ ID NO: 177155 - DNA, 2229 bp, synthetic construct
  misc_feature 1..2229: note = Description of Artificial Sequence: Synthetic coding sequence
  source 1..2229: mol_type = other DNA
atggagtttgtgtctggctacagagatgagttcctggacttcaccgccctgctgtttggctggttcaggaagtttgtggccgagagaggagctgtgggcaccagcctggagggccgctgccggcagctggaggcccagatccggcggctgccccaggaccctgccctgtgggtgctgcacgtgctgcccaaccacagcgtgggcatcagcctgggccagggcgctgagcccggccctggccctggcctgggcacagcctggctgctgggggacaacccccccctgcacctgcgggacctgagcccctacatcagctttgtgtccctggaggatggagaggagggggaggaggaggaggaggaggatgaggaggaggagaagagagaagatggaggagctggcagcacagagaaggtggagccagaagaagatcgggagctggcccccaccagccgggagagcccccaggagaccaaccccccaggagagagcgaggaggccgcccgggaggccggcggcggcaaggatggctgccgggaggacagagtggagaatgagacccggccccagaagaggaagggccagaggtctgaggccgcccccctgcacgtgtcctgcctgctgctggtgacagatgagcacggcaccatcctgggcatcgacctgctggtggatggagcccagggcacagcctcctggggcagcggcaccaaggacctggccccctgggcctatgccctgctgtgccacagcatggcctgccccatgggcagcggggaccccaggaagccccggcagctgactgtgggagatgcccggctgcaccgggagctggagagcctggtgccccggctgggcgtgaagctggccaagacccccatgaggacctggggccccaggcctggcttcacctttgccagcctgcgggcccggacctgccacgtgtgccaccgccacagctttgaggccaagctgaccccctgcccccagtgcagcgctgtgctgtactgtggggaggcctgcctgcgggctgactggcagcgctgcccagatgatgtgagccaccgcttctggtgcccccggctggccgccttcatggagagagctggggagctggccaccctgcccttcacctacacagctgaggtgaccagcgagaccttcaacaaggaggccttcctggccagccggggcctgacccggggctactggacccagctgtccatgctgatccctggccctggcttcagccgccacccccggggcaacacccccagcctgagcctgctgcggggcggggacccctaccagctgctgcagggagatggaacagccctgatgcctcctgtgcccccccaccccccccggggcgtgtttggctcctggcaggactactacacctggaggggcctgagcctggacagccccatcgctgtgctgctgacctaccccctgactgtgtactacgtgatcacccacctggtgccccagagcttccctgagctgaacatccagaacaagcagagcctgaagatccacgtggtggaggccggcaaggagtttgacctggtgatggtgttctgggagctgctggtgctgctgccccacgtggccctggagctgcagtttgtgggagatggcctgcccccagagagtgatgagcagcacttcaccctgcagagggacagcctggaggtgtctgtgcggcccggcagcggcatcagcgcccggcccagcagcggcaccaaggagaagggcggccggcgggacctgcagatcaaggtgtctgcccggccctaccacctgttccagggccccaagccagacctggtgattggcttcaacagcggctttgccctgaaggacacctggctgcggagcctgccccggctgcagagcctgcgggtgcctgccttcttcacagagagcagcgagtacagctgtgtgatggatggccagaccatggctgtggccactggaggcggcaccagccccccccagcccaaccccttccgcagccccttccggctgcgggctgctgacaactgcatgtcctggtactgcaatgccttcatcttccacctggtgtacaagccagcccagggcagcggggcccggcctgcccctggccccccaccacccagccccaccccatctgcccccccagcccccaccaggagaagaagaggagagaagaagccaggccgcggggcccggcggaggaagtag

SEQ ID NO: 177156 - DNA, 684 bp, synthetic construct
  misc_feature 1..684: note = Description of Artificial Sequence: Synthetic coding sequence
  source 1..684: mol_type = other DNA
atgacagacttcaagctgggcatcgtgcggctgggccgggtggccggcaagaccaagtacaccctgattgatgagcaggacatccccctggtggagagctacagctttgaggccaggatggaggtggatgctgatggaaatggagccaagatctttgcctatgcctttgacaagaacagaggccggggcagcggccgcctgctgcacgagctgctgtgggagcggcaccggggcggcgtggcccctggcttccaggtggtgcacctgaatgctgtgacagtggacaaccggctggacaacctgcagctggtgccctggggctggaggcccaaggccgaggagaccagcagcaagcagcgggagcagagcctgtactggctggccatccagcagctgcccacagaccccatcgaggagcagtttcctgtgctgaatgtgacccgctactacaatgccaatggagatgtggtggaggaggaggagaacagctgcacctactatgagtgccactacccaccctgcaccgtgattgagaagcagctgcgggagttcaacatctgtggccgctgccaggtggcccgctactgcggcagccagtgccagcagaaggactggccagcccacaagaagcactgccgggagaggaagaggcccttccagcacgagctggagcctgagaggtag

SEQ ID NO: 177157 - DNA, 2127 bp, synthetic construct
  misc_feature 1..2127: note = Description of Artificial Sequence: Synthetic coding sequence
  source 1..2127: mol_type = other DNA
atgtctgagcggggcatcaagtgggcctgtgagtactgcacctatgagaactggcccagcgccatcaagtgcaccatgtgccgggcccagaggccttctggcaccatcatcacagaggaccccttcaagagcggcagcagtgatgtgggccgggactgggaccccagcagcacagagggcggcagcagccccctcatctgcccagacagcagcgcccggccccgggtgaagagcagctacagcatggagaatgccaacaagtggagctgccacatgtgcacctacctgaactggccccgggccatccgctgcacccagtgcctgagccagaggaggaccaggagccccacagagagcccccagagcagcggcagcggcagcaggcctgtggccttctctgtggacccctgtgaggagtacaatgacaggaacaagctgaacaccaggacccagcactggacctgcagcgtgtgcacctatgagaactgggccaaggccaagagatgtgtggtgtgtgaccacccccggcccaacaacatcgaggccatcgagctggccgagacagaggaggccagcagcatcatcaatgagcaggaccgggcccgctggaggggcagctgcagcagcggcaacagccagaggaggagccccccagccaccaagagggacagcgaggtgaagatggacttccagagaattgagctggccggggctgtgggcagcaaggaggagctggaggtggacttcaagaagctgaagcagatcaagaacaggatgaagaagacagactggctgttcctgaatgcctgtgtgggcgtggtggagggggacctggccgccatcgaggcctacaagagcagtggaggagacatcgcccggcagctgacagcagatgaggtgcggctgctgaaccggcccagcgcctttgatgtgggctacaccctggtgcacctggccatccgcttccagaggcaggacatgctggccatcctgctgacagaggtgtcccagcaggccgccaagtgcatcccagccatggtgtgcccagagctgacagagcagatccggcgggagattgctgccagcctgcaccagaggaaaggagactttgcctgctacttcctgacagacctggtgaccttcaccctgcctgctgacatcgaggacctgcccccaacagtgcaggagaagctgtttgatgaggtgctggacagagatgtgcagaaggagctggaggaggagagccccatcatcaactggagcctggagctggccacccggctggacagccggctgtatgccctgtggaacagaacagctggggactgcctgctggacagcgtgctgcaggccacctggggcatctatgacaaggacagcgtgctgaggaaggccctgcatgacagcctgcatgactgcagccactggttctacacccgctggaaggactgggagagctggtacagccagagctttggcctgcacttcagcctgcgggaggagcagtggcaggaggactgggccttcatcctgagcctggccagccagcccggggccagcctggagcagacccacatctttgtgctggcccacatcctgcggcggcccatcatcgtgtatggagtgaagtactacaagagcttccggggggagaccctgggctacacccgcttccagggcgtgtacctgcccctgctgtgggagcagagcttctgctggaagagccccatcgccctgggctacacccggggccacttcagcgccctggtggccatggagaatgatggctacggcaacagaggagctggggccaacctgaacacagatgatgatgtgaccatcaccttcctgcccctggtggacagcgagaggaagctgctgcacgtgcacttcctgagcgcccaggagctgggcaatgaggagcagcaggagaagctgctgcgggagtggctggactgctgcgtgacagagggcggcgtgctggtggccatgcagaagagcagcagaagaagaaaccaccccctggtgacccagatggtggagaagtggctggaccgctaccggcagatccggccctgcaccagcctgagtgatggagaagaagatgaagatgatgaagatgaatag

SEQ ID NO: 177158 - DNA, 2400 bp, synthetic construct
  misc_feature 1..2400: note = Description of Artificial Sequence: Synthetic coding sequence
  source 1..2400: mol_type = other DNA
atggagatccccaagctgctgcctgcccggggcaccctgcagggcggcggcggcggcggcatcccagctgggggcggccgggtgcaccggggccctgacagccctgctggccaggtgcccacccggcggctgctgctgccccggggcccccaggacggcggccctggaagaagaagagaggaggccagcacagccagccggggccctggccccagcctgtttgccccccggccccaccagcccagcggcggcggagatgacttcttcctggtgctgctggaccctgtgggcggagatgtggagacagctggcagcggccaggccgccggccctgtgctgcgggaggaggccaaggccggccctggcctgcagggagatgagagcggggccaacccagctggctgcagcgcccagggcccccactgcctgtctgctgtgcccaccccagcccccatcagcgcccctggccctgctgctgcctttgctggcaccgtgaccatccacaaccaggacctgctgctgcgctttgaaaatggagtgctgaccctggccaccccacctcctcatgcctgggagcctggagctgccccagcccagcagccccgctgcctgattgccccccaggccggcttcccccaggccgcccaccctggggactgcccagagctgcggagtgacctgctgctggccgagcctgctgagcccgccccagccccagccccccaggaggaggccgagggcctggccgccgccctgggcccccggggcctgctgggcagcggccctggggtggtgctgtacctgtgcccagaggccctgtgtggccagacctttgccaagaagcaccagctgaagatgcacctgctgacccacagcagcagccagggccagaggcccttcaagtgccccctgggcggctgcggctggaccttcaccaccagctacaagctgaagaggcacctgcagagccatgacaagctgcggcccttcggctgcccagctgagggctgcggcaagagcttcaccaccgtgtacaacctgaaggcccacatgaagggccacgagcaggagaacagcttcaagtgtgaggtgtgtgaggagagcttccccacccaggccaagctgggcgcccaccagaggagccactttgagcctgagcggccctaccagtgtgccttcagcggctgcaagaagaccttcatcaccgtgtctgccctcttcagccacaacagagcccacttccgggagcaggagctgttcagctgcagcttccctggctgcagcaagcagtatgacaaggcctgccgcctgaagatccacctgcggagccacactggagagcggcccttcctgtgtgactttgatggctgcggctggaacttcacctccatgagcaagctgctgcggcacaagaggaagcatgatgatgaccggcgcttcatgtgccctgtggagggctgcggcaagagcttcaccagggctgagcacctgaagggccacagcatcacccacctgggcaccaagccctttgtgtgccctgtggccggctgctgtgcccgcttcagcgcccggagcagcctgtacatccacagcaagaagcacctgcaggatgtggacacctggaagagccgctgccccatcagcagctgcaacaagctgttcaccagcaagcacagcatgaagacccacatggtgaagaggcacaaggtgggccaggacctgctggcccagctggaggccgccaacagcctgacccccagcagcgagctgaccagccagaggcagaatgacctgagtgatgctgagatcgtgtccctcttcagtgatgtgcctgacagcaccagcgctgccctgctggacacagccctggtgaacagcggcatcctgaccattgatgtggcctctgtgagcagcaccctggccggccacctgcctgccaacaacaacaacagcgtgggccaggccgtggacccccccagcctgatggccaccagtgaccccccccagagcctggacaccagcctcttctttggaacagctgccaccggcttccagcagagcagcctgaacatggatgaggtgtcctctgtgtctgtgggccccctgggcagcctggacagcctggccatgaagaacagcagccctgagccccaggccctgacccccagcagcaagctgactgtggacacagacaccctgacccccagcagcaccctgtgtgaaaattctgtgtctgagctgctgaccccagccaaggccgagtggagcgtgcaccccaacagcgacttcttcggccaggagggggagacccagtttggcttccccaatgctgctggcaaccacggcagccagaaggagaggaacctgatcaccgtgacaggcagcagcttcctggtgtag

SEQ ID NO: 177159 - DNA, 2412 bp, synthetic construct
  misc_feature 1..2412: note = Description of Artificial Sequence: Synthetic coding sequence
  source 1..2412: mol_type = other DNA
atggagatccccaagctgctgcctgcccggggcaccctgcagggcggcggcggcggcggcatcccagctgggggcggccgggtgcaccggggccctgacagccctgctggccaggtgcccacccggcggctgctgctgctgcggggcccccaggacggcggccctggaagaagaagagaggaggccagcacagccagccggggccctggccccagcctgctggcccccaggacagaccagcccagcggcggcggcggcggcggcggagatgacttcttcctggtgctgctggaccctgtgggcggagatgtggagacagctggcagcggccaggccgccggccctgtgctgcgggaggaggccgaggagggccctggcctgcagggcggggagagcggggccaacccagctggccccacagccctgggcccccgctgcctgtctgctgtgcccaccccagcccccatcagcgcccctggccctgctgctgcctttgctggcaccgtgaccatccacaaccaggacctgctgctgcgctttgaaaatggagtgctgaccctggccaccccacctcctcatgcctgggagcctggagctgccccagcccagcagcccggctgcctgattgccccccaggccggcttcccccacgccgcccaccctggggactgcccagagctgcccccagacctgctgctggccgagcctgctgagcccgccccagccccagcccctgaggaggaggccgagggccctgctgctgccctgggcccccggggccccctgggcagcggccctggggtggtgctgtacctgtgcccagaggcccagtgtggccagacctttgccaagaagcaccagctgaaggtgcacctgctgacccacagcagcagccagggccagaggcccttcaagtgccccctgggcggctgcggctggaccttcaccaccagctacaagctgaagaggcacctgcagagccatgacaagctgcggcccttcggctgcccagctgagggctgcggcaagagcttcaccaccgtgtacaacctgaaggcccacatgaagggccacgagcaggagaacagcttcaagtgtgaggtgtgtgaggagagcttccccacccaggccaagctgagcgcccaccagaggagccactttgagcctgagcggccctaccagtgtgccttcagcggctgcaagaagaccttcatcaccgtgtctgccctcttcagccacaacagagcccacttccgggagcaggagctgttcagctgcagcttccctggctgcagcaagcagtatgacaaggcctgccgcctgaagatccacctgcggagccacactggagagcggcccttcctgtgtgactttgatggctgcggctggaacttcacctccatgagcaagctgctgcggcacaagaggaagcatgatgatgaccggcgcttcatgtgccctgtggagggctgcggcaagagcttcaccagggctgagcacctgaagggccacagcatcacccacctgggcaccaagccctttgtgtgccctgtggccggctgctgtgcccgcttcagcgcccggagcagcctgtacatccacagcaagaagcacctgcaggatgtggacacctggaagagccgctgccccatcagcagctgcaacaagctgttcaccagcaagcacagcatgaagacccacatggtgaagaggcacaaggtgggccaggacctgctggcccagctggaggccgccaacagcctgacccccagcagcgagctgaccagccagaggcagaatgacctgagtgatgctgagatcgtgtccctcttcagtgatgtgcctgacagcaccagcgctgccctgctggacacagccctggtgaacagcggcatcctgaccattgatgtggcctctgtgagcagcaccctggccggccacctgcctgccaacaacaacaacagcgtgggccaggccgtggacccccccagcctgatggccaccagtgaccccccccagagcctggacaccagcctcttctttggaacagctgccaccggcttccagcagagcagcctgaacatggatgaggtgtcctctgtgtctgtgggccccctgggcagcctggacagcctggccatgaagaacagcagccctgagccccaggccctgacccccagcagcaagctgactgtggacacagatgccctgacccccagcagcaccctgtgtgaaaattctgtgtctgagctgctgacccccaccaaggccgagtggaatgtgcacccagacagcgacttcttcggccaggagggggagacccagtttggcttccccaatgctgctggcaaccacggcagccagaaggagacagacctgatcaccgtgacaggcagcagcttcctggtgtag

SEQ ID NO: 177160 - DNA, 2622 bp, synthetic construct
  misc_feature 1..2622: note = Description of Artificial Sequence: Synthetic coding sequence
  source 1..2622: mol_type = other DNA
atggccagcaggaggaagagcaccaccccctgcatggtgctggccagcgagcaggaccctgacctggagctgatcagtgacctggatgagggcccccctgtgctgacccctgtggagaacaccagggctgagagcatcagcagtgatgaggaggtgcatgaatctgtggacagcgacaaccagcagaacaagaaggtggagggcggctatgagtgcaagtactgcaccttccagaccccagacctgaacatgttcaccttccacgtggacagcgagcaccccaacgtggtgctgaacagcagctatgtgtgtgtggagtgcaacttcctgaccaagagatatgatgccctgtctgagcacaacctgaagtaccaccctggagaggagaacttcaagctgaccatggtgaagaggaacaaccagaccatctttgagcagaccatcaatgacctgacctttgatggcagctttgtgaaggaggagaatgctgagcaggccgagagcacagaggtgagcagcagcggcatcagcatcagcaagacccccatcatgaagatgatgaagaacaaggtggagaacaagagaattgctgtgcaccacaacagcgtggaggatgtgcctgaggagaaggaaaatgagatcaagccagaccgggaggagatcgtggagaaccccagcagcagcgccagcgagagcaacaccagcaccagcatcgtgaaccgcatccaccccagcacagccagcacagtggtgaccccagctgctgtgctgcccggcctggcccaggtgatcacagctgtgtctgcccagcagaacagcaacctgatccccaaggtgctgatccctgtgaacagcatccccacctacaatgctgccctggacaacaaccccctgctgctgaacacctacaacaagttcccctaccccaccatgtctgagatcaccgtgctgagcgcccaggccaagtacacagaggagcagatcaagatctggttcagcgcccagaggctgaagcatggagtgtcctggaccccagaggaggtggaggaggcccggaggaagcagttcaatggaacagtgcacacagtgccccagaccatcaccgtcatccccacccacatcagcacaggcagcaatggcctgcccagcatcctgcagacctgccagatcgtgggccagcccggcctggtgctgacccaggtggccggcaccaacaccctgcctgtgacagcccccatcgccctgactgtggccggcgtgcccagccagaacaacatccagaagagccaggtgcctgctgcccagcccacagctgagaccaagccagccacagctgctgtgcccaccagccagagcgtgaagcatgaaacagccctggtgaacccagacagctttggcatccgggccaagaagaccaaggagcagctggccgagctgaaggtgtcctacctgaagaaccagttcccccatgacagcgagatcatccggctgatgaagatcaccggcctgaccaagggggagatcaagaagtggttcagtgacacccgctacaaccagaggaacagcaagagcaaccagtgcctgcacctgaacaatgacagcagcaccaccatcatcatcgacagcagtgatgagaccacagagagccccaccgtgggcacagcccagcccaagcagagctggaaccccttcccagacttcaccccccagaagttcaaggagaagacagctgagcagctgcgggtgctgcaggccagcttcctgaacagctctgtgctgacagatgaggagctgaaccggctgcgggcccagaccaagctgacccggcgggagattgatgcctggttcacagagaagaagaagagcaaggccctgaaggaggagaagatggagattgatgagagcaatgccggcagcagcaaggaggaggccggggagaccagccctgcagatgaaagtggggcccccaagagcggcagcacaggcaagatctgcaagaagaccccagagcagctgcacatgctgaagagcgcctttgtgaggacccagtggcccagccctgaggagtatgacaagctggccaaggagagcggcctggccaggacagacatcgtgtcctggtttggagacaccaggtatgcctggaagaatggaaacctgaagtggtactactactaccagagcgccaacagcagctccatgaatggcctgagcagcctgaggaagaggggccggggccggcccaagggccggggccggggccggccccggggccggccccggggcagcaagaggatcaacaactgggaccggggccccagcctcatcaagttcaagacaggaacagccatcctgaaggactactacctgaagcacaagttcctgaatgagcaggacctggatgagctggtgaacaagagccacatgggctatgagcaggtgcgggagtggtttgctgagcggcagaggagaagtgagctgggcatcgagctgtttgaggagaatgaggaggaggatgaggtgattgatgaccaggaggaggatgaggaggagacagatgacagcgacacctgggagccccccaggcatgtgaagaggaagctgagcaagagtgatgactag

SEQ ID NO: 177161 - DNA, 2622 bp, synthetic construct; identical to SEQ ID NO: 177160
  misc_feature 1..2622: note = Description of Artificial Sequence: Synthetic coding sequence
  source 1..2622: mol_type = other DNA

SEQ ID NO: 177162 - DNA, 2622 bp, synthetic construct; identical to SEQ ID NO: 177160
  misc_feature 1..2622: note = Description of Artificial Sequence: Synthetic coding sequence
  source 1..2622: mol_type = other DNA

SEQ ID NO: 177163 - DNA, 1497 bp, synthetic construct
  misc_feature 1..1497: note = Description of Artificial Sequence: Synthetic coding sequence
  source 1..1497: mol_type = other DNA
atggccagcaagaggaagagcaccaccccctgcatgatccctgtgaagacagtggtgctgcaggatgcctccatggaggcccagcctgctgagaccctgcctgagggcccccagcaggacctgcccccagaggccagcgctgccagcagcgaggccgcccagaaccccagcagcacagatggcagcaccctggccaacggccacaggagcaccctggatggctacctgtacagctgcaagtactgtgacttccgcagccatgacatgacccagtttgtgggccacatgaacagcgagcacacagacttcaacaaggaccccacctttgtgtgcagcggctgcagcttcctggccaagaccccagagggcctgagcctgcacaatgccacctgccacagcggggaggccagctttgtgtggaatgtggccaagccagacaaccacgtggtggtggagcagagcatccctgagagcaccagcaccccagacctggccggggagcccagcgctgagggcgcagatggccaggccgagatcatcatcaccaagacccccatcatgaagatcatgaagggcaaggccgaggccaagaagatccacaccctgaaggaaaatgtgcccagccagcctgtgggggaggccctgcccaagctgagcactggagagatggaggtgcgggagggggaccacagcttcatcaacggggctgtgcctgtgtcccaggccagcgccagcagcgccaagaacccccacgccgccaacggccccctcatcggcaccgtgcctgtgctgcctgctggcatcgcccagttcctgagcctgcagcagcagccccctgtgcacgcccagcaccacgtgcaccagcccctgcccacagccaaggccctgcccaaggtgatgatccccctgagcagcatccccacctacaatgctgccatggacagcaacagcttcctgaagaacagcttccacaagttcccctaccccaccaaggccgagctgtgctacctgactgtggtgaccaagtacccagaggagcagctgaagatctggttcaccgcccagaggctgaagcagggcatctcctggagccctgaggagattgaagatgccaggaagaagatgttcaacacagtcatccagagcgtgccccagcccaccatcaccgtgctgaacacccccctggtggccagcgctggaaatgtgcagcacctgatccaggccgccctgcccggccacgtggtgggccagcctgagggcactggaggcggcctgctggtgacccagcccctgatggccaacggcctgcaggccaccagcagccccctgcccctgactgtgacctctgtgcccaagcagcccggggtggcccccatcaacacagtgtgcagcaacaccaccagcgctgtgaaggtggtgaatgctgcccagagcctgctgacagcctgccccagcatcaccagccaggccttcctggatgccagcatctacaagtag

SEQ ID NO: 177164 - DNA, 291 bp, synthetic construct
  misc_feature 1..291: note = Description of Artificial Sequence: Synthetic coding sequence
  source 1..291: mol_type = other DNA
atggccagcaagaggaagagcaccaccccctgcatgatccctgtgaagacagtggtgctgcaggatgcctccatggaggcccagcctgctgagaccctgcctgagggcccccagcaggacctgcccccagaggccagcgctgccagcagcgaggccgcccagaaccccagcagcacagatggcagcaccctggccaacggccacaggagcaccctggatggctacctgtacagctgcaagtactgtgacttccgcagccatgacatgacccagtttgtgggccacatgtag

SEQ ID NO: 177165 - DNA, 2244 bp, synthetic construct
  misc_feature 1..2244: note = Description of Artificial Sequence: Synthetic coding sequence
  source 1..2244: mol_type = other DNA
atggaggtgcgggagggggaccacagcttcatcaacggggctgtgcctgtgtcccaggccagcgccagcagcgccaagaacccccacgccgccaacggccccctcatcggcaccgtgcctgtgctgcctgctggcatcgcccagttcctgagcctgcagcagcagccccctgtgcacgcccagcaccacgtgcaccagcccctgcccacagccaaggccctgcccaaggtgatgatccccctgagcagcatccccacctacaatgctgccatggacagcaacagcttcctgaagaacagcttccacaagttcccctaccccaccaaggccgagctgtgctacctgactgtggtgaccaagtacccagaggagcagctgaagatctggttcaccgcccagaggctgaagcagggcatctcctggagccctgaggagattgaagatgccaggaagaagatgttcaacacagtcatccagagcgtgccccagcccaccatcaccgtgctgaacacccccctggtggccagcgctggaaatgtgcagcacctgatccaggccgccctgcccggccacgtggtgggccagcctgagggcactggaggcggcctgctggtgacccagcccctgatggccaacggcctgcaggccaccagcagccccctgcccctgactgtgacctctgtgcccaagcagcccggggtggcccccatcaacacagtgtgcagcaacaccaccagcgctgtgaaggtggtgaatgctgcccagagcctgctgacagcctgccccagcatcaccagccaggccttcctggatgccagcatctacaagaacaagaagagccatgagcagctgagcgccctgaagggcagcttctgcaggaaccagtttcctggccagagcgaggtggagcacctgaccaaggtgacaggcctgagcacccgggaggtgaggaagtggttcagtgaccggcgctaccactgcaggaacctgaagggcagccgggccatgatccctggggaccacagcagcatcatcatcgacagcgtgcctgaggtgtccttcagccccagcagcaaggtgcctgaggtgacctgcatccccaccacagccaccctggccacccaccccagcgccaagaggcagagctggcaccagaccccagacttcacccccaccaagtacaaggagcgggcccctgagcagctgcgggccctggagagcagctttgcccagaaccccctgcccctggatgaggagctggaccggctgcggtctgagaccaagatgacccggcgggagattgacagctggttcagcgagaggaggaagaaggtgaatgctgaggagaccaagaaggccgaggagaatgccagccaggaggaggaggaggccgcagaagatgaaggaggagaggaggacctggccagcgagctgcgggtgtctggagaaaatggcagcctggagatgcccagcagccacatcctggccgagaggaaggtgagccccatcaagatcaacctgaagaacctgcgggtgacagaggccaacggcagaaatgagatccctggcctgggcgcctgtgaccctgaagatgatgagagcaacaagctggccgagcagctgcccgggaaggtgtcctgcaagaagacagcccagcagaggcacctgctgcggcagctgtttgtgcagacccagtggcccagcaaccaggactatgacagcatcatggcccagacaggcctgcccaggcctgaggtggtgcgctggtttggagacagccgctatgccctgaagaatggccagctgaagtggtatgaggactacaagaggggcaacttccccccaggcctgctggtgattgcccctggcaaccgggagctgctgcaggactactacatgacccacaagatgctgtatgaggaggacctgcagaacctgtgtgacaagacccagatgagcagccagcaggtgaagcagtggtttgctgagaagatgggagaggagaccagggctgtggccgacaccggcagcgaggaccagggccctggcaccggggagctgacagctgtgcacaagggcatgggagacacctacagcgaggtgtctgaaaattctgagagctgggagccccgggtgcctgaggccagcagcgagccctttgacaccagcagcccccaggccggccggcagctgggctcctggagcctgagcagccagcccctgcccagcctgctgaccctgtag

SEQ ID NO: 177166 - DNA, 2871 bp, synthetic construct
  misc_feature 1..2871: note = Description of Artificial Sequence: Synthetic coding sequence
  source 1..2871: mol_type = other DNA
atggccagcaagaggaagagcaccaccccctgcatgatccctgtgaagacagtggtgctgcaggatgcctccatggaggcccagcctgctgagaccctgcctgagggcccccagcaggacctgcccccagaggccagcgctgccagcagcgaggccgcccagaaccccagcagcacagatggcagcaccctggccaacggccacaggagcaccctggatggctacctgtacagctgcaagtactgtgacttccgcagccatgacatgacccagtttgtgggccacatgaacagcgagcacacagacttcaacaaggaccccacctttgtgtgcagcggctgcagcttcctggccaagaccccagagggcctgagcctgcacaatgccacctgccacagcggggaggccagctttgtgtggaatgtggccaagccagacaaccacgtggtggtggagcagagcatccctgagagcaccagcaccccagacctggccggggagcccagcgctgagggcgcagatggccaggccgagatcatcatcaccaagacccccatcatgaagatcatgaagggcaaggccgaggccaagaagatccacaccctgaaggaaaatgtgcccagccagcctgtgggggaggccctgcccaagctgagcactggagagatggaggtgcgggagggggaccacagcttcatcaacggggctgtgcctgtgtcccaggccagcgccagcagcgccaagaacccccacgccgccaacggccccctcatcggcaccgtgcctgtgctgcctgctggcatcgcccagttcctgagcctgcagcagcagccccctgtgcacgcccagcaccacgtgcaccagcccctgcccacagccaaggccctgcccaaggtgatgatccccctgagcagcatccccacctacaatgctgccatggacagcaacagcttcctgaagaacagcttccacaagttcccctaccccaccaaggccgagctgtgctacctgactgtggtgaccaagtacccagaggagcagctgaagatctggttcaccgcccagaggctgaagcagggcatctcctggagccctgaggagattgaagatgccaggaagaagatgttcaacacagtcatccagagcgtgccccagcccaccatcaccgtgctgaacacccccctggtggccagcgctggaaatgtgcagcacctgatccaggccgccctgcccggccacgtggtgggccagcctgagggcactggaggcggcctgctggtgacccagcccctgatggccaacggcctgcaggccaccagcagccccctgcccctgactgtgacctctgtgcccaagcagcccggggtggcccccatcaacacagtgtgcagcaacaccaccagcgctgtgaaggtggtgaatgctgcccagagcctgctgacagcctgccccagcatcaccagccaggccttcctggatgccagcatctacaagaacaagaagagccatgagcagctgagcgccctgaagggcagcttctgcaggaaccagtttcctggccagagcgaggtggagcacctgaccaaggtgacaggcctgagcacccgggaggtgaggaagtggttcagtgaccggcgctaccactgcaggaacctgaagggcagccgggccatgatccctggggaccacagcagcatcatcatcgacagcgtgcctgaggtgtccttcagccccagcagcaaggtgcctgaggtgacctgcatccccaccacagccaccctggccacccaccccagcgccaagaggcagagctggcaccagaccccagacttcacccccaccaagtacaaggagcgggcccctgagcagctgcgggccctggagagcagctttgcccagaaccccctgcccctggatgaggagctggaccggctgcggtctgagaccaagatgacccggcgggagattgacagctggttcagcgagaggaggaagaaggtgaatgctgaggagaccaagaaggccgaggagaatgccagccaggaggaggaggaggccgcagaagatgaaggaggagaggaggacctggccagcgagctgcgggtgtctggagaaaatggcagcctggagatgcccagcagccacatcctggccgagaggaaggtgagccccatcaagatcaacctgaagaacctgcgggtgacagaggccaacggcagaaatgagatccctggcctgggcgcctgtgaccctgaagatgatgagagcaacaagctggccgagcagctgcccgggaaggtgtcctgcaagaagacagcccagcagaggcacctgctgcggcagctgtttgtgcagacccagtggcccagcaaccaggactatgacagcatcatggcccagacaggcctgcccaggcctgaggtggtgcgctggtttggagacagccgctatgccctgaagaatggccagctgaagtggtatgaggactacaagaggggcaacttccccccaggcctgctggtgattgcccctggcaaccgggagctgctgcaggactactacatgacccacaagatgctgtatgaggaggacctgcagaacctgtgtgacaagacccagatgagcagccagcaggtgaagcagtggtttgctgagaagatgggagaggagaccagggctgtggccgacaccggcagcgaggaccagggccctggcaccggggagctgacagctgtgcacaagggcatgggagacacctacagcgaggtgtctgaaaattctgagagctgggagccccgggtgcctgaggccagcagcgagccctttgacaccagcagcccccaggccggccggcagctggagacagactag

SEQ ID NO: 177167 - DNA, 141 bp, synthetic construct
  misc_feature 1..141: note = Description of Artificial Sequence: Synthetic coding sequence
  source 1..141: mol_type = other DNA
atggccagcaagaggaagagcaccaccccctgcatgatccctgtgaagacagtggtgctgcaggatgcctccatggaggcccagcctgctgagaccctgcctgagggcccccagcaggacctgcccccagaggccagctag

SEQ ID NO: 177168 - DNA, 1497 bp, synthetic construct; identical to SEQ ID NO: 177163
  misc_feature 1..1497: note = Description of Artificial Sequence: Synthetic coding sequence
  source 1..1497: mol_type = other DNA

SEQ ID NO: 177169 - DNA, 147 bp, synthetic construct
  misc_feature 1..147: note = Description of Artificial Sequence: Synthetic coding sequence
  source 1..147: mol_type = other DNA
atggccagcaagaggaagagcaccaccccctgcatgatccctgtgaagacagtggtgctgcaggatgcctccatggaggcccagcctgctgagaccctgcctgagggcccccagcaggacctgcccccagaggccagcgctgcctag

SEQ ID NO: 177170 - DNA, 273 bp, synthetic construct
  misc_feature 1..273: note = Description of Artificial Sequence: Synthetic coding sequence
  source 1..273: mol_type = other DNA
atggccagcaagaggaagagcaccaccccctgcatgatccctgtgaagacagtggtgctgcaggatgcctccatggaggcccagcctgctgagaccctgcctgagggcccccagcaggacctgcccccagaggccagcgctgccagcagcgaggccgcccagaaccccagcagcacagatggcagcaccctggccaacggccacaggagcaccctggatggctacctgtacagctgcaagtactgtgacttccgcagccatgacatgacctag

SEQ ID NO: 177171 - DNA, 357 bp, synthetic construct
  misc_feature 1..357: note = Description of Artificial Sequence: Synthetic coding sequence
  source 1..357: mol_type = other DNA
atggccagcaagaggaagagcaccaccccctgcatgatccctgtgaagacagtggtgctgcaggatgcctccatggaggcccagcctgctgagaccctgcctgagggcccccagcaggacctgcccccagaggccagcgctgccagcagcgaggccgcccagaaccccagcagcacagatggcagcaccctggccaacggccacaggagcaccctggatggctacctgtacagctgcaagtactgtgacttccgcagccatgacatgacccagtttgtgggccacatgaacagcgagcacacagacttcaacaaggaccccacctttgtgtgcagcggctgcagcttcctggcctag

SEQ ID NO: 177172 - DNA, 2871 bp, synthetic construct; identical to SEQ ID NO: 177166
  misc_feature 1..2871: note = Description of Artificial Sequence: Synthetic coding sequence
  source 1..2871: mol_type = other DNA

SEQ ID NO: 177173 - DNA, 2910 bp, synthetic construct
  misc_feature 1..2910: note = Description of Artificial Sequence: Synthetic coding sequence
  source 1..2910: mol_type = other DNA
atggccagcaagaggaagagcaccaccccctgcatgatccctgtgaagacagtggtgctgcaggatgcctccatggaggcccagcctgctgagaccctgcctgagggcccccagcaggacctgcccccagaggccagcgctgccagcagcgaggccgcccagaaccccagcagcacagatggcagcaccctggccaacggccacaggagcaccctggatggctacctgtacagctgcaagtactgtgacttccgcagccatgacatgacccagtttgtgggccacatgaacagcgagcacacagacttcaacaaggaccccacctttgtgtgcagcggctgcagcttcctggccaagaccccagagggcctgagcctgcacaatgccacctgccacagcggggaggccagctttgtgtggaatgtggccaagccagacaaccacgtggtggtggagcagagcatccctgagagcaccagcaccccagacctggccggggagcccagcgctgagggcgcagatggccaggccgagatcatcatcaccaagacccccatcatgaagatcatgaagggcaaggccgaggccaagaagatccacaccctgaaggaaaatgtgcccagccagcctgtgggggaggccctgcccaagctgagcactggagagatggaggtgcgggagggggaccacagcttcatcaacggggctgtgcctgtgtcccaggccagcgccagcagcgccaagaacccccacgccgccaacggccccctcatcggcaccgtgcctgtgctgcctgctggcatcgcccagttcctgagcctgcagcagcagccccctgtgcacgcccagcaccacgtgcaccagcccctgcccacagccaaggccctgcccaaggtgatgatccccctgagcagcatccccacctacaatgctgccatggacagcaacagcttcctgaagaacagcttccacaagttcccctaccccaccaaggccgagctgtgctacctgactgtggtgaccaagtacccagaggagcagctgaagatctggttcaccgcccagaggctgaagcagggcatctcctggagccctgaggagattgaagatgccaggaagaagatgttcaacacagtcatccagagcgtgccccagcccaccatcaccgtgctgaacacccccctggtggccagcgctggaaatgtgcagcacctgatccaggccgccctgcccggccacgtggtgggccagcctgagggcactggaggcggcctgctggtgacccagcccctgatggccaacggcctgcaggccaccagcagccccctgcccctgactgtgacctctgtgcccaagcagcccggggtggcccccatcaacacagtgtgcagcaacaccaccagcgctgtgaaggtggtgaatgctgcccagagcctgctgacagcctgccccagcatcaccagccaggccttcctggatgccagcatctacaagaacaagaagagccatgagcagctgagcgccctgaagggcagcttctgcaggaaccagtttcctggccagagcgaggtggagcacctgaccaaggtgacaggcctgagcacccgggaggtgaggaagtggttcagtgaccggcgctaccactgcaggaacctgaagggcagccgggccatgatccctggggaccacagcagcatcatcatcgacagcgtgcctgaggtgtccttcagccccagcagcaaggtgcctgaggtgacctgcatccccaccacagccaccctggccacccaccccagcgccaagaggcagagctggcaccagaccccagacttcacccccaccaagtacaaggagcgggcccctgagcagctgcgggccctggagagcagctttgcccagaaccccctgcccctggatgaggagctggaccggctgcggtctgagaccaagatgacccggcgggagattgacagctggttcagcgagaggaggaagaaggtgaatgctgaggagaccaagaaggccgaggagaatgccagccaggaggaggaggaggccgcagaagatgaaggaggagaggaggacctggccagcgagctgcgggtgtctggagaaaatggcagcctggagatgcccagcagccacatcctggccgagaggaaggtgagccccatcaagatcaacctgaagaacctgcgggtgacagaggccaacggcagaaatgagatccctggcctgggcgcctgtgaccctgaagatgatgagagcaacaagctggccgagcagctgcccgggaaggtgtcctgcaagaagacagcccagcagaggcacctgctgcggcagctgtttgtgcagacccagtggcccagcaaccaggactatgacagcatcatggcccagacaggcctgcccaggcctgaggtggtgcgctggtttggagacagccgctatgccctgaagaatggccagctgaagtggtatgaggactacaagaggggcaacttccccccaggcctgctggtgattgcccctggcaaccgggagctgctgcaggactactacatgacccacaagatgctgtatgaggaggacctgcagaacctgtgtgacaagacccagatgagcagccagcagaagcagacagaatttgacctgatcaacgtgaaggactggcctgtgtgggagacagcctgccacgtggaggagcccaaccccaccctgtgctgccacatgcccttcccctgcccagctgctggccacctgggggagctgcctgagagcagccagacagcccagagcctgcccctgcccagcgcctgccccccacccagcaagcagcaggcccgctggggcagccaccagttcttcctgccccagtgcaggaccttccccctgcccagcaatggatag

SEQ ID NO: 177174 - DNA, 948 bp, synthetic construct
  misc_feature 1..948: note = Description of Artificial Sequence: Synthetic coding sequence
  source 1..948: mol_type = other DNA
atggccagcaagaggaagagcaccaccccctgcatgatccctgtgaagacagtggtgctgcaggatgcctccatggaggcccagcctgctgagaccctgcctgagggcccccagcaggacctgcccccagaggccagcgctgccagcagcgaggccgcccagaaccccagcagcacagatggcagcaccctggccaacggccacaggagcaccctggatggctacctgtacagctgcaagtactgtgacttccgcagccatgacatgacccagtttgtgggccacatgaacagcgagcacacagacttcaacaaggaccccacctttgtgtgcagcggctgcagcttcctggccaagaccccagagggcctgagcctgcacaatgccacctgccacagcggggaggccagctttgtgtggaatgtggccaagccagacaaccacgtggtggtggagcagagcatccctgagagcaccagcaccccagacctggccggggagcccagcgctgagggcgcagatggccaggccgagatcatcatcaccaagacccccatcatgaagatcatgaagggcaaggccgaggccaagaagatccacaccctgaaggaaaatgtgcccagccagcctgtgggggaggccctgcccaagctgagcactggagagatggagaagcagacagaatttgacctgatcaacgtgaaggactggcctgtgtgggagacagcctgccacgtggaggagcccaaccccaccctgtgctgccacatgcccttcccctgcccagctgctggccacctgggggagctgcctgagagcagccagacagcccagagcctgcccctgcccagcgcctgccccccacccagcaagcagcaggcccgctggggcagccaccagttcttcctgccccagtgcaggaccttccccctgcccagcaatggatag

SEQ ID NO: 177175 - DNA, 501 bp, synthetic construct
  misc_feature 1..501: note = Description of Artificial Sequence: Synthetic coding sequence
  source 1..501: mol_type = other DNA
atggccagcaagaggaagagcaccaccccctgcatgatccctgtgaagacagtggtgctgcaggatgcctccatggaggcccagcctgctgagaccctgcctgagggcccccagcaggacctgcccccagaggccagcgctgccagcagcgaggccgcccagaaccccagcagcacagatggcagcaccctggccaacggccacaggagcaccctggatggctacctgtacagctgcaagtactgtgacttccgcagccatgacatgacccagtttgtgggccacatgaacagcgagcacacagacttcaacaaggaccccacctttgtgtgcagcggctgcagcttcctggccaagaccccagagggcctgagcctgcacaatgccacctgccacagcggggaggccagctttgtgtggaatgtggccaagccagacaaccacgtggtggtggagcagagcatccctgagagcaccagcaccccagacctggccggctag

SEQ ID NO: 177176 - DNA, 2871 bp, synthetic construct; identical to SEQ ID NO: 177166
  misc_feature 1..2871: note = Description of Artificial Sequence: Synthetic coding sequence
  source 1..2871: mol_type = other DNA

SEQ ID NO: 177177 - DNA, 2871 bp, synthetic construct; identical to SEQ ID NO: 177166
  misc_feature 1..2871: note = Description of Artificial Sequence: Synthetic coding sequence
  source 1..2871: mol_type = other DNA

SEQ ID NO: 177178 - DNA, 501 bp, synthetic construct; identical to SEQ ID NO: 177175
  misc_feature 1..501: note = Description of Artificial Sequence: Synthetic coding sequence
  source 1..501: mol_type = other DNA

SEQ ID NO: 177179 - DNA, 1428 bp, synthetic construct
  misc_feature 1..1428: note = Description of Artificial Sequence: Synthetic coding sequence
  source 1..1428: mol_type = other DNA
atgggcatgtgggccagcctggatgccctgtgggagatgcctgctgagaagaggatctttggagctgtgctgctcttctcctggacagtgtacctgtgggagaccttcctggcccagaggcagaggcgcatctacaagaccaccacccacgtgcccccagagctgggccagatcatggattctgagacctttgagaagagccggctgtaccagctggacaagagcaccttctccttctggagcggcctgtacagcgagacagagggcaccctcatcctgctgtttggaggcatcccctacctgtggaggctgagcggccgcttctgtggctacgccggcttcggcccagaatatgagatcacccagagcctggtgttcctgctgctggccaccctcttcagcgccctgaccggcctgccctggagcctgtacaacacctttgtgattgaggagaagcacggcttcaaccagcagaccctgggcttcttcatgaaggatgccatcaagaagtttgtggtgacccagtgcatcctgctgcctgtgagcagcctgctgctgtacatcatcaagattggaggagactacttcttcatctatgcctggctgttcaccctggtggtgtccctggtgctggtgaccatctatgctgactacatcgcccccctgtttgacaagttcacccccctgcctgagggcaagctgaaggaggagattgaggtgatggccaagagcattgacttccccctgaccaaggtgtatgtggtggagggcagcaagaggagcagccacagcaatgcctacttctacggcttcttcaagaacaagagaattgtgctgtttgacaccctgctggaggagtacagcgtgctgaacaaggacatccaggaggacagcggcatggagcccagaaatgaggaggagggcaacagcgaggagatcaaggccaaggtgaagaacaagaagcagggctgcaagaatgaggaggtgctggccgtgctgggccacgagctgggccactggaagctgggccacacagtgaagaacatcatcatcagccagatgaacagcttcctgtgcttcttcctgtttgctgtgctgattggaaggaaggagctgtttgctgccttcggcttctatgacagccagcccaccctcatcggcctgctgatcatcttccagttcatcttcagcccctacaatgaggtgctgtccttctgcctgactgtgctgagccgccgctttgagttccaggctgatgcctttgccaagaagctgggcaaggccaaggacctgtacagcgccctgatcaagctgaacaaggacaacctgggcttccctgtgtctgactggctgttctccatgtggcactacagccacccccccctgctggagcggctgcaggccctgaagaccatgaagcagcactag

SEQ ID NO: 177180 - DNA, 1017 bp, synthetic construct
  misc_feature 1..1017: note = Description of Artificial Sequence: Synthetic coding sequence
  source 1..1017: mol_type = other DNA
atgatgaggacctgtgtgctgctgtctgctgtgctgtggtgcctgactggagtgcagtgcccccgcttcaccctcttcaacaagaagggcttcatctacggcaagacaggccagcctgacaagatctacgtggagctgcaccagaacagccctgtgctgatctgcatggacttcaagctgagcaagaaggagatcgtggaccccacctacctgtggattggccccaatgagaagaccctgactggaaacaaccgcatcaacatcacagaaacaggccagctgatggtgaaggacttcctggagcccctgagcggcctgtacacctgcaccctgagctacaagacagtgaaggccgagacccaggaggagaagacagtgaagaagagatatgacttcatggtgtttgcctaccgggagccagactacagctaccagatggctgtgcgcttcaccaccaggagctgcatcggccgctacaatgatgtgttcttccgggtgctgaagaagatcctggacagcctcatcagtgacctgagctgccacgtgattgagcccagctacaagtgccacagcgtggagatccctgagcacggcctcatccacgagctgttcatcgccttccaggtgaacccctttgcccctggctggaagggggcctgcaatggatctgtggactgtgaggacaccaccaaccacaacatcctgcaggcccgggacagaattgaggacttcttccgcagccaggcctacatcttctaccacaacttcaacaagaccctgcctgccatgcactttgtggaccacagcctgcaggtggtgcggctggacagctgccggcccggctttgggaagaatgaaaggctgcacagcaactgtgccagctgctgcgtggtgtgcagccctgccaccttctccccagatgtgaatgtgacctgccagacctgtgtgtctgtgctgacctatggagccaagagctgcccccagaccagcaacaagaaccagcagtatgaagattag

SEQ ID NO: 177181 - DNA, 951 bp, synthetic construct
  misc_feature 1..951: note = Description of Artificial Sequence: Synthetic coding sequence
  source 1..951: mol_type = other DNA
atgatgaggacctgtgtgctgctgtctgctgtgctgtggtgcctgaccggggacaagatctacgtggagctgcaccagaacagccctgtgctgatctgcatggacttcaagctgagcaagaaggagatcgtggaccccacctacctgtggattggccccaatgagaagaccctgactggaaacaaccgcatcaacatcacagaaacaggccagctgatggtgaaggacttcctggagcccctgagcggcctgtacacctgcaccctgagctacaagacagtgaaggccgagacccaggaggagaagacagtgaagaagagatatgacttcatggtgtttgcctaccgggagccagactacagctaccagatggctgtgcgcttcaccaccaggagctgcatcggccgctacaatgatgtgttcttccgggtgctgaagaagatcctggacagcctcatcagtgacctgagctgccacgtgattgagcccagctacaagtgccacagcgtggagatccctgagcacggcctcatccacgagctgttcatcgccttccaggtgaacccctttgcccctggctggaagggggcctgcaatggatctgtggactgtgaggacaccaccaaccacaacatcctgcaggcccgggacagaattgaggacttcttccgcagccaggcctacatcttctaccacaacttcaacaagaccctgcctgccatgcactttgtggaccacagcctgcaggtggtgcggctggacagctgccggcccggctttgggaagaatgaaaggctgcacagcaactgtgccagctgctgcgtggtgtgcagccctgccaccttctccccagatgtgaatgtgacctgccagacctgtgtgtctgtgctgacctatggagccaagagctgcccccagaccagcaacaagaaccagcagtatgaagattag

SEQ ID NO: 177182 - DNA, 1917 bp, synthetic construct
  misc_feature 1..1917: note = Description of Artificial Sequence: Synthetic coding sequence
  source 1..1917: mol_type = other DNA
atggccggcggcagcgccaccacctggggctaccctgtggccctgctgctgctggtggccaccctgggcctgggccgctggctgcagcctgaccccggcctgcccggcctgcggcacagctatgactgtggcatcaagggcatgcagctgctggtgttcccccggcccggccagaccctgcgcttcaaggtggtggatgaatttggaaacagatttgatgtgaacaactgcagcatctgctaccactgggtgaccagccggccccaggagcctgctgtgttttctgctgactaccggggctgccacgtgctggagaaggatggccgcttccacctgcgggtcttcatggaggccgtgctgcccaacggccgggtggatgtggcccaggatgccaccctcatctgccccaagccagaccccagcaggaccctggacagccagctggcccccccagccatgttttctgtgtccaccccccagaccctgtccttcctgcccaccagcggccacaccagccagggcagcggccacgccttccccagccccctggaccccggccacagctctgtgcaccccaccccagccctgcccagccctggccctggccccaccctggccaccctggcccagccccactggggcaccctggagcactgggatgtgaacaagagggactacatcggcacccacctgagccaggagcagtgccaggtggccagcggccacctgccctgcatcgtgcggaggaccagcaaggaggcctgccagcaggccggctgctgctatgacaacacccgggaggtgccctgctactacggcaacacagccaccgtgcagtgcttcagagatggctactttgtgctggtggtgtcccaggagatggccctgacccaccgcatcaccctggccaacatccacctggcctatgcccccaccagctgcagccccacccagcacacagaggcctttgtggtgttctacttccccctgacccactgcggcaccaccatgcaggtggccggggaccagctgatctatgagaactggctggtgtctggcatccacatccagaagggcccccagggcagcatcacccgggacagcaccttccagctgcacgtgcgctgtgtgttcaatgccagtgacttcctgcccatccaggccagcatcttccccccacccagccctgcccccatgacccagcccggccccctgcggctggagctgagaattgccaaggatgagaccttcagcagctactatggagaagatgactaccccatcgtgcggctgctgcgggagcctgtgcacgtggaggtgcggctgctgcagaggacagaccccaacctggtgctgctgctgcaccagtgctggggcgcccccagcgccaaccccttccagcagccccagtggcccatcctgagtgatggctgccccttcaagggggacagctaccgcacccagatggtggccctggatggagccacccccttccagagccactaccagcgcttcaccgtggccacctttgccctgctggacagcggcagccagagggccctgcggggcctggtgtacctgttctgcagcaccagcgcctgccacaccagcggcctggagacctgcagcacagcctgcagcacaggcaccacccggcagaggaggagcagcggccacagaaatgacacagcccggccccaggacatcgtgagcagccctggccctgtgggctttgaagattcctatggccaggagcccaccctgggccccacagacagcaatggaaacagcagcctgcggcccctgctgtgggccgtgctgctgctgcctgctgtggccctggtgctgggcttcggcgtgtttgtgggcctgagccagacctgggcccagaagctgtgggagagcaaccggcagtag

SEQ ID NO: 177183 - DNA, 993 bp, synthetic construct
  misc_feature 1..993: note = Description of Artificial Sequence: Synthetic coding sequence
  source 1..993: mol_type = other DNA
atggccctgacccaccgcatcaccctggccaacatccacctggcctatgcccccaccagctgcagccccacccagcacacagaggcctttgtggtgttctacttccccctgacccactgcggcaccaccatgcaggtggccggggaccagctgatctatgagaactggctggtgtctggcatccacatccagaagggcccccagggcagcatcacccgggacagcaccttccagctgcacgtgcgctgtgtgttcaatgccagtgacttcctgcccatccaggccagcatcttccccccacccagccctgcccccatgacccagcccggccccctgcggctggagctgcgcatcgccaaggatgagaccttcagcagctactacggggaggatgactaccccatcgtgcggctgctgcgggagcctgtgcacgtggaggtgcggctgctgcagaggacagaccccaacctggtgctgctgctgcaccagtgctggggcgcccccagcgccaaccccttccagcagccccagtggcccatcctgagtgatggctgccccttcaagggggacagctaccgcacccagatggtggccctggatggagccacccccttccagagccactaccagcgcttcaccgtggccacctttgccctgctggacagcggcagccagagggccctgcggggcctggtgtacctgttctgcagcaccagcgcctgccacaccagcggcctggagacctgcagcacagcctgcagcacaggcaccacccggcagaggaggagcagcggccacagaaatgacacagcccggccccaggacatcgtgagcagccctggccctgtgggctttgaggacagctatggccaggagcccaccctgggccccacagacagcaatggaaacagcagcctgcggcccctgctgtgggccgtgctgctgctgcctgctgtggccctggtgctgggctttggagtgtttgtggcctag

SEQ ID NO: 177184 - DNA, 1317 bp, synthetic construct
  misc_feature 1..1317: note = Description of Artificial Sequence: Synthetic coding sequence
  source 1..1317: mol_type = other DNA
atgggccgggtggaggatggcggcaccacagaggagctggaggactgggaccccggcaccagcgccctgcctgcccctggcatcaagcagggcccccgggagcagacaggcaccggccccctgagccagaagtgctgggagcctgagccagatgcccccagccagcccggccctgccctgtggagccggggccgggcccggacccaggccctggccggcggcagcagcctgcagcagctggaccctgaaaatacaggcttcatcggggctgacaccttcaccggcctggtgcacagccatgagctgcccctggaccctgccaagctggacatgctggtggccctggcccagagcaatgagcagggccaggtgtgctaccaggagctggtggacctgatcagcagcaagaggagcagcagcttcaagagggccatcgccaacggccagagggccctgcccagagatggccccctggatgagcccggcctgggcgtgtacaagagatttgtgcgctacgtggcctatgagatcctgccctgtgaggtggaccggcgctggtacttctaccgccacaggagctgccccccacctgtgttcatggcctctgtgaccctggcccagatcatcgtgttcctgtgctacggggcccggctgaacaagtgggtgctgcagacctaccaccctgagtacatgaagagccccctggtgtaccaccctggccaccgggcccgggcctggaggttcctgacctacatgttcatgcacgtgggcctggagcagctgggcttcaatgccctgctgcagctgatgattggagtgcccctggagatggtgcacggcctgctgcgcatcagcctgctgtacctggccggcgtgctggccggcagcctgactgtgtccatcacagacatgagggcccctgtggtgggcggcagcggcggcgtgtatgccctgtgcagcgcccacctggccaacgtggtgatgaactgggccggcatgcgctgcccctacaagctgctgaggatggtgctggccctggtgtgcatgagcagcgaggtgggccgggctgtgtggctgcgcttcagcccccccctgcctgccagcggcccccagcccagcttcatggcccacctggccggggctgtggtgggcgtgtccatgggcctgaccatcctgcggagctatgaggagcggctgcgggaccagtgtggctggtgggtggtgctgctggcctacggcaccttcctgctgtttgctgtgttctggaatgtgtttgcctatgacctgctgggcgcccacatccccccacctccttag

SEQ ID NO: 177185 - DNA, 1122 bp, synthetic construct
  misc_feature 1..1122: note = Description of Artificial Sequence: Synthetic coding sequence
  source 1..1122: mol_type = other DNA
atggtgatggtgtccaaggacctgtttggaacaggcaagctgatccgggctgctgacctgaccctgggccctgaggcctgtgagcccctggtgtccatggacacagaagatgtggtgcgctttgaggtgggcctgcatgaatgtggcaacagcatgcaggtgacagatgatgccctggtgtacagcaccttcctgctgcatgaccccaggcctgtgggcaacctgagcatcgtgaggaccaacagagctgagatccccatcgagtgccgctacccccggcagggcaatgtgagcagccaggccatcctgcccacctggctgcccttccgcaccaccgtcttcagcgaggagaagctgaccttcagcctgcggctgatggaggagaactggaatgctgagaagaggagccccaccttccacctgggagatgctgcccacctgcaggccgagatccacacaggcagccacgtgcccctgcggctgtttgtggaccactgtgtggccacccccaccccagaccagaatgccagcccctaccacaccatcgtggacttccacggctgcctggtggatggcctgacagatgccagcagcgccttcaaggtgcccaggcctggccctgacaccctgcagttcaccgtggatgtgttccactttgccaatgacagcaggaacatgatctacatcacctgccacctgaaggtgaccctggccgagcaggaccctgatgagctgaacaaggcctgcagcttcagcaagcccagcaacagctggttccctgtggagggcagcgctgacatctgccagtgctgcaacaagggggactgtggcacccccagccacagccggcggcagccccacgtgatgagccagtggagccgcagcgccagcaggaacagaagacatgtgacagaggaggctgatgtgacagtgggccccctcatcttcctggacagaagaggagaccacgaggtggagcagtgggccctgcccagcgacacctctgtggtgctgctgggcgtgggcctggccgtggtggtgtccctgaccctgacagctgtgatcctggtgctgacccggcgctgcaggacagccagccaccctgtgtctgccagcgagtag

SEQ ID NO: 177186 - DNA, 1275 bp, synthetic construct
  misc_feature 1..1275: note = Description of Artificial Sequence: Synthetic coding sequence
  source 1..1275: mol_type = other DNA
atggagctgagctaccgcctcttcatctgcctgctgctgtggggcagcacagagctgtgctacccccagcccctgtggctgctgcagggcggggccagccaccctgagacctctgtgcagcctgtgctggtggagtgccaggaggccaccctgatggtgatggtgtccaaggacctgtttggcaccgggaagctgatccgggctgctgacctgaccctgggccctgaggcctgtgagcccctggtgtccatggacacagaagatgtggtgcgctttgaggtgggcctgcatgaatgtggcaacagcatgcaggtgacagatgatgccctggtgtacagcaccttcctgctgcatgaccccaggcctgtgggcaacctgagcatcgtgaggaccaacagagctgagatccccattgaatgtcgctacccccggcagggcaatgtgagcagccaggccatcctgcccacctggctgcccttccgcaccaccgtcttcagcgaggagaagctgaccttcagcctgcggctgatggaggagaactggaatgctgagaagaggagccccaccttccacctgggagatgctgcccacctgcaggccgagatccacacaggcagccacgtgcccctgcggctgtttgtggaccactgtgtggccacccccaccccagaccagaatgccagcccctaccacaccatcgtggacttccacggctgcctggtggatggcctgacagatgccagcagcgccttcaaggtgccccggcccggccctgacaccctgcagttcaccgtggatgtgttccactttgccaatgacagcaggaacatgatctacatcacctgccacctgaaggtgaccctggccgagcaggaccctgatgagctgaacaaggcctgcagcttcagcaagcccagcaacagctggttccctgtggagggcagcgctgacatctgccagtgctgcaacaagggggactgtggcacccccagccacagccggcggcagccccacgtgatgagccagtggagccgcagcgccagcaggaacagaagacatgtgacagaggaggctgatgtgacagtgggccccctcatcttcctggaccggcggggggaccacgaggtggagcagtgggccctgcccagcgacacctctgtggtgctgctgggcgtgggcctggccgtggtggtgtccctgaccctgacagctgtgatcctggtgctgacccggcgctgcaggacagccagccaccctgtgtctgccagcgagtag

SEQ ID NO: 177187 - DNA, 1116 bp, synthetic construct
  misc_feature 1..1116: note = Description of Artificial Sequence: Synthetic coding sequence
  source 1..1116: mol_type = other DNA
atggagctgagctaccgcctcttcatctgcctgctgctgtggggcagcacagagctgtgctacccccagcccctgtggctgctgcagggcggggccagccaccctgagacctctgtgcagcctgtgctggtggagtgccaggaggccaccctgatggtgatggtgtccaaggacctgtttggcaccgggaagctgatccgggctgctgacctgaccctgggccctgaggcctgtgagcccctggtgtccatggacacagaagatgtggtgcgctttgaggtgggcctgcatgaatgtggcaacagcatgcaggtgacagatgatgccctggtgtacagcaccttcctgctgcatgaccccaggcctgtgggcaacctgagcatcgtgaggaccaacagagctgagatccccattgaatgtcgctacccccggcagggcaatgtgagcagccaggccatcctgcccacctggctgcccttccgcaccaccgtcttcagcgaggagaagctgaccttcagcctgcggctgatggaggagaactggaatgctgagaagaggagccccaccttccacctgggagatgctgcccacctgcaggccgagatccacacaggcagccacgtgcccctgcggctgtttgtggaccactgtgtggccacccccaccccagaccagaatgccagcccctaccacaccatcgtggacttccacggctgcctggtggatggcctgacagatgccagcagcgccttcaaggtgccccggcccggccctgacaccctgcagttcaccgtggatgtgttccactttgccaatgacagcaggaacatgatctacatcacctgccacctgaaggtgaccctggccgagcaggaccctgatgagctgaacaaggcctgcagcttcagcaagcccagcaacagctggttccctgtggagggcagcgctgacatctgccagtgctgcaacaagggggactgtggcacccccagccacagccggcggcagccccacgtgatgagccagtggagccgcagcgccagcaggaacagaagacatgtgacagaggaggctgatgtgacagtgggcacagacctgcccggccaggagggctag

SEQ ID NO: 177188 - DNA, 1623 bp, synthetic construct
  misc_feature 1..1623: note = Description of Artificial Sequence: Synthetic coding sequence
  source 1..1623: mol_type = other DNA
atgtggctgctgcgctgtgtgctgctgtgtgtgtccctgagcctggccgtgtctggccagcacaagccagaggccccagactacagctctgtgctgcactgcggcccctggagcttccagtttgctgtgaacctgaaccaggaggccaccagcccccctgtgctgattgcctgggacaaccagggcctgctgcacgagctgcagaatgacagcgactgtggcacctggatcagaaaaggacctggcagctctgtggtgctggaggccacctacagcagctgctacgtgacagagtgggacagccactacatcatgcctgtgggcgtggagggcgctggagctgctgagcacaaggtggtgacagagaggaagctgctgaagtgccccatggacctgctggccagagatgccccagacacagactggtgtgacagcatcccagcccgggaccggctgccctgtgcccccagccccatcagcagaggagactgtgagggcctgggctgctgctacagcagcgaggaggtgaacagctgctactacggcaacacagtgaccctgcactgcacccgggagggccacttcagcattgctgtgtccagaaatgtgaccagcccccccctgctgctggacagcgtgcggctggccctgagaaatgattctgcctgcaaccctgtgatggccacccaggcctttgtgctcttccagttccccttcaccagctgtggcaccacccggcagatcactggagacagagctgtgtatgaaaatgagctggtggccaccagagatgtgaagaatggcagccggggctctgtgacccgggacagcatcttccggctgcacgtgtcctgcagctacagcgtgagcagcaacagcctgcccatcaacgtgcaggtgttcaccctgcccccacccttccctgagacccagcccggccccctgaccctggagctgcagatcgccaaggacaagaactacggcagctactatggagtgggggactaccctgtggtgaagctgctgcgggaccccatctacgtggaggtgtccatcctgcacaggacagacccctacctgggcctgctgctgcagcagtgctgggccacccccagcacagaccccctgagccagccccagtggcccatcctggtgaagggctgcccctacatcggggacaactaccagacccagctgatccctgtgcagaaggccctggacctgcccttccccagccaccaccagcgcttcagcatcttcaccttctcctttgtgaaccccaccgtggagaagcaggccctgcggggccctgtgcacctgcactgcagcgtgtctgtgtgccagcctgctgagacccccagctgtgtggtgacctgcccagacctgagcagaagaagaaactttgacaacagcagccagaacaccacagcctctgtgagcagcaagggccccatgatcctgctgcaggccaccaaggaccccccagagaagctgcgggtgcctgtggacagcaaggtgctgtgggtggccggcctgagcggcaccctcatcctgggcgccctgctggtgtcctacctggccgtgaagaagcagaagagctgcccagaccagatgtgccagtag

SEQ ID NO: 177189 - DNA, 2340 bp, synthetic construct
  misc_feature 1..2340: note = Description of Artificial Sequence: Synthetic coding sequence
  source 1..2340: mol_type = other DNA
atggccagctttgtgacagaggtgctggcccacagcggccgcctggagaaggaggacctgggcacccgcatcagccggctgaccaggagagtggaggagatcaagggggaggtgtgcaacatgatcagcaagaagtacagcgagttcctgcccagcatgcagagcgcccagggcctcatcacccaggtggacaagctgtctgaggacatcgacctgctgaagagcagaattgaaagtgaggtgcggcgggacctgcacgtgtccactggagagttcacagacctgaagcagcagctggagcgggacagcgtggtgctgagcctgctgaagcagctgcaggagttcagcacagccatcgaggagtacaactgtgccctgacagagaagaagtatgtgactggagcccagaggctggaggaggcccagaagtgcctgaagctgctgaagagcaggaagtgctttgacctgaagatcctgaagagcctgtccatggagctgaccatccagaagcagaacatcctgtaccacctgggggaggagtggcagaagctgattgtgtggaagttcccccccagcaaggacaccagcagcctggagagctacctgcagacagagctgcacctgtacacagagcagagccacaaggaggagaagacccccatgccacccatcagctctgtgctgctggccttctctgtgctgggggagctgcacagcaagctgaagagctttggccagatgctgctgaagtacatcctgcggcccctggccagctgccccagcctgcacgccgtcatcgagagccagcccaacatcgtcatcatccgctttgagagcatcatgaccaacctggagtaccccagccccagcgaggtgttcaccaagatccggctggtgctggaggtgctgcagaagcagctgctggacctgcccctggacacagacctggagaatgagaagaccagcacagtgcccctggccgagatgctgggggacatgatctgggaggacctgtctgagtgcctgatcaagaactgcctggtgtacagcatccccaccaacagcagcaagctgcagcagtatgaggagatcatccagagcacagaggagtttgaaaatgccctgaaggagatgaggttcctgaagggggacaccacagacctgctgaagtatgccaggaacatcaacagccactttgccaacaagaagtgccaggacgtcatcgtggccgccaggaacctgatgaccagcgagatccacaacacagtgaagatcatcccagacagcaagatcaacgtgcctgagctgcccaccccagatgaggacaacaagctggaggtgcagaaggtgagcaacacccagtaccacgaggtgatgaacctggagcctgagaacaccctggaccagcacagcttcagcctgcccacctgccgcatcagcgagagcgtgaagaagctgatggagctggcctaccagaccctgctggaggccaccaccagcagtgaccagtgtgctgtgcagctgttctacagcgtgaggaacatcttccacctgttccatgatgtggtgcccacctaccacaaggagaacctgcagaagctgccccagctggccgccatccaccacaacaactgcatgtacatcgcccaccacctgctgaccctgggccaccagttccggctgcggctggcccccatcctgtgtgatggaacagccacctttgtggacctggtgcccggcttccggcggctgggcacagagtgcttcctggcccagatgagggcccagaagggggagctgctggagcggctgagcagcgccaggaacttcagcaacatggatgatgaggagaactacagcgctgccagcaaggctgtgcggcaggtgctgcaccagctgaagaggctgggcatcgtgtggcaggatgtgctgcctgtgaacatctactgcaaggccatgggcaccctgctgaacacagccatcagcgaggtgattggcaagatcacagccctggaggacatcagcacagaagatggagaccggctgtacagcctgtgcaagacagtgatggatgagggcccccaggtgtttgcccccctgtctgaggagagcaagaacaagaagtaccaggaggaggtgcctgtgtatgtgcccaagtggatgcccttcaaggagctgatgatgatgctgcaggccagcctgcaggagattggagaccgctgggcagatggcaagggccccctggccgccgccttcagcagcagcgaggtgaaggccctgatccgggccctcttccagaacacagagcggcgggctgctgccctggccaagatcaagtag

SEQ ID NO: 177190 - DNA, 2019 bp, synthetic construct
  misc_feature 1..2019: note = Description of Artificial Sequence: Synthetic coding sequence
  source 1..2019: mol_type = other DNA
atggccagctttgtgacagaggtgctggcccacagcggccgcctggagaaggaggacctgggcacccgcatcagccggctgaccaggagagtggaggagatcaagggggaggtgtgcaacatgatcagcaagaagtacagcgagttcctgcccagcatgcagagcgcccagggcctcatcacccaggtggacaagctgtctgaggacatcgacctgctgaagagcagaattgaaagtgaggtgcggcgggacctgcacgtgtccactggagagttcacagacctgaagcagcagctggagcgggacagcgtggtgctgagcctgctgaagcagctgcaggagttcagcacagccatcgaggagtacaactgtgccctgacagagaagaagtatgtgactggagcccagaggctggaggaggcccagaagtgcctgaagctgctgaagagcaggaagtgctttgacctgaagatcctgaagagcctgtccatggagctgaccatccagaagcagaacatcctgtaccacctgggggaggagtggcagaagctgattgtgtggaagttcccccccagcaaggacaccagcagcctggagagctacctgcagacagagctgcacctgtacacagagcagagccacaaggaggagaagacccccatgccacccatcagctctgtgctgctggccttctctgtgctgggggagctgcacagcaagctgaagagctttggccagatgctgctgaagtacatcctgcggcccctggccagctgccccagcctgcacgccgtcatcgagagccagcccaacatcgtcatcatccgctttgagagcatcatgaccaacctggagtaccccagccccagcgaggtgttcaccaagatccggctggtgctggaggtgctgcagaagcagctgctggacctgcccctggacacagacctggagaatgagaagaccagcacagtgcccctggccgagatgctgggggacatgatctgggaggacctgtctgagtgcctgatcaagaactgcctggtgtacagcatccccaccaacagcagcaagctgcagcagtatgaggagatcatccagagcacagaggagtttgaaaatgccctgaaggagatgaggttcctgaagggggacaccacagacctgctgaagtatgccaggaacatcaacagccactttgccaacaagaagtgccaggacgtcatcgtggccgccaggaacctgatgaccagcgagatccacaacacagtgaagatcatcccagacagcaagatcaacgtgcctgagctgcccaccccagatgaggacaacaagctggaggtgcagaaggtgagcaacacccagtaccacgaggtgatgaacctggagcctgagaacaccctggaccagcacagcttcagcctgcccacctgccgcatcagcgagagcgtgaagaagctgatggagctggcctaccagaccctgctggaggccaccaccagcagtgaccagtgtgctgtgcagctgttctacagcgtgaggaacatcttccacctgttccatgatgtggtgcccacctaccacaaggagaacctgcagaagctgccccagctggccgccatccaccacaacaactgcatgtacatcgcccaccacctgctgaccctgggccaccagttccggctgcggctggcccccatcctgtgtgatggaacagccacctttgtggacctggtgcccggcttccggcggctgggcacagagtgcttcctggcccagatgagggcccagaagggggagctgctggagcggctgagcagcgccaggaacttcagcaacatggatgatgaggagaactacagcgctgccagcaaggctgtgcggcaggtgctgcaccagctgaagaggctgggcatcgtgtggcaggatgtgctgcctgtgaacatctactgcaaggccatgggcaccctgctgaacacagccatcagcgaggtgattggcaagatcacagccctggagtag

SEQ ID NO: 177191 - DNA, 1776 bp, synthetic construct
  misc_feature 1..1776: note = Description of Artificial Sequence: Synthetic coding sequence
  source 1..1776: mol_type = other DNA
atgtgggagcggctgaactgtgccgctgaggacttctacagccggctgctgcagaagttcaatgaggagaagaagggcatcaggaaggaccccttcctgtatgaagcagatgtgcaggtgcagctgatcagcaagggccagcccaaccccctgaagaacatcctgaatgaaaatgacatcgtgttcatcgtggagaaggtgcccctggagaaggaggagaccagccacatcgaggagctgcagagcgaggagacagccatcagtgacttcagcactggagaaaatgtgggccccctggccctgcctgtgggcaaggcccggcagctgattggcctgtacaccatggcccacaaccccaacatgacccacctgaagatcaacctgcctgtgacagccctgccccccctgtgggtgcgctgtgacagcagtgaccctgagggcacctgctggctgggcgctgagctgatcaccaccaacaacagcatcactggaattgtgctgtatgtggtgtcctgcaaggctgacaagaactacagcgtgaacctggagaacctgaagaacctgcacaagaagaggcaccacctgagcacagtgaccagcaaaggatttgcccagtatgagctgttcaagagcagcgccctggatgacaccatcacagccagccagacagccatcgccctggacatctcctggagccctgtggatgagatcctgcagatcccccccctgagcagcacagccaccctgaacatcaaggtggagagcggggagccccggggccccctgaaccacctgtaccgggagctgaagttcctgctggtgctggctgatggcctgaggactggagtgacagagtggctggagcccctggaggccaagtctgctgtggagctggtgcaggagttcctgaatgacctgaacaagctggatggctttggagacagcaccaagaaggacacagaggtggagaccctgaagcatgacacagctgctgtggacagatctgtgaagaggctcttcaaggtgcggagtgacctggactttgctgagcagctgtggtgcaagatgagcagcagcgtcatctcctaccaggacctggtgaagtgcttcaccctcatcatccagagcctgcagagaggagacatccagccctggctgcacagcggcagcaacagcctgctgagcaagctgatccaccagagctaccacggcaccatggacacagtgtccctgagcggcaccatccctgtgcagatgctgctggagatcggcctggacaagctgaagaaggactacatctccttcttcatcggccaggagctggccagcctgaaccacctggagtacttcatcgcccccagcgtggacatccaggagcaggtgtacagagtgcagaagctgcaccacatcctggagatcctggtgtcctgcatgcccttcatcaagagccagcacgagctgctcttcagcctgacccagatctgcatcaagtactacaagcagaaccccctggatgagcagcacatcttccagctgcctgtgcggcccacagctgtgaagaacctgtaccagagcgagaagccccagaagtggagggtggagatctacagcggccagaagaagatcaagacagtgtggcagctgagtgacagcagccccatcgaccacctgaacttccacaagccagacttcagcgagctgaccctgaatggcagcctggaggagcgcatcttcttcaccaacatggtgacctgcagccaggtgcacttcaagtag

SEQ ID NO: 177192 - DNA, 1434 bp, synthetic construct
  misc_feature 1..1434: note = Description of Artificial Sequence: Synthetic coding sequence
  source 1..1434: mol_type = other DNA
atggcccacaaccccaacatgacccacctgaagatcaacctgcctgtgacagccctgccccccctgtgggtgcgctgtgacagcagtgaccctgagggcacctgctggctgggcgctgagctgatcaccaccaacaacagcatcactggaattgtgctgtatgtggtgtcctgcaaggctgacaagaactacagcgtgaacctggagaacctgaagaacctgcacaagaagaggcaccacctgagcacagtgaccagcaaaggatttgcccagtatgagctgttcaagagcagcgccctggatgacaccatcacagccagccagacagccatcgccctggacatctcctggagccctgtggatgagatcctgcagatcccccccctgagcagcacagccaccctgaacatcaaggtggagagcggggagccccggggccccctgaaccacctgtaccgggagctgaagttcctgctggtgctggctgatggcctgaggactggagtgacagagtggctggagcccctggaggccaagtctgctgtggagctggtgcaggagttcctgaatgacctgaacaagctggatggctttggagacagcaccaagaaggacacagaggtggagaccctgaagcatgacacagctgctgtggacagatctgtgaagaggctcttcaaggtgcggagtgacctggactttgctgagcagctgtggtgcaagatgagcagcagcgtcatctcctaccaggacctggtgaagtgcttcaccctcatcatccagagcctgcagagaggagacatccagccctggctgcacagcggcagcaacagcctgctgagcaagctgatccaccagagctaccacggcaccatggacacagtgtccctgagcggcaccatccctgtgcagatgctgctggagatcggcctggacaagctgaagaaggactacatctccttcttcatcggccaggagctggccagcctgaaccacctggagtacttcatcgcccccagcgtggacatccaggagcaggtgtacagagtgcagaagctgcaccacatcctggagatcctggtgtcctgcatgcccttcatcaagagccagcacgagctgctcttcagcctgacccagatctgcatcaagtactacaagcagaaccccctggatgagcagcacatcttccagctgcctgtgcggcccacagctgtgaagaacctgtaccagagcgagaagccccagaagtggagggtggagatctacagcggccagaagaagatcaagacagtgtggcagctgagtgacagcagccccatcgaccacctgaacttccacaagccagacttcagcgagctgaccctgaatggcagcctggaggagcgcatcttcttcaccaacatggtgacctgcagccaggtgcacttcaagtag

SEQ ID NO: 177193 - DNA, 1434 bp, synthetic construct; identical to SEQ ID NO: 177192
  misc_feature 1..1434: note = Description of Artificial Sequence: Synthetic coding sequence
  source 1..1434: mol_type = other DNA

SEQ ID NO: 177194 - DNA, 1275 bp, synthetic construct
  misc_feature 1..1275: note = Description of Artificial Sequence: Synthetic coding sequence
  source 1..1275: mol_type = other DNA
atggccgccctgggagatgaggtgctggatggctacgtgtttcctgcctgccccccctgcagctaccgctacccctacccagctgccaccaagggcaaaggagctgctgggggctcctggcagcagaggggccggggctgcctgcctgccagcagcccctgcagcgctggggccgccagcctgtccttccctggctgcggccgcctgacagctgctgagtactttgacagctaccagcgggagcggctgatggccctgctggcccaggtgggccctggcctgggcccccgggccaggagagctggcagctgtgatgtggccgtgcaggtgagccccagaattgatgctgctgtgcagtgcagcctgggccgccgcaccctgcagaggcgggcccgggaccctgagagccctgctggccctggagctgagggcaccaccggcggcggcagcttcagccagcagcccagcagaagaggcctggagcagggcagcccccagaatggagccccccggcccatgaggttccccaggacagtggccgtgtacagccccctggccctgcggcggctgacagccttcctggagggccctggccctgctgctggggagcagaggtctggggccagtgatggagagcggggccccccaccagcccggctgcagggccctgaggagggggaggtgtggaccaagaaggccccccggcggccccagagtgatgatgatggagaggcccaggccgctgtgcgggcctcctgggagcagcctgcagatggccctgagctgcccccccgggaggcccaggagggggaggccgcccccaggtctgccctgcggagccctggccagccccccagcgctggccgggccagagatggaggagatggccgggaggccgctgtggccggggagggccccagccccaggagccctgagctgggcaaggagcggctgcgcttccagttcctggagcagaagtatggctactaccactgcaaggactgcaacatccgctgggagagcgcctacgtgtggtgtgtgcagggcaccaacaaggtgtacttcaagcagttctgcaggacctgccagaagagctacaacccctacagagtggaggacatcacctgccagagctgcaagcagacccgctgcagctgccctgtgaagctgcggcacgtggaccccaagaggccccaccggcaggacctgtgtggccgctgcaagggcaagaggctgagctgtgacagcaccttctccttcaagtacatcatctag

SEQ ID NO: 177195 - DNA, 1719 bp, synthetic construct
  misc_feature 1..1719: note = Description of Artificial Sequence: Synthetic coding sequence
  source 1..1719: mol_type = other DNA
atggccgccccccggcccagccctgccatctctgtgtctgtgtctgccccagccttctacgccccccagaagaagtttggacctgtggtggcccccaagcccaaggtgaaccccttccggcctggggacagcgagcccccaccagcccctggggcccagagggcccagatgggccgggtgggggagatccccccacctcctcctgaggacttccccctgcccccaccacccctggccggagatggagatgatgctgagggcgccctgggcggggccttccccccacctcctccacccatcgaggagagcttccccccagcccccctggaggaggagatcttccccagccccccacctcctcctgaggaggagggcggccctgaggcccccatccccccaccaccccagccccgggagaaggtgagcagcattgacctggagattgacagcctgagcagcctgctggatgacatgaccaagaatgaccccttcaaggcccgggtgagcagcggctacgtgcccccacctgtggccacccccttcagcagcaagagcagcaccaagccagctgctgggggcacagcccccctgcccccctggaagagccccagcagcagccagcccctgccccaggtgcctgccccagcccagagccagacccagttccacgtgcagccccagccccagcccaagccccaggtgcagctgcacgtgcagagccagacccagcctgtgtccctggccaacacccagccccggggccccccagccagcagccctgccccagcccccaagttcagccctgtgacccccaagttcacccctgtggccagcaagttcagccctggggcccctgggggcagcggcagccagcccaaccagaagctgggccaccctgaggccctgtctgctggcaccggcagcccccagcccccatccttcacctacgcccagcagcgggagaagccccgggtgcaggagaagcagcaccctgtgcccccaccagcccagaaccagaaccaggtgcgcagccctggggcccctggccccctgaccctgaaggaggtggaggagctggagcagctgacccagcagctgatgcaggacatggagcacccccagaggcagaatgtggccgtgaatgagctgtgtggccgctgccaccagcccctggcccgggcccagcctgctgtgcgggccctgggccagctgttccacatcgcctgcttcacctgccaccagtgtgcccagcagctgcagggccagcagttctacagcctggagggcgccccctactgtgagggctgctacacagacaccctggagaagtgcaacacctgtggggagcccatcacagacaggatgctgcgggccaccgggaaggcctaccacccccactgcttcacctgtgtggtgtgtgcccggcccctggagggcaccagcttcatcgtggaccaggccaaccggccccactgtgtgcctgactaccacaagcagtatgccccccgctgcagcgtgtgcagcgagcccatcatgcctgagcccggcagagatgagaccgtgcgggtggtggccctggacaagaacttccacatgaagtgctacaagtgtgaggactgtgggaagcccctgagcattgaagcagatgacaatggctgcttccccctggatggccacgtgctgtgcaggaagtgccacacagcccgggcccagacctag

SEQ ID NO: 177196 - DNA, 1623 bp, synthetic construct
  misc_feature 1..1623: note = Description of Artificial Sequence: Synthetic coding sequence
  source 1..1623: mol_type = other DNA
gctgccccccggcccagccctgccatctctgtgtctgtgtctgccccagccttctacgccccccagaagaagtttggacctgtggtggcccccaagcccaaggtgaaccccttccggcctggggacagcgagcccccaccagcccctggggcccagagggcccagatgggccgggtgggggagatccccccacctcctcctgaggacttccccctgcccccaccacccctggccggagatggagatgatgctgagggcgccctgggcggggccttccccccacctcctccacccatcgaggagagcttccccccagcccccctggaggaggagatcttccccagccccccacctcctcctgaggaggagggcggccctgaggcccccatccccccaccaccccaggtgagcagcggctacgtgcccccacctgtggccacccccttcagcagcaagagcagcaccaagccagctgctgggggcacagcccccctgcccccctggaagagccccagcagcagccagcccctgccccaggtgcctgccccagcccagagccagacccagttccacgtgcagccccagccccagcccaagccccaggtgcagctgcacgtgcagagccagacccagcctgtgtccctggccaacacccagccccggggccccccagccagcagccctgccccagcccccaagttcagccctgtgacccccaagttcacccctgtggccagcaagttcagccctggggcccctgggggcagcggcagccagcccaaccagaagctgggccaccctgaggccctgtctgctggcaccggcagcccccagcccccatccttcacctacgcccagcagcgggagaagccccgggtgcaggagaagcagcaccctgtgcccccaccagcccagaaccagaaccaggtgcgcagccctggggcccctggccccctgaccctgaaggaggtggaggagctggagcagctgacccagcagctgatgcaggacatggagcacccccagaggcagaatgtggccgtgaatgagctgtgtggccgctgccaccagcccctggcccgggcccagcctgctgtgcgggccctgggccagctgttccacatcgcctgcttcacctgccaccagtgtgcccagcagctgcagggccagcagttctacagcctggagggcgccccctactgtgagggctgctacacagacaccctggagaagtgcaacacctgtggggagcccatcacagacaggatgctgcgggccaccgggaaggcctaccacccccactgcttcacctgtgtggtgtgtgcccggcccctggagggcaccagcttcatcgtggaccaggccaaccggccccactgtgtgcctgactaccacaagcagtatgccccccgctgcagcgtgtgcagcgagcccatcatgcctgagcccggcagagatgagaccgtgcgggtggtggccctggacaagaacttccacatgaagtgctacaagtgtgaggactgtgggaagcccctgagcattgaagcagatgacaatggctgcttccccctggatggccacgtgctgtgcaggaagtgccacacagcccgggcccagacctag

SEQ ID NO: 177197 - DNA, 1248 bp, synthetic construct
  misc_feature 1..1248: note = Description of Artificial Sequence: Synthetic coding sequence
  source 1..1248: mol_type = other DNA
atgaccaagaatgaccccttcaaggcccgggtgagcagcggctacgtgcccccacctgtggccacccccttcagcagcaagagcagcaccaagccagctgctgggggcacagcccccctgcccccctggaagagccccagcagcagccagcccctgccccaggtgcctgccccagcccagagccagacccagttccacgtgcagccccagccccagcccaagccccaggtgcagctgcacgtgcagagccagacccagcctgtgtccctggccaacacccagccccggggccccccagccagcagccctgccccagcccccaagttcagccctgtgacccccaagttcacccctgtggccagcaagttcagccctggggcccctgggggcagcggcagccagcccaaccagaagctgggccaccctgaggccctgtctgctggcaccggcagcccccagccccccagcttcacctacgcccagcagcgggagaagccccgggtgcaggagaagcagcaccctgtgcccccaccagcccagaaccagaaccaggtgcgcagccctggggcccctggccccctgaccctgaaggaggtggaggagctggagcagctgacccagcagctgatgcaggacatggagcacccccagaggcagaatgtggccgtgaatgagctgtgtggccgctgccaccagcccctggcccgggcccagcctgctgtgcgggccctgggccagctgttccacatcgcctgcttcacctgccaccagtgtgcccagcagctgcagggccagcagttctacagcctggagggcgccccctactgtgagggctgctacacagacaccctggagaagtgcaacacctgtggggagcccatcacagacaggatgctgcgggccaccgggaaggcctaccacccccactgcttcacctgtgtggtgtgtgcccggcccctggagggcaccagcttcatcgtggaccaggccaaccggccccactgtgtgcctgactaccacaagcagtatgccccccgctgcagcgtgtgcagcgagcccatcatgcctgagcccggcagagatgaaacagtgcgggtggtggccctggacaagaacttccacatgaagtgctacaagtgtgaggactgtgggaagcccctgagcattgaagcagatgacaatggctgcttccccctggatggccacgtgctgtgcaggaagtgccacacagcccgggcccagacctag

SEQ ID NO: 177198 - DNA, 1458 bp, synthetic construct
  misc_feature 1..1458: note = Description of Artificial Sequence: Synthetic coding sequence
  source 1..1458: mol_type = other DNA
atgggccgggtgggggagatccccccacctcctcctgaggacttccccctgcccccaccacccctggccggagatggagatgatgctgagggcgccctgggcggggccttccccccacctcctccacccatcgaggagagcttccccccagcccccctggaggaggagatcttccccagccccccacctcctcctgaggaggagggcggccctgaggcccccatccccccaccaccccaggtgagcagcggctacgtgcccccacctgtggccacccccttcagcagcaagagcagcaccaagccagctgctgggggcacagcccccctgcccccctggaagagccccagcagcagccagcccctgccccaggtgcctgccccagcccagagccagacccagttccacgtgcagccccagccccagcccaagccccaggtgcagctgcacgtgcagagccagacccagcctgtgtccctggccaacacccagccccggggccccccagccagcagccctgccccagcccccaagttcagccctgtgacccccaagttcacccctgtggccagcaagttcagccctggggcccctgggggcagcggcagccagcccaaccagaagctgggccaccctgaggccctgtctgctggcaccggcagcccccagccccccagcttcacctacgcccagcagcgggagaagccccgggtgcaggagaagcagcaccctgtgcccccaccagcccagaaccagaaccaggtgcgcagccctggggcccctggccccctgaccctgaaggaggtggaggagctggagcagctgacccagcagctgatgcaggacatggagcacccccagaggcagaatgtggccgtgaatgagctgtgtggccgctgccaccagcccctggcccgggcccagcctgctgtgcgggccctgggccagctgttccacatcgcctgcttcacctgccaccagtgtgcccagcagctgcagggccagcagttctacagcctggagggcgccccctactgtgagggctgctacacagacaccctggagaagtgcaacacctgtggggagcccatcacagacaggatgctgcgggccaccgggaaggcctaccacccccactgcttcacctgtgtggtgtgtgcccggcccctggagggcaccagcttcatcgtggaccaggccaaccggccccactgtgtgcctgactaccacaagcagtatgccccccgctgcagcgtgtgcagcgagcccatcatgcctgagcccggcagagatgaaacagtgcgggtggtggccctggacaagaacttccacatgaagtgctacaagtgtgaggactgtgggaagcccctgagcattgaagcagatgacaatggctgcttccccctggatggccacgtgctgtgcaggaagtgccacacagcccgggcccagacctag

SEQ ID NO: 177199 - DNA, 495 bp, synthetic construct
  misc_feature 1..495: note = Description of Artificial Sequence: Synthetic coding sequence
  source 1..495: mol_type = other DNA
atggccgccccccggcccagccctgccatctctgtgtctgtgtctgccccagccttctacgccccccagaagaagtttggacctgtggtggcccccaagcccaaggtgaaccccttccggcctggggacagcgagcccccaccagcccctggggcccagagggcccagatgggccgggtgggggagatccccccacctcctcctgaggacttccccctgcccccaccacccctggccggagatggagatgatgctgagggcgccctgggcggggccttccccccacctcctccacccatcgaggagagcttccccccagcccccctggaggaggagatcttccccagccccccacctcctcctgaggaggagggcggccctgaggcccccatccccccaccaccccagccccgggagaaggtgagcagcattgacctggagattgacagcctgagcagcctgctggatgacatgaccaagaatgaccccttctag

SEQ ID NO: 177200 - DNA, 852 bp, synthetic construct
  misc_feature 1..852: note = Description of Artificial Sequence: Synthetic coding sequence
  source 1..852: mol_type = other DNA
atggacctgtggcccggcgcctggatgctgctgctgctgctgttcttattgctgctgtttttgctccccacgctttggttctgtagtccgagtgccaaatatttcttcaaaatggcattctacaacgggtggattctgttccttgctgtgctggcaatccccgtctgcgcggtgaggggccgcaatgttgaaaacatgaagattctgcgcctgatgctgctgcacatcaagtatctctatggtatacgggtcgaagtcaggggggctcatcatttccccccgagccagccttacgttgtagtgagtaatcaccagtctagtctagacctgttaggcatgatggaggttctgcccgggcgttgtgtgcccatcgccaagcgggaactgctctgggcagggtctgctggcctggcttgttggctggccggggtgatctttattgacagaaagcgcaccggagatgccatttccgtaatgtctgaagtagcccagacccttcttactcaggacgtcagggtttgggtattccccgaagggacacgaaatcataatggtagcatgctgccttttaaacgaggtgctttccacctggccgtgcaggcccaggtgccaatcgtccccatcgtcatgagtagttatcaggacttctattgcaagaaggaaaggaggtttacctccggccaatgtcaggtcagggtgcttcctcctgtgcccacggagggtctgacacccgacgacgtgccagcccttgctgatcgcgtccggcacagcatgctaaccgtctttcgcgaaattagtacagacggacggggcggtggcgactaccttaagaaacccgggggaggaggttag

SEQ ID NO: 177201 - DNA, 852 bp, synthetic construct
  misc_feature 1..852: note = Description of Artificial Sequence: Synthetic coding sequence
  source 1..852: mol_type = other DNA
atggacctgtggcccggcgcctggatgctgctgctgctgctgttcctgcttctactctttctcctgcctacgctttggttctgcagtcccagcgctaaatatttcttcaagatggcattctataacgggtggattctattcctagccgtgctggcgatacccgtatgcgcagttcgagggagaaacgttgaaaacatgaaaattctgcgcctgatgctcctccacataaaatacctgtatggaatccgcgtggaggttcggggagcccaccatttccctcccagccaaccctacgttgtcgtctcgaaccaccagtcgtctctcgatttgttggggatgatggaagttttgcccgggcggtgtgtcccaatagctaagagagagttgctgtgggcaggctcagccggcctcgcatgctggttggctggtgtgattttcattgaccggaagaggacaggcgatgctatttccgtgatgtccgaggtggcacagacgcttttaacgcaggacgttagagtgtgggtcttcccagaggggacacgtaaccacaatggcagtatgctgcccttcaagcgcggtgcttttcatctggcagtccaagcccaagtcccaatagtccccatcgtcatgtcaagttaccaggacttctactgcaaaaaggagagaaggtttacctccgggcagtgccaggttcgtgttcttccgccagtaccaacagagggattaacaccagacgacgtgcctgctctggctgacagagttaggcatagtatgcttacggttttcagggagatctccaccgacggtagaggtggtggggattacttgaaaaaaccgggagggggggggtag

SEQ ID NO: 177202 - DNA, 852 bp, synthetic construct
  misc_feature 1..852: note = Description of Artificial Sequence: Synthetic coding sequence
  source 1..852: mol_type = other DNA
atggacctgtggcccggcgcctggatgctgctgctgctgctgttcctgcttttgttgtttctgcttccaacgctctggttttgtagcccctctgcaaagtatttctttaagatggccttctacaatggatggatcctcttcttagccgtgctggcgatacccgtctgcgcagtgcgaggaagaaacgtggaaaatatgaagattctgcggctcatgcttctccacatcaagtatctgtatggcatcagagtggaggtcaggggtgcacatcacttcccaccctcccagccttacgtggtggttagcaatcatcaaagctccctggacttgctgggaatgatggaagttctgcccggccggtgcgttcccatcgctaaacgcgaattactgtgggcaggctcagccggactggcatgctggctggcaggggtcattttcatcgacagaaagcgaaccggggacgccatttccgttatgtcggaggtggcccaaacacttctgactcaggacgttcgagtgtgggtgttcccagagggtaccaggaaccacaatggatctatgctgccatttaagcgcggtgccttccatctggccgtccaggcccaggtgcctatcgtgcccatcgttatgagcagttaccaagatttctattgcaagaaggagagaagatttacaagcggtcagtgtcaggttcgagtgctccctcctgttccgacggaaggcttaactcctgacgatgtacccgccctagccgatcgagtgaggcactcgatgttaaccgtgttcagagagataagtacagacggcagggggggcggagactacttgaagaagcccggaggggggggctag

SEQ ID NO: 177203 - DNA, 852 bp, synthetic construct
  misc_feature 1..852: note = Description of Artificial Sequence: Synthetic coding sequence
  source 1..852: mol_type = other DNA
atggacctgtggcccggcgcctggatgctgctgctgctgctgttcctacttcttttgttcctgttgccaaccctgtggttctgctcacccagcgccaagtattttttcaaaatggcgttttacaacggctggatcctcttccttgcagtgctggctatcccagtgtgcgccgtacggggacgcaacgtggagaacatgaaaattctcagattgatgcttctgcatattaagtatctctacggaatcagggttgaagtgaggggggctcatcattttccaccttctcaaccctatgtcgtcgtgtccaatcaccaatctagcctcgatctccttgggatgatggaagtcctgcccgggcggtgcgtgccaatagccaaacgcgagctgctgtgggctggatccgccggcctcgcctgctggcttgccggggtgatcttcatcgatcgcaagaggaccggcgacgcaatctctgtgatgtccgaagttgcccaaacgctcctgacccaagacgttagggtttgggtcttccccgaggggaccagaaaccataatggctctatgttgcctttcaagaggggcgctttccatttagccgtacaagcgcaagtccccattgtgccgatcgtcatgtcctcctaccaagatttctactgtaagaaggagaggcgatttacttccggccaatgccaggtcagagtccttccacccgtcccgactgagggactgacgcccgatgatgtccccgctctcgctgaccgtgtgaggcactccatgctaacagtgtttagagagatttctaccgatggtagaggagggggggactaccttaaaaaaccgggcggaggcgggtag

SEQ ID NO: 177204 - DNA, 852 bp, synthetic construct
  misc_feature 1..852: note = Description of Artificial Sequence: Synthetic coding sequence
  source 1..852: mol_type = other DNA
atggacctgtggcccggcgcctggatgctgctgctgctgctgttcctcctgttgctattccttctacccacactctggttctgctctcccagcgccaagtatttcttcaagatggcattctataatggttggatcctctttcttgctgtcctggccattcctgtgtgcgccgtgcgcgggagaaatgtggaaaacatgaagatcttgagacttatgctactgcatattaagtacctgtatggtatccgggtggaggtgaggggagctcatcactttcctccttcccagccatacgtagtagtgtcgaaccaccagtctagtctggacctgttgggaatgatggaggtgctgccaggtagatgcgtgcccatcgctaaaagggagctcctgtgggccgggtccgcagggctggcctgctggctggcaggcgttatcttcattgataggaagcgaacaggcgacgctatctccgtcatgtccgaagtcgcccagaccctcctgactcaagacgtgagagtgtgggtcttccccgagggcacaagaaatcataatggttctatgctccctttcaagcggggggccttccacctagctgttcaggcccaagtacccatcgtgcccatagtcatgtccagctatcaggatttctactgcaagaaggagagaagattcacctccgggcagtgtcaggtgagagtcctgcctccagttccaaccgagggactgacacccgatgacgtaccggccctcgccgatcgggtgagacactcaatgctgaccgtctttcgggagatttctactgacggtcggggagggggggactatctgaagaaacctggcggcggtggctag

SEQ ID NO: 177205 - DNA, 852 bp, synthetic construct
  misc_feature 1..852: note = Description of Artificial Sequence: Synthetic coding sequence
  source 1..852: mol_type = other DNA
atggacctgtggcccggcgcctggatgctgctgctgctgctgttccttctgctgttattcctgctccctacactttggttttgcagtccgagtgcaaagtacttcttcaagatggctttctataatggatggatcctgtttctggctgtgttagccatacccgtgtgtgctgtgcggggccgcaacgtggagaatatgaagatcttacgcctaatgctgctacacatcaagtacctgtatggtattcgggttgaggtgaggggcgcccatcactttcccccctctcaaccctatgtggtggtatcaaatcaccaatcttctctcgacttattagggatgatggaagtactcccaggaaggtgtgtgccgatagccaagagggagctgctctgggccggctcggcaggacttgcatgttggttggcaggggtgatattcattgacagaaagaggaccggcgatgccatttcagtgatgtctgaggtcgcccagacactgctgacacaggacgtgagggtttgggtgttccccgagggcacccggaatcacaatggaagtatgctcccattcaagaggggcgcattccatttggctgtgcaggcacaggtgccaattgttccaattgttatgtcaagctaccaggatttctattgtaagaaagaaaggcgtttcaccagtggccagtgccaggtgcgcgtgctgcctcctgttccaactgaggggctcactcccgatgacgtacccgcgttagcagatcgcgtacgacattccatgttgaccgtgttcagagagatcagcaccgacgggcgtggaggtggggattacctaaaaaagccaggcggtggcggatag

SEQ ID NO: 177206 - DNA, 852 bp, synthetic construct
  misc_feature 1..852: note = Description of Artificial Sequence: Synthetic coding sequence
  source 1..852: mol_type = other DNA
atggacctgtggcccggcgcctggatgctgctgctgctgctgttcctcctcctcttattcctccttcccactctgtggttttgttcgccatcagctaagtacttttttaaaatggctttctacaatgggtggattttgttcctggccgttctcgccattccggtctgcgccgtccgcggccggaatgttgaaaacatgaagattctgaggttaatgttgcttcatatcaaatatctgtatgggatccgtgtggaagttcggggtgctcaccatttcccgccctctcagccatatgtggtggtatctaatcatcaaagttcactggatttgctgggcatgatggaagtgctgccaggcaggtgtgtcccgattgccaaacgcgagctgctttgggccggtagcgccggactggcctgttggcttgccggcgttattttcattgatcggaaacggacgggagatgccatcagcgtcatgtctgaggtcgctcagaccctgctgacacaagacgtgcgggtatgggtgtttccagagggtacgagaaaccataacggcagtatgctcccattcaaaaggggcgctttccacctggccgttcaggcccaggtgcccattgtgcctatcgtgatgagctcttaccaggacttctattgcaagaaggagcgacgctttacttccggccaatgtcaggtacgagtgttgccccctgtaccgacagagggcctcactccggatgacgtccccgctctggcagatcgcgtcaggcactcaatgctgaccgttttcagagagatctctactgatgggcggggtggaggagactacctgaaaaagccaggtggtggcgggtag

SEQ ID NO: 177207 - DNA, 852 bp, synthetic construct
  misc_feature 1..852: note = Description of Artificial Sequence: Synthetic coding sequence
  source 1..852: mol_type = other DNA
atggacctgtggcccggcgcctggatgctgctgctgctgctgttccttctactcctcttcttactacctaccctctggttttgctctccctcagccaaatacttctttaaaatggctttctataatggatggattttattcctcgccgtcctggctattcctgtctgtgcggtgcggggaaggaatgtagagaatatgaaaattctgcgtctaatgcttctgcatataaagtacctgtacggtatccgcgtagaagtcagaggagcccaccactttccccctagtcagccttacgtggtcgtctctaatcatcagagttctctggaccttctggggatgatggaagtactgcctggtagatgcgtgcctatcgcgaaaagggagctactgtgggccggctcagccggcctggcctgttggctggccggggttatcttcatcgatcgcaagagaaccggggatgctatcagcgttatgtcagaggtggcacagacattacttacgcaggacgttcgggtgtgggtttttcctgaggggacgcggaatcataatggatcgatgctgcccttcaagaggggtgctttccacctggccgtacaggctcaagtcccaatcgttcctattgtcatgagctcttaccaggacttttattgtaagaaagagagacggtttacaagcggccagtgtcaggtgcgcgtgctacctcccgtgcctaccgaggggctcaccccagacgacgtgcctgcgctagccgaccgtgttcgtcattccatgctgaccgtctttcgtgaaatcagcaccgacggccgaggcggcggggactaccttaagaaacccggtggtgggggctag

SEQ ID NO: 177208 - DNA, 852 bp, synthetic construct
  misc_feature 1..852: note = Description of Artificial Sequence: Synthetic coding sequence
  source 1..852: mol_type = other DNA
atggacctgtggcccggcgcctggatgctgctgctgctgctgttcttgctcctgctttttctcctgccaacactctggttttgttctccaagtgcaaaatatttctttaagatggctttctataatggttggatactctttctggcggtactcgccattcccgtatgtgcagtacgggggaggaatgtcgagaatatgaagatactgagactaatgctgttacatatcaagtatctctatgggatcagggtggaagtgcgcggagcacaccatttccctccaagccagccttacgtggtcgtgtccaatcatcaaagtagtctcgacctgctgggaatgatggaagtgctgcctggtcgatgcgttcctatcgctaaacgcgagctcctttgggcgggaagcgcagggcttgcttgttggctggcaggagtgatatttattgatagaaaaagaaccggtgatgccattagcgtgatgagcgaggtagcacagaccctccttacgcaggacgtccgggtgtgggtctttcctgaaggcaccagaaatcacaacggctccatgctgccattcaaacgcggggcgttccacctggcagttcaggcgcaggtgccgatcgtgccaatcgtgatgtcatcataccaagatttctactgtaagaaggagagacggttcacgagtgggcagtgtcaggtgcgggtcctccctcctgttcctaccgaaggcctgacacccgacgacgtgcccgccctggctgaccgagtgagacacagtatgctaacagtattccgggagatatccacagacgggcgcggcggtggcgattacctcaagaagcctgggggcggagggtag

SEQ ID NO: 177209 - DNA, 852 bp, synthetic construct
  misc_feature 1..852: note = Description of Artificial Sequence: Synthetic coding sequence
  source 1..852: mol_type = other DNA
atggacctgtggcccggcgcctggatgctgctgctgctgctgttcctgctcctgctgtttctgctaccgaccctctggttttgtagcccttcagcaaaatacttcttcaagatggctttctataacggttggattttatttttggcggtactggcaattcccgtttgtgcggtgcggggcagaaatgtggagaacatgaaaatcctacgtttgatgctgttacatatcaagtatctctacggcatacgagtggaggttcgcggcgcgcaccattttcctccatctcagccttatgttgtcgtttccaaccaccagtcctccctggacctgctgggtatgatggaggtgctgccaggtagatgcgtgcccatcgctaaaagagagttgttgtgggccggctcggcagggcttgcttgttggcttgcaggggttattttcattgaccgaaagcgcactggggatgcaatctccgtcatgtccgaagtggcccaaactctgttaacgcaggatgtgcgggtgtgggtctttccagagggcacccgtaatcataatggtagtatgctcccattcaagaggggagctttccacctggcagtgcaggcgcaggtccctattgtgccaatcgtgatgtcctcctaccaagatttctactgtaagaaggaaaggcgcttcacgagtggccagtgccaggtgcgggttctgcctcccgtgccaaccgagggcctcactccggatgatgtgcctgctttggctgatcgagtgcgccattcaatgctgacagtgttcagggaaatctcgaccgacggtaggggaggtggagattacctgaaaaagccaggtggaggcggttag

SEQ ID NO: 177210 - DNA, 852 bp, synthetic construct
  misc_feature 1..852: note = Description of Artificial Sequence: Synthetic coding sequence
  source 1..852: mol_type = other DNA
atggacctgtggcccggcgcctggatgctgctgctgctgctgttccttttactgctgtttctgctgcccactctgtggttctgttcgccctcggcaaagtatttctttaaaatggccttttacaatggttggatcctgttcctggctgtcctcgccatccctgtgtgcgcggtgcgtggtcgcaatgtggaaaacatgaaaatccttagacttatgctcctccacatcaagtacctttacggaatacgggtcgaggtccggggagcacaccattttccaccctcccaaccatatgtggtcgtgagcaatcatcagagttcactcgatttgctgggcatgatggaggttctgccaggaagatgtgtaccaattgcaaagcgggagctgctgtgggctggaagtgcgggacttgcctgttggctggctggcgtcatatttatcgatcgcaagcggacaggagatgccattagcgtgatgagcgaagtcgcacagacactacttacacaggatgttagagtgtgggttttcccagaaggtacaaggaatcataacggttccatgctcccttttaagcgtggcgcctttcatctcgctgtacaggcgcaggtgcccattgtacctatcgtcatgtcctcatatcaggatttctactgcaagaaggaaagacggtttacttcggggcaatgccaggtgcgggtgctccccccagtaccgactgaggggctcacaccagacgacgtccctgccctggctgaccgcgttagacatagcatgctaacagtgttccgggaaataagcactgacgggcgtggcgggggggattacctgaaaaaacccggaggcggaggctag

SEQ ID NO: 177211 - DNA, 852 bp, synthetic construct
  misc_feature 1..852: note = Description of Artificial Sequence: Synthetic coding sequence
  source 1..852: mol_type = other DNA
atggacctgtggcccggcgcctggatgctgctgctgctgctgttcctcctgttgctctttctattgcccaccctttggttttgctcaccttccgcaaaatatttttttaagatggccttttacaatggttggattctttttctcgctgtgttagcgatcccagtgtgcgccgtacggggccggaatgtggagaacatgaagatactacggctgatgctccttcatattaagtacctctacgggatccgggtggaggtaagaggcgctcaccactttcctccaagtcagccctatgttgtggtcagcaaccaccagagcagcttggacctgctggggatgatggaggtgctgcctggtaggtgcgttcccatcgctaaaagggagttgctatgggctggaagcgcaggattggcttgctggttagccggcgtgattttcatcgacaggaaacgtacgggagacgcaatatcagtgatgtccgaggttgctcaaactctattgacccaagacgtgagagtatgggtgttccccgaaggtaccagaaaccataatggatcaatgctgccattcaagaggggcgccttccacttagccgtgcaggcacaggtgcccatcgttccaatagtgatgtcctcgtatcaggatttttattgtaagaaagaacggaggttcacatccggccagtgccaggtgcgcgtgcttccccccgtgccgaccgaaggccttacacccgacgacgtaccagcattggccgatagggtgcgtcactcaatgctgaccgtcttccgcgagattagtactgacggtcgaggggggggggattatctcaaaaaacccggcgggggcggctag

SEQ ID NO: 177212 - DNA, 516 bp, synthetic construct
  misc_feature 1..516: note = Description of Artificial Sequence: Synthetic coding sequence
  source 1..516: mol_type = other DNA
atgatggaggtgctgcccggccggtgcgtgcccatcgccaagcgggagctgctttgggccgggtctgccggcctggcttgttggctcgccggagtgatctttatcgataggaagcgaacaggggatgcgatcagcgtgatgagcgaggtggcccaaacacttttgacccaggacgttagggtatgggtatttcccgaaggcaccaggaaccataacgggagtatgctcccctttaaacgaggggcgtttcaccttgcagtgcaagcacaggtcccaattgttcccattgttatgagtagctaccaagacttctactgcaaaaaagaaagaaggtttacgtcaggacagtgccaggtgcgcgtcctgcccccagtgccaactgagggcctcacacccgatgatgtgcctgcacttgccgaccgtgtgcgccatagcatgctgactgtcttccgggaaatatctacagacggacggggcggcggggattacctcaagaagccagggggtggaggttag

SEQ ID NO: 177213 - DNA, 852 bp, synthetic construct
  misc_feature 1..852: note = Description of Artificial Sequence: Synthetic coding sequence
  source 1..852: mol_type = other DNA
atggacctgtggcccggcgcctggatgctgctgctgctgctgttcttgctcctgctgtttcttttgcctacgctgtggttctgcagtccttcagctaaatacttttttaagatggccttctataatggatggatccttttcctcgccgttctggccatacccgtgtgcgccgtacgaggcaggaacgtcgaaaatatgaaaatactgaggctaatgttgctccacattaagtatctatacggcatcagggtcgaggttcgtggagctcaccacttccccccgtcacagccctacgtagtcgtgtccaatcaccagtcttctctagatctcttaggcatgatggaggtgctccctgggaggtgtgtgccaatagccaagcgggagcttctttgggccggttctgcaggcctcgcctgctggctggccggagttattttcatcgatcggaagcggactggggatgccattagcgtgatgagtgaggtggcccagaccctgttgacacaggacgtgcgggtttgggtgtttcctgaaggaacgcgcaaccacaacggctctatgttgccattcaagcgcggcgccttccacctagctgttcaggctcaggtacccatcgttccgattgtcatgagcagctaccaggatttttattgcaaaaaggagcgcagattcacatcaggtcagtgccaggtgcgggtgttaccccctgttccaaccgaagggttaacacctgacgatgtgcccgccctggccgacagggtgcgccactcaatgctcaccgtatttcgcgagatctccacagatggaagaggaggcggcgattatctgaaaaagcccggggggggcggatag

SEQ ID NO: 177214 - DNA, 852 bp, synthetic construct
  misc_feature 1..852: note = Description of Artificial Sequence: Synthetic coding sequence
  source 1..852: mol_type = other DNA
atggacctgtggcccggcgcctggatgctgctgctgctgctgttcttattgctcctttttctcctgcccaccttgtggttctgctcgccttccgccaaatacttttttaagatggctttctacaacggatggatcctcttcctcgccgtgctggccatccccgtctgcgcagtgcggggccgtaacgtggagaacatgaaaattttaaggctgatgctgctacacatcaaatacctctatgggataagggtcgaagtgcgaggagctcatcatttcccaccctcacaaccttacgtcgtggtgagcaaccatcagtcgtccttggacctgctgggaatgatggaagtcctgccaggtcgctgtgtgcctattgcgaaacgcgagctcctgtgggccggaagcgccgggctggcatgctggcttgccggggtcatttttatcgaccggaaacggactggtgacgccataagcgtgatgtccgaggtggcccagacactcctgacacaggatgttcgcgtgtgggtgttcccggaggggaccagaaatcataacggctctatgctgccttttaaaagaggcgcatttcacctggctgttcaggcacaggtgccaatcgtgcccatcgtgatgtctagctaccaagacttctactgcaaaaaggaacgcagatttacctccggacagtgtcaggtgcgggtgttacccccagtgcccacagaggggctcacaccagacgatgtccccgctctggcagacagagtgcggcactcaatgctcactgtctttagggaaatctccactgacggcagaggaggtggggactatctgaagaagcccggtggcggcggatag

SEQ ID NO: 177215 - DNA, 852 bp, synthetic construct
  misc_feature 1..852: note = Description of Artificial Sequence: Synthetic coding sequence
  source 1..852: mol_type = other DNA
atggacctgtggcccggcgcctggatgctgctgctgctgctgttcctgttgttgctgttcttactgcccacactctggttttgctctccatctgctaagtacttctttaaaatggccttctacaacggttggattttgttcttggcagtattggccatacctgtgtgcgctgtgagaggccgcaacgtggagaatatgaagatactgagacttatgctcttacacatcaagtatctctacggcattcgtgtcgaagtgagaggagctcatcactttccaccttcgcagccttacgtggtggtaagtaatcaccagagctccctcgacctgctcggtatgatggaggtgctgcccggccggtgtgtacctattgcaaaaagggagcttctgtgggccggtagcgcaggcttggcctgttggttggccggagtgatctttatcgatagaaagaggacaggcgacgcaatctccgtgatgagtgaggtggcccagactctgcttacccaggatgtccgtgtttgggtcttcccagagggcacacggaatcataacgggtccatgctcccatttaagaggggggccttccacctggcagtgcaagctcaagtacccattgtgcctatcgtgatgtcttcttatcaagacttttactgtaaaaaagaacggcgctttacttcaggacagtgtcaggttcgagtgttgcctccggtccccacagagggactgactcccgatgatgtgcccgcacttgctgatcgagtgaggcattccatgctgactgtgttccgggaaatttctactgacggtcgaggaggtggagactatctcaaaaagccaggaggtgggggctag

SEQ ID NO: 177216 - DNA, 852 bp, synthetic construct
  misc_feature 1..852: note = Description of Artificial Sequence: Synthetic coding sequence
  source 1..852: mol_type = other DNA
atggacctgtggcccggcgcctggatgctgctgctgctgctgttcctcctcctgctttttttgctccccaccctgtggttttgttccccttcagccaagtacttttttaagatggcattttacaatggctggattttatttctggcagtgctggcgatccctgtttgcgcggtgcgtggcagaaacgtggaaaatatgaagatcctgcgactgatgctcctgcatatcaaatacttatacggaatccgtgtggaggttcgcggagcacaccatttcccaccttcacagccttatgtggtcgtatctaaccaccagtcttcccttgatttactgggaatgatggaggttctgcccggccggtgtgtgcctatcgctaaacgcgagctactgtgggccgggtccgccggtctagcatgctggctcgctggagtaatttttatcgaccggaagaggacaggagatgctattagtgtaatgagcgaggtagctcagacgctcctcactcaagacgtgcgcgtctgggtcttccccgagggcacgagaaatcacaatggttcgatgttaccttttaagagaggagcttttcatctggcggtccaggcccaggtcccgatcgtgcctattgtgatgtcaagttaccaggacttttattgcaaaaaggaacgaagattcacgagcgggcagtgtcaagtacgcgtgctgcctcccgttccgaccgagggcctcacacccgacgatgtcccagccttagccgacagagtgcggcattcaatgttgacggtatttagggaaatcagcacagatgggcgtggagggggagattacctcaagaagccaggaggtggaggctag

SEQ ID NO: 177217 - DNA, 852 bp, synthetic construct
  misc_feature 1..852: note = Description of Artificial Sequence: Synthetic coding sequence
  source 1..852: mol_type = other DNA
atggacctgtggcccggcgcctggatgctgctgctgctgctgttcctgctgttactctttcttcttccaaccttatggttctgctccccatccgccaagtactttttcaagatggcgttttataatggctggattctgttcctggcggttctggctattcccgtctgcgcggtacggggaagaaatgtggaaaacatgaaaattctgcgtctgatgctcctgcatataaagtacttatacggaattcgggtggaggtgagaggagcgcaccattttccaccctcgcagccatacgtcgtagtttcaaatcaccagtcttcccttgatttactgggcatgatggaggttctcccgggacgctgcgtacccattgccaaacgcgagttgctttgggcggggtccgccggactggcctgttggctggctggcgtcatcttcatcgaccgtaagagaacaggggatgccatctcagtcatgtccgaagtggcccagactctgctcacccaagatgtgagggtctgggtgtttcctgagggaacaaggaaccacaatggcagcatgttgccgttcaagaggggggcctttcatctcgctgtgcaagcccaagtgcccatagtgccgatcgttatgagcagctatcaggacttctattgcaagaaagagcgccgcttcacctctggtcagtgtcaagtccgcgtactgccacccgtgcctacagagggattgacacctgatgatgtgcctgctttggccgatcgcgtgcgtcattctatgctcacagtgtttcgcgaaatcagcacagacggccggggtggtggagattatcttaagaagcccggtggaggtggctag

SEQ ID NO: 177218 - DNA, 852 bp, synthetic construct
  misc_feature 1..852: note = Description of Artificial Sequence: Synthetic coding sequence
  source 1..852: mol_type = other DNA
atggacctgtggcccggcgcctggatgctgctgctgctgctgttcttgctcttgttgtttcttctgcctactctatggttctgtagtccatccgcaaagtacttctttaagatggcattctacaatggctggatcctttttctggccgttctggcaatcccagtgtgcgctgtgcggggacggaacgtagagaacatgaagatcctgagacttatgctgcttcacatcaagtacctgtacggaattagggtagaagttaggggcgcccatcacttcccgccatcccagccctatgtggtcgtcagtaatcatcagagcagcctcgacctcttagggatgatggaggtattgccgggaaggtgcgtcccgatagctaagcgagaattactttgggccggtagcgccggtctggcctgttggctggccggggtcatcttcattgataggaagagaaccggcgacgcaattagcgtgatgagtgaagtcgcccagacacttctgacccaggacgtccgggtctgggtgttccccgagggcactcgaaaccataacggatcaatgctgcccttcaagcggggcgcctttcacctggccgtccaggctcaggtgcccatcgtgcccatcgttatgtcatcatatcaggacttttactgtaagaaggagaggaggttcaccagcggacagtgtcaggttcgcgttctgccccctgtcccaacagaaggcttgactcctgatgatgtgcctgctctcgcagacagggtgaggcactccatgctgactgtgttccgcgagatctctaccgatggcaggggcgggggcgactatcttaaaaaacccggcggtggcgggtag

SEQ ID NO: 177219 - DNA, 852 bp, synthetic construct
  misc_feature 1..852: note = Description of Artificial Sequence: Synthetic coding sequence
  source 1..852: mol_type = other DNA
atggacctgtggcccggcgcctggatgctgctgctgctgctgttcctgctgttactgtttttattgccaactttgtggttttgcagtccttctgcaaagtatttttttaagatggccttctataatggctggatccttttcctggcggtgctagctatccctgtctgtgctgttcggggaaggaatgtggagaatatgaagatcctccgtctgatgctcctccatatcaagtatctttacgggatcagagtggaggtccggggagcccatcatttccccccttctcagccgtatgtggtggtctccaaccaccagtcatccttagaccttctcggaatgatggaagtgctccccgggcgatgcgtgcccatagctaaaagagagctgctgtgggccggaagtgctggcctggcttgctggcttgcaggcgttatttttatcgaccggaagcgcaccggggatgcaattagtgtaatgagcgaggtagctcagacgctgctcacccaggatgtcagagtgtgggtcttccccgaaggcacacggaatcacaacggctccatgctgcccttcaagcgcggagccttccacctagccgtccaagcgcaggttcccatcgttccgatcgttatgagtagctatcaggatttctattgtaaaaaggaaaggaggttcacttccggtcagtgccaggttagggtgctacctccagtgccaaccgaaggtctcaccccggacgatgtgcccgcactcgccgacagagtgcgacactctatgttgacagtcttccgcgagattagcacggacggtaggggggggggagattaccttaagaagcctggcggaggcgggtag

SEQ ID NO: 177220 - DNA, 852 bp, synthetic construct
  misc_feature 1..852: note = Description of Artificial Sequence: Synthetic coding sequence
  source 1..852: mol_type = other DNA
atggacctgtggcccggcgcctggatgctgctgctgctgctgttccttttactgttgttcctgctgcctactctgtggttttgctcaccttctgccaagtactttttcaaaatggccttttataatggctggatcctctttctcgccgtgctggcaatacctgtgtgcgctgtgcgtggcagaaacgtggagaatatgaagatacttcgactgatgctgctgcatatcaagtatctgtacggcatccgcgtagaggtccgtggcgctcaccatttccccccctcccagccttatgtggttgtgtcaaaccaccagtctagtttggaccttctaggcatgatggaggtactgccgggccgttgtgttcctatagctaagagggagcttctgtgggccggatccgcgggactggcgtgctggctggctggggtcatctttattgatagaaaacggactggcgacgcaatctctgtgatgagcgaagtagcccagacattgctgacacaggacgtgcgggtttgggtattcccggagggtaccaggaatcataatggctcaatgctccccttcaagcgcggtgcgttccacctcgctgtgcaggctcaggtgcccatcgtaccgatcgtgatgtctagctaccaagacttctattgcaaaaaagagcgaaggtttaccagcgggcaatgccaggtcagggtgctgcctccggttcctactgaaggcctcacacctgatgatgtccccgctctagctgaccgcgttcgacactctatgcttaccgtgtttagagaaatctctaccgacgggcggggtggcggagactatctgaagaagcccgggggcggcggctag

SEQ ID NO: 177221 - DNA, 852 bp, synthetic construct
  misc_feature 1..852: note = Description of Artificial Sequence: Synthetic coding sequence
  source 1..852: mol_type = other DNA
atggacctgtggcccggcgcctggatgctgctgctgctgctgttccttctcctgctgtttctgcttcctacgttatggttttgctctccgtcagctaagtacttcttcaagatggctttctacaacggctggattctttttctagctgttctagcgatccccgtgtgcgctgttagaggacgtaatgtggaaaacatgaagatactgcgtctgatgcttctccatattaaatacctttacgggatacgtgtcgaggtacggggcgctcatcacttccctcccagccagccatatgtggttgtcagtaatcatcaatcttcacttgaccttcttgggatgatggaggttttgcctggacgatgcgtgcctattgcgaaaagggagctgctctgggccggcagtgccggcctggcatgttggttagcaggggtcattttcatagacaggaagcggacaggcgacgctatcagcgtcatgagcgaggtggcccagacccttttgacacaagatgtccgggtctgggtctttcctgagggaactagaaaccataacggaagcatgttaccttttaagagaggagcctttcatctggctgttcaggctcaggtgccaatcgttccaatcgtcatgtctagctatcaggatttttactgcaaaaaagagaggcgctttacctcgggacagtgtcaggtccgagtactgcctccagtgcccaccgaaggactgactccagacgatgtgccggcacttgccgatagagtgaggcacagtatgcttaccgtgtttcgggagatcagtacggacggccgaggcggaggcgattacctcaagaaacctggaggaggcggttag

SEQ ID NO: 177222 - DNA, 852 bp, synthetic construct
  misc_feature 1..852: note = Description of Artificial Sequence: Synthetic coding sequence
  source 1..852: mol_type = other DNA
atggacctgtggcccggcgcctggatgctgctgctgctgctgttcctgcttttgctatttttgttgccgaccctctggttctgttcccccagtgcgaagtattttttcaagatggcattctacaacggctggattctctttctggcggtgctagctatcccggtgtgtgccgtgcgcggtcgaaacgttgagaacatgaagattctcaggctcatgctgcttcacatcaaatatttgtacgggatccgggttgaagtaagaggtgcccaccatttcccaccttcgcagccctacgtggtggtatcaaatcatcaatcttctctggacctacttggaatgatggaagtgttgccagggcggtgtgtgcctatcgcaaaacgcgagcttctttgggcaggcagcgccgggctggcttgctggttagccggggttattttcatcgacagaaaacgaacaggagacgcaatctctgtaatgtcagaagtcgcccagaccctgttgactcaggacgtccgggtgtgggtgttcccggaaggtactcgaaatcacaacggctcgatgctccccttcaagcggggtgcttttcacctggccgtacaagcacaggtgcccatagtccccatcgttatgtcctcatatcaggatttttactgcaaaaaagaacgacgattcacatcaggacagtgccaagtcagagtgttgccgcctgtacctacagaggggctgacacctgacgatgtgcccgcgctggctgatcgggtgaggcacagcatgttaacagtgtttcgcgagatctccactgatgggcgcggagggggcgactatcttaagaaacctggaggcggtggatag

SEQ ID NO: 177223 - DNA, 852 bp, synthetic construct
  misc_feature 1..852: note = Description of Artificial Sequence: Synthetic coding sequence
  source 1..852: mol_type = other DNA
atggacctgtggcccggcgcctggatgctgctgctgctgctgttccttctgctgttattcctactcccaaccttgtggttttgctctcctagtgcgaaatacttcttcaagatggcattctataatggatggatccttttccttgccgtactggccatcccggtctgcgctgttcgcggccgcaacgtagagaatatgaagattctgaggttaatgcttctgcatattaaatacctttacggtatcagagtggaggtgcgaggggcccatcactttcctccttcacaaccatacgtggtcgtcagcaaccaccaaagctctttagaccttctgggaatgatggaggtactgcccggacggtgtgtacccattgctaaaagagagcttctgtgggcaggatccgctggattagcctgctggttagccggggtcatatttatcgatcggaagaggacaggagacgccataagcgtcatgtctgaggtagcacagacccttttgactcaggatgtgcgggtgtgggtttttcctgaaggtacaaggaatcataacgggagtatgttgccattcaaaagaggagcttttcacctggctgttcaggcccaagtccctatcgtgccaatcgttatgagtagctatcaagacttctactgcaagaaggagcgacgcttcacgtcaggacaatgccaagtgcgggttctgccaccggttccaaccgaaggccttactcccgatgacgtacctgccctggccgatagagtgagacactccatgctcaccgtctttagggaaatcagtaccgatggtagggggggaggggattacctgaaaaaacccgggggaggcggatag

SEQ ID NO: 177224 - DNA, 852 bp, synthetic construct
  misc_feature 1..852: note = Description of Artificial Sequence: Synthetic coding sequence
  source 1..852: mol_type = other DNA
atggacctgtggcccggcgcctggatgctgctgctgctgctgttcctcctgcttctattcctgttgccgacactgtggttctgctcaccgagtgcgaagtacttcttcaaaatggcattctataatggttggattctgttcttagcagtcctggccatccctgtgtgtgctgtgagagggagaaacgtcgaaaacatgaaaatcctgcgcctcatgcttctccatataaagtacttgtatggcattcgggtggaagttcgtggggctcatcatttccctccaagtcagccctatgtggtagtgagcaatcaccaatcatcactggatctgctaggaatgatggaagttctgcctggaagatgcgtccccatagcgaagagagagctgctctgggccggttcagcgggcttggcctgctggctggctggtgtgatctttattgacaggaaacgcactggtgacgcgatatctgtgatgtccgaggttgcccagacattgctgacccaggacgtacgggtttgggtgtttcccgagggcactcgcaatcacaatggctctatgctcccctttaaaaggggggcgtttcacttagcagtccaggcgcaagtgcccatcgtgcccatagtgatgagctcctaccaagacttttactgcaaaaaggagcggcgatttacaagtgggcagtgccaggtgagggtgttgcctccggtgccaaccgagggcttgaccccggatgatgtacccgctcttgctgatagggtgaggcacagcatgctgaccgtatttcgcgaaatctctacagacgggaggggcggaggagactacctgaagaaacctggcggaggaggatag

SEQ ID NO: 177225 - DNA, 852 bp, synthetic construct
  misc_feature 1..852: note = Description of Artificial Sequence: Synthetic coding sequence
  source 1..852: mol_type = other DNA
atggacctgtggcccggcgcctggatgctgctgctgctgctgttcctcctcttactgtttctgttgcctaccttatggttctgcagtccgagtgctaaatatttcttcaagatggccttctataacgggtggatcttatttctggctgtgttggccatacctgtctgcgccgtacgcggacggaatgtggaaaatatgaagatactgcgccttatgcttctacacataaaatacttgtatggcattagagtggaggtcagaggtgcgcatcacttccccccaagtcagccctatgttgtggtctccaaccaccagtcctcattggacctgctcgggatgatggaagtgctgcctgggagatgtgtgcccattgcgaaacgggaactcctctgggctgggtctgctgggctggcatgctggctggctggcgtcatatttatcgatcgcaaaagaaccggtgacgcgatctcagttatgtctgaggtggcccaaacgctgcttactcaggacgttagggtatgggtgtttccagagggcacacggaatcataatggatcaatgctccccttcaagcgcggagcttttcacttagcagtgcaggcgcaggtacccattgtgcctatcgtgatgtcaagctaccaggatttctactgtaagaaggagcgccgtttcacatctgggcagtgtcaggttcgcgtgctgcctcctgtgcctaccgaaggcctgaccccagacgatgtccccgccctggccgacagggtgagacactccatgttgacggtgttcagagagatctctacagatgggaggggcggaggcgattacctgaagaagccaggaggtgggggttag

SEQ ID NO: 177226 - DNA, 852 bp, synthetic construct
  misc_feature 1..852: note = Description of Artificial Sequence: Synthetic coding sequence
  source 1..852: mol_type = other DNA
atggacctgtggcccggcgcctggatgctgctgctgctgctgttccttttgctgctcttcctgctgccgaccttgtggttctgctctcccagtgctaagtacttcttcaaaatggccttttacaatgggtggattctattccttgccgttctggctatacccgtttgcgctgtgagggggaggaatgtcgagaacatgaagatcctgcgtctgatgctgcttcacattaaatatctctatggcatccgggtggaggtccggggcgcacatcacttccctccctctcaaccttacgtcgtcgtatcaaatcaccagtcctctttagacctgctgggcatgatggaggtgctgccaggccgctgtgtgcctatagctaagcgtgagctcctttgggcaggatctgccgggcttgcctgctggctggctggggtgatctttattgatagaaagcggactggagatgctatctctgttatgtctgaagtggctcagacgctcctgactcaggacgtgcgcgtttgggttttccctgaggggacccggaaccacaacggcagcatgctgcctttcaaaagaggggccttccatttagctgtgcaggcgcaggtgccgatcgtccccattgtgatgtcctcatatcaggacttttattgcaagaaagaacggaggttcaccagtgggcaatgccaggtgagagtcctgccgcctgtcccaacagaagggctgacacctgatgacgtcccagctctggcagaccgcgttcggcactctatgctcacggtgttccgcgagatttccaccgacgggcgcggtgggggggactaccttaagaagcctggggggggagggtag

SEQ ID NO: 177227 - DNA, 852 bp, synthetic construct
  misc_feature 1..852: note = Description of Artificial Sequence: Synthetic coding sequence
  source 1..852: mol_type = other DNA
atggacctgtggcccggcgcctggatgctgctgctgctgctgttcctgcttctcctgtttctgttacccaccctctggttttgctcccctagcgctaagtattttttcaagatggcattttacaatgggtggattctgtttctggccgtgcttgcgattcccgtctgtgccgtgagggggagaaacgttgagaacatgaagattctgcgactgatgctgctacatataaagtatctgtatggaatcagagtcgaggtccggggagcccaccacttcccgccgtctcagccctatgtggtggtgtccaaccaccagagctccttggacttactcggaatgatggaagtgctccctggacgctgtgttccaatcgccaagagggagctgctgtgggcaggcagtgcaggcctcgcatgttggctagccggagtgattttcatcgatcgaaaaagaactggagatgccatttcagtcatgagcgaagtggcccagacacttctgacacaggacgttcgcgtgtgggtgtttccagaaggcactcgcaaccacaacgggagtatgctcccattcaaacgaggagccttccatttagctgtgcaggcccaagtaccaatcgttcctatcgtgatgtcatcctatcaggacttctactgcaagaaggagcggaggttcaccagcgggcagtgccaggtgcgcgtgctccccccagtcccaaccgaaggtctcactcccgatgatgtaccagcactcgcagacagagtgagacacagcatgcttaccgtcttcagagaaatttcgaccgatgggcgaggggggggcgattatctcaaaaagccggggggcggcgggtag

SEQ ID NO: 177228 - DNA, 852 bp, synthetic construct
  misc_feature 1..852: note = Description of Artificial Sequence: Synthetic coding sequence
  source 1..852: mol_type = other DNA
atggacctgtggcccggcgcctggatgctgctgctgctgctgttcctgcttcttctgttcttgctgcctaccctatggttttgctctccatcagcgaagtatttcttcaagatggctttctacaacggttggatcctcttcttggccgtcttggccatccctgtctgcgcagtgcggggaaggaacgtggaaaacatgaagatattgaggttgatgcttttacatatcaaatatttgtacggaattcgggttgaagtgagaggtgcccatcacttccctccatctcagccttatgtggtcgtatcaaaccatcaaagtagccttgatttgctgggtatgatggaggtgctccctggcaggtgcgtcccgatcgcaaagcgagaactgttatgggccggcagcgcaggtttggcatgttggttagctggagtgatctttatagaccgtaagcgcaccggtgatgcgatctcagtaatgtccgaggtggcccagaccctgttgacacaggacgtgagagtgtgggtctttcccgagggaacaaggaatcataacggctccatgcttccgttcaaacgcggcgcgttccacctggcagtgcaggctcaggtgccaatcgtgcctattgtgatgtctagctatcaggacttttattgtaaaaaagaacgcaggttcacttccgggcagtgtcaggtccgcgtgttgcctcccgtgcccaccgagggcctgaccccggatgacgtgcctgccttggcagacagagtgagacacagcatgctcacagtcttccgggagatttctacggacggccgcggtggtggagattacctcaagaagcccggcggaggtggctag

SEQ ID NO: 177229 - DNA, 852 bp, synthetic construct
  misc_feature 1..852: note = Description of Artificial Sequence: Synthetic coding sequence
  source 1..852: mol_type = other DNA
atggacctgtggcccggcgcctggatgctgctgctgctgctgttcctacttcttctgtttctgctcccaacgctgtggttctgcagcccaagcgccaagtatttttttaagatggctttttacaacgggtggatcctctttctggccgtgcttgctataccagtctgcgccgttagaggaagaaatgtggaaaacatgaaaattttaagactgatgctgctacacatcaagtacttgtacggaatccgcgttgaggtccggggggcccaccacttccctccaagtcagccatacgtggtcgtgagcaaccaccagtccagcctcgaccttttgggcatgatggaggttcttcccgggcggtgcgtccctattgccaaaagagagctgctgtgggcaggcagtgccggcctggcctgttggttggcaggcgttatctttattgatcggaaaaggacaggtgacgccatttcagtgatgtcagaagtagcacagacccttttaacccaggacgttagagtgtgggtatttcccgagggcaccagaaatcacaatggttccatgctccccttcaagcgaggcgctttccatcttgctgtacaggcccaggtgcctattgttcccatcgtcatgtcatcataccaggatttctactgtaagaaagaaaggcgcttcacctccggccagtgccaggtgagagtattgcctccagttcctacagaaggactcaccccagatgacgtacccgccctggccgatagagttagacattccatgctcacagtcttccgtgagatctcaaccgacgggcgaggtgggggagactatttaaagaagcctggaggagggggatag

SEQ ID NO: 177230 - DNA, 852 bp, synthetic construct
  misc_feature 1..852: note = Description of Artificial Sequence: Synthetic coding sequence
  source 1..852: mol_type = other DNA
atggacctgtggcccggcgcctggatgctgctgctgctgctgttcttgctgttgctgtttttattgccgaccttatggttctgctccccgagtgccaagtacttcttcaaaatggccttctacaacggttggatcctttttttggccgtcctggccatcccagtatgcgcagtgcggggcaggaacgtggagaatatgaagattttgaggctaatgcttctccacatcaagtacttgtacgggattagagtcgaagttcgaggggcacatcactttccaccaagccaaccctacgtggttgtgtccaaccaccagagcagtctggatttgttgggcatgatggaagtgttgccaggccgttgtgtccccattgcaaagagagagctgttatgggccggctcagcggggctggcttgctggctggctggggtcatattcatagacaggaagcgaaccggagacgctatcagcgttatgtccgaagtggctcagacactgctaacacaggacgtacgtgtgtgggtgttccccgaagggacccgcaatcacaacggcagcatgctgcctttcaagcgaggcgctttccacttggccgtgcaagcccaggtgccaatcgtccctatcgtcatgagctcttaccaagatttttactgtaaaaaggaacgacggttcactagtggacagtgtcaggtgcgcgtcctgcctcctgttccgacggaaggcttaacgcctgacgacgtgcccgcgctcgcagaccgtgtacgacactcaatgcttaccgtgtttagggagatatccactgatggcaggggcggcggagattaccttaaaaagcctgggggcggcggctag

SEQ ID NO: 177231 - DNA, 852 bp, synthetic construct
  misc_feature 1..852: note = Description of Artificial Sequence: Synthetic coding sequence
  source 1..852: mol_type = other DNA
atggacctgtggcccggcgcctggatgctgctgctgctgctgttcctgctgctgctctttctgctcccaacactatggttttgttcacccagcgccaaatacttttttaagatggctttttataacgggtggatcttgtttctcgccgttctcgccatccccgtgtgcgcagttcggggacggaatgttgaaaatatgaagatcctgagactgatgcttctgcatatcaagtatctgtacggaattcgagtggaagtgcgtggtgctcatcactttcccccatcgcaaccgtatgttgtggtatcaaatcaccagagctctctggatttgctgggcatgatggaagttctacctggccgatgcgtacccatcgccaagcgcgaattgctatgggcgggaagtgccggcctggcatgttggctcgctggcgtcatatttattgaccgaaaacggaccggagatgccatctcagtgatgtctgaggtggcacagacgctgctgacccaggacgttagagtgtgggtgtttcctgagggaacccgcaaccataatggttctatgctgcccttcaagagaggtgcctttcaccttgccgtgcaagcacaagtgcctattgtgccaattgttatgagtagttaccaggatttctactgtaagaaggagcggcggttcacctctggccagtgccaggtcagggtgttacccccagtgcctaccgaggggttaactccagacgatgtaccagccctggcagacagggtgcgacattccatgctcacagtattccgtgaaatttccaccgacggccgaggtggcggcgattatctgaagaagcccggtggcgggggatag

SEQ ID NO: 177232 - DNA, 852 bp, synthetic construct
  misc_feature 1..852: note = Description of Artificial Sequence: Synthetic coding sequence
  source 1..852: mol_type = other DNA
atggacctgtggcccggcgcctggatgctgctgctgctgctgttcctgctgttattattcttgctcccaaccctgtggttttgcagcccatccgctaaatacttttttaagatggcgttctataacgggtggatcctgttccttgctgtgctggccatccccgtgtgcgctgtgaggggccgtaatgtagaaaatatgaagattctccggctcatgctgttgcacataaagtacctatacggcattcgcgtggaagtgcgcggagcccatcattttcctccctctcagccatatgtcgtagtttccaatcaccaatccagcttggacctgctggggatgatggaggtgctgcccgggcgctgcgtccccatcgccaaacgagaactgctgtgggccggcagcgccggcctggcatgttggctcgctggcgtcatttttatcgatcgcaagcgaactggcgacgcaatcagcgtcatgtccgaagtggcccagactcttcttacacaggacgtccgagtttgggtgtttccggaaggtacgcgaaatcacaacggttcaatgttgccctttaaacgcggtgctttccaccttgccgtgcaggcacaggtgcctattgtccctattgtcatgtcgtcttatcaggatttctattgtaaaaaagagaggcgattcaccagtggccaatgtcaggtgagggtgctacctcctgtacctactgaaggattgacacccgatgacgtgccggccctagccgacagagttcgtcattcaatgctgacagtgtttagggagattagcaccgacggcaggggtggcggggattatctgaagaaacctggcggcggaggttag

SEQ ID NO: 177233 - DNA, 852 bp, synthetic construct
  misc_feature 1..852: note = Description of Artificial Sequence: Synthetic coding sequence
  source 1..852: mol_type = other DNA
atggacctgtggcccggcgcctggatgctgctgctgctgctgttcctgctcctgctcttcctgctgccgacactgtggttttgtagcccatcagccaagtatttcttcaagatggcattttataatggctggattctcttcctcgccgtactggcaatcccggtgtgtgctgtccggggacgcaatgtggagaacatgaaaatcttgaggctgatgttgctgcacatcaagtacctctacgggatcagagtcgaggtgcggggcgctcatcatttcccacccagccagccatacgttgtggtctccaatcaccagtctagcctggatctgttgggaatgatggaagtcctaccagggcggtgcgtccccattgccaaacgcgagctcctttgggccgggagtgccggcctggcctgctggctggccggtgtcatattcatcgaccggaaacggaccggggacgccattagcgttatgtctgaggtggcccagaccctgcttacacaggacgttagagtgtgggtcttcccagagggcacccgtaaccacaatggtagtatgctgccgtttaagaggggtgcttttcatcttgctgttcaagcacaagttcctattgtgcctattgtaatgtcttcttaccaagacttttattgtaagaaagaaaggcgctttacaagtggacagtgccaggttagggtgctgccaccagtccccacagagggcttgacacctgacgacgtgcccgcactcgcagatcgcgtccggcactccatgctgacagttttccgcgaaatttcaaccgatggcaggggtggcggcgactatctgaaaaagcccgggggaggcgggtag

SEQ ID NO: 177234 - DNA, 852 bp, synthetic construct
  misc_feature 1..852: note = Description of Artificial Sequence: Synthetic coding sequence
  source 1..852: mol_type = other DNA
atggacctgtggcccggcgcctggatgctgctgctgctgctgttcttgctgttactttttctgctgccaaccctgtggttttgtagcccttctgcaaaatacttctttaagatggccttctacaacggctggattctcttcctggccgtcctggccatcccagtgtgtgccgtcagagggcggaacgtagagaatatgaaaatcttgcgtcttatgctgctccacattaaatacctatatgggatcagggtggaggtcagaggcgcccatcacttcccgccttcccagccttacgtggtcgtgtcaaatcaccaatcatccctcgatttgctcggcatgatggaggtactgccgggacgatgcgttcccatcgcaaaacgagagctattgtgggcaggctccgctggcttagcctgctggctcgccggagtgattttcattgataggaagcgcaccggggacgccatttccgtcatgagcgaggtcgcccagaccctgcttacccaggacgtgcgcgtgtgggtgttccctgaaggcacccgcaaccacaatggctccatgttgccatttaagaggggcgcattccaccttgcagtccaggcacaggtacccatagtgccaatcgttatgtcttcctaccaggacttttactgcaagaaagagcgcaggttcacatccggccagtgccaggtcagagtgctgcctccggtcccgaccgagggcctgacccccgacgacgtgccagcccttgccgatcgcgtgaggcattctatgctcaccgtatttagggagatttctactgacgggcggggagggggagactacctgaagaagcctggcgggggcggctag

SEQ ID NO: 177235 - DNA, 852 bp, synthetic construct
  misc_feature 1..852: note = Description of Artificial Sequence: Synthetic coding sequence
  source 1..852: mol_type = other DNA
atggacctgtggcccggcgcctggatgctgctgctgctgctgttcttattactgctgttcctgttgcccactctgtggttctgtagcccctctgccaaatatttcttcaaaatggcattctacaacggctggatcctgttcctcgcagtacttgctattccagtatgcgccgtgcgcggtagaaacgtggagaacatgaagatcctgcgcctgatgttgctgcatataaaatatctctacggaattcgggtggaggtgcggggtgcacaccacttccccccatcccagccctacgtggtggtgagcaaccatcagtcatcactggacttgctcggcatgatggaggtgttaccgggtagatgcgttccaatagccaaacgggagctgttgtgggccggatccgctggcttggcctgttggctggccggcgtaatctttattgatagaaagcgcactggcgacgctatttctgtgatgagtgaggttgcccaaaccctactgactcaagatgtgcgggtttgggtgttccctgaaggcacacggaaccacaatggcagcatgctccccttcaagcggggagcattccatctggctgtccaggcacaggttccaatcgtgcccatagtaatgtctagctaccaggacttttattgtaagaaagaacgaagatttacgtcagggcagtgccaggtgcgggtgctccccccagtcccgacagaagggttgacaccagatgacgtgccagcactggcagatcgggtgaggcactccatgctgaccgtgttcagagaaattagcaccgatggcaggggaggtggagactatctgaaaaagcccggaggtgggggctag

SEQ ID NO: 177236 - DNA, 852 bp, synthetic construct
  misc_feature 1..852: note = Description of Artificial Sequence: Synthetic coding sequence
  source 1..852: mol_type = other DNA
atggacctgtggcccggcgcctggatgctgctgctgctgctgttcctcctactgcttttcctcctcccgacactctggttttgctcacccagtgcaaaatatttcttcaagatggcattctacaacggatggattctgttcctggcagttttggccatccccgtctgtgcagtgcgtggcaggaacgttgaaaatatgaaaatactgcgccttatgttattgcacattaagtatttatatgggattagggtggaggtccggggagcacaccatttccctcccagccagccatatgtggtcgtgagtaaccatcagtctagccttgatttgttaggaatgatggaggtgctccctggccgctgtgtaccaatagcgaaaagggagctcctttgggctggcagtgctgggctggcctgctggttagctggggtgatcttcattgacaggaagaggactggtgacgctattagcgttatgagtgaggtggcacagacactcctgacacaggacgtcagagtgtgggtgttccccgagggcaccagaaatcacaatggatccatgctgcccttcaaaaggggggccttccacctcgccgtgcaggcccaagtgccaatcgtcccgattgttatgagcagctatcaggatttctactgcaaaaaagagaggaggttcaccagcggtcagtgccaggttcgcgtgctaccacctgtgcctacggaaggacttacgcccgatgacgtgccagccctggccgacagggttcgccattcgatgttgacagtattcagagaaatctccaccgatggccgcggaggtggggattacctgaaaaagccggggggcggtggctag

SEQ ID NO: 177237 - DNA, 852 bp, synthetic construct
  misc_feature 1..852: note = Description of Artificial Sequence: Synthetic coding sequence
  source 1..852: mol_type = other DNA
atggacctgtggcccggcgcctggatgctgctgctgctgctgttcctgctcctactcttcctgctgccaaccctctggttttgcagtccaagtgctaaatatttcttcaagatggctttttataatggatggatcttgtttctcgcagtcctagccatccctgtgtgcgcggtacgtggaaggaacgtggaaaacatgaaaatcctcagattgatgctgctgcatatcaaatatttatacgggatcagagtggaggtccgtggcgcacatcacttcccacccagtcagccgtacgtagtggtatccaaccaccaatcatcgttagacttgctcggaatgatggaagtgctccctggcagatgcgtgccaatcgctaaaagagagctgctttgggctggctccgctgggctggcttgttggctggccggagtcatctttatcgatcggaaacgcaccggagacgccattagtgtaatgtcagaggtagcacagaccctgctcacacaggatgtccgagtctgggtattccccgaaggcaccaggaatcacaacggatcaatgctccccttcaagcgcggagcgtttcacctggccgttcaggctcaggtgcctatagtgccaatcgtgatgtccagctatcaggatttttattgcaaaaaggaacgcagatttacatccggtcaatgtcaggtgagggtgttgccaccagttcctactgaaggcttgacacctgatgatgtgcccgccctagccgatagagttaggcatagtatgctgacagtattcagggaaatttctacagatggaaggggaggcggtgactaccttaagaaaccaggcgggggaggctag

SEQ ID NO: 177238 - DNA, 852 bp, synthetic construct
  misc_feature 1..852: note = Description of Artificial Sequence: Synthetic coding sequence
  source 1..852: mol_type = other DNA
atggacctgtggcccggcgcctggatgctgctgctgctgctgttcctgcttctcctgtttcttctgcccacgctttggttctgctctccttcagcaaaatatttttttaagatggctttttataacggatggatccttttcctggcagtcctcgcgattcccgtgtgtgcagtgcggggaagaaatgtggagaacatgaaaatactccgcctcatgctgctacatatcaagtacctgtacggcatccgtgtcgaggtccggggagcccatcactttcccccttcgcagccgtatgtggtagtctctaaccatcaatctagcctcgatcttcttggaatgatggaggtgctgcctgggagatgtgttcctatagctaagagggagctgttgtgggccggatctgctggactcgcgtgttggttggccggagtcatttttattgatcggaaacgcactggtgacgccattagcgtgatgtcagaagttgcccagacattgctgactcaggacgtgcgggtgtgggtgttccctgagggtactcgcaaccataatggaagcatgctgccgttcaaaagaggtgcatttcacttagctgttcaggcccaagtgcctatagtacccatcgtcatgtctagctaccaggatttttattgtaaaaaagagcgccggttcacttccggccagtgccaggtccgggttctaccccccgtcccgactgaaggactgacccctgacgacgtacctgcacttgcagatcgagtcaggcactctatgctgaccgtgttccgggagattagtaccgatggccgcggcggcggcgactatctgaagaagcctggcggtggcggctag

SEQ ID NO: 177239 - DNA, 852 bp, synthetic construct
  misc_feature 1..852: note = Description of Artificial Sequence: Synthetic coding sequence
  source 1..852: mol_type = other DNA
atggacctgtggcccggcgcctggatgctgctgctgctgctgttcctgttactgctctttctcctgccaacactgtggttttgttcaccctccgcaaagtattttttcaagatggctttttataatgggtggattttgtttcttgccgtgttggcaatccccgtatgcgcggtgagaggcaggaatgttgagaacatgaagatcctgcgactaatgctgctgcacatcaagtacttgtatggcattagagttgaagtacgcggtgcccaccactttccaccttcccaaccatacgttgtcgtatctaaccatcagtcatctctagacctgcttggaatgatggaagtgctcccaggaagatgcgtgcccatagctaaaagggaattactgtgggccggctcagccggtcttgcatgttggctagctggcgtgatttttattgaccggaaacgcacaggcgacgccatttcagtgatgtcagaggtggctcaaacactgctgacacaggacgtccgtgtttgggttttccccgaggggacccggaatcacaacggatcaatgctgcccttcaaaaggggcgctttccatctcgctgtacaggcccaagtcccaatagtgccaattgtcatgagttcttatcaggacttctattgtaaaaaggagcggcggtttacttccggccagtgccaagtgcgcgtgttgccacccgtgcctactgagggccttactcccgacgacgtccctgctctcgcggacagggttagacacagtatgttgacggttttccgagagatatctactgatgggcggggcgggggtgactacctgaagaaacctggcggtgggggttag

SEQ ID NO: 177240 - DNA, 852 bp, synthetic construct
  misc_feature 1..852: note = Description of Artificial Sequence: Synthetic coding sequence
  source 1..852: mol_type = other DNA
atggacctgtggcccggcgcctggatgctgctgctgctgctgttcttattgcttctgtttctgctgcccactctgtggttctgctcgccatccgctaagtatttcttcaagatggccttctataacgggtggatattattcctcgcagttcttgccatacctgtctgtgctgtgcggggaagaaacgtggagaatatgaagattcttcgccttatgctgctccacatcaaatacctgtacggcattagagtagaggtcaggggggcccatcattttcctccaagccagccatatgttgtggtatcgaatcaccagagcagtctagatctgttgggtatgatggaagttttaccaggccggtgcgtccctatcgcgaagcgggagctgctttgggccggatctgctggactggcgtgttggctggctggagtaatctttatagaccgcaaaaggaccggggacgcaattagcgtgatgagcgaggttgcccagacactgctcacgcaggatgtccgtgtgtgggttttccccgagggcaccaggaatcataacgggtccatgttgccgtttaaacggggagcctttcatctcgctgtgcaggctcaagtgcccattgtgcccattgtcatgtctagctatcaggacttctattgcaagaaggagcggagatttacctctggacagtgccaggtgcgggtgttgcctcccgtgcccactgagggccttacccctgacgacgtccccgcccttgcagacagggtgagacactccatgttgaccgtgttccgcgaaatcagcacggacggacggggaggcggcgactatctgaaaaaaccaggagggggcgggtag

SEQ ID NO: 177241 - DNA, 852 bp, synthetic construct
  misc_feature 1..852: note = Description of Artificial Sequence: Synthetic coding sequence
  source 1..852: mol_type = other DNA
atggacctgtggcccggcgcctggatgctgctgctgctgctgttcctattgttgttgtttttgttgcccaccctgtggttttgtagtccgagcgctaaatatttcttcaaaatggctttttataacgggtggatcctttttctggccgtacttgcaattcccgtttgcgccgtcagaggccggaatgtcgagaatatgaaaatcctccgtctgatgttgcttcatattaaatacttgtacggaatacgcgttgaggtgaggggagcacaccactttccacccagccaaccgtatgtcgtagtgtccaatcatcaaagctcactggatctgctggggatgatggaagtgcttccagggcgttgcgtgcccattgctaaacgggaattgctctgggccggtagcgctggtctcgcgtgttggctagctggggtgattttcatcgacaggaagcgaaccggcgatgccatctctgtgatgtccgaggtcgcgcaaacgctactgacgcaggatgtacgcgtctgggtctttcccgaggggactagaaaccacaacggatctatgcttcctttcaagcgcggcgccttccatctggcagtgcaggcccaggtcccaatcgtccccatcgtgatgagtagttaccaagacttctactgcaagaaggaacgacggtttacgtctggccaatgccaggtgagggttttgccacccgttccgaccgaggggttgactcctgacgacgttcctgccctcgctgaccgggtgaggcactctatgctgaccgtgtttcgggagatttctacggacggtaggggtggcggggactatctaaaaaagccaggaggaggtggttag

SEQ ID NO: 177242 - DNA, 852 bp, synthetic construct
  misc_feature 1..852: note = Description of Artificial Sequence: Synthetic coding sequence
  source 1..852: mol_type = other DNA
atggacctgtggcccggcgcctggatgctgctgctgctgctgttcctacttctgctttttcttttgccaactctgtggttttgctcccccagcgctaaatacttttttaagatggctttctacaatgggtggatactgttcttggccgtgctagctattccagtctgcgctgtaaggggcaggaacgtcgaaaacatgaagatattacgtctcatgttgctgcacatcaaatatctttacggtatcagagtcgaggtgcgcggtgctcaccatttcccccctagtcagccgtacgtcgtcgttagtaaccaccaatcctcgttagacctgttggggatgatggaagttctgcctgggcgctgtgtccctatagccaaacgcgaactgttgtgggccggatcagccggcctcgcctgctggcttgccggcgtcattttcatcgatcggaaacggacaggcgacgcgatttcggtgatgtctgaagtcgcccaaacgctgctgactcaggatgtgcgcgtgtgggtatttccagaaggcacacggaatcacaatggcagcatgcttcccttcaagagaggcgcctttcacctggcggtccaagctcaagtgcccattgtgcccatcgtgatgtcctcataccaggatttctattgtaagaaagagcgaaggttcacatccggccagtgtcaggtgcgcgttttgccaccggtaccgacggagggccttactccagacgacgtgcccgccctagctgatcgggtaagacacagcatgctgacggtctttcgggagatctccacagatggcagaggcggcggtgactacctcaagaagcccggagggggaggctag

SEQ ID NO: 177243 - DNA, 276 bp, synthetic construct
  misc_feature 1..276: note = Description of Artificial Sequence: Synthetic coding sequence
  source 1..276: mol_type = other DNA
cacagcgccagcacccccatcctgacccacagccaccccgcccagggcatgatggaggtccttcctggccgatgcgtcccgatcgccaaaagagagcttctttgggccgggtcagccggattggcctgctggcttgctggggtcattttcatagaccggaagcgcaccggggatgcaatctccgtgatgtccgaagtagcccagaccctgcttacccaagacgtttctcatccggggcttctgcttcaggagggagctagtctccacctcggatag

SEQ ID NO: 177244 - DNA, 276 bp, synthetic construct
  misc_feature 1..276: note = Description of Artificial Sequence: Synthetic coding sequence
  source 1..276: mol_type = other DNA
cacagcgccagcacccccatcctgacccacagccaccccgcccaggggatgatggaggtcttgccagggcggtgtgtgccaatcgcaaaaagagagctcctgtgggcgggctctgctggtcttgcttgttggctggctggcgtaatattcatcgacagaaagaggactggtgacgcgatctccgtaatgagcgaagtggctcaaaccctacttacacaggatgtttcccatcctggcttgttgcttcaggaaggggcatcattacatttgggctag

SEQ ID NO: 177245 - DNA, 276 bp, synthetic construct
  misc_feature 1..276: note = Description of Artificial Sequence: Synthetic coding sequence
  source 1..276: mol_type = other DNA
cacagcgccagcacccccatcctgacccacagccaccccgcccagggtatgatggaggtcctgccaggacgatgtgttcccatcgccaaaagggagctgctttgggctgggagtgctggcttagcctgctggctagctggtgtcatcttcatcgataggaagcggacgggggatgccatctccgtgatgagtgaagtggcccaaacgcttttaacccaggacgtcagtcatcccggcctgctcctacaggagggggcatcactccatttaggttag

SEQ ID NO: 177246 - DNA, 516 bp, synthetic construct
  misc_feature 1..516: note = Description of Artificial Sequence: Synthetic coding sequence
  source 1..516: mol_type = other DNA
atgatggaggtgctgcccggccggtgcgtgcccatcgccaagcgggagctcctgtgggcaggttcagccgggttggcctgctggcttgcgggtgttatcttcattgaccgtaaacggacgggagacgccatatctgttatgtcagaggtggcacaaacactcctgactcaggacgtgcgagtgtgggtttttcctgaaggaacgcgcaaccacaacgggtctatgctgccattcaaacgcggcgcttttcacctcgctgttcaagctcaggtcccaatcgtgcccatcgtaatgagctcctatcaggatttttattgcaagaaggaacgaaggttcacttctggacagtgtcaagtacgggtcctgccgcctgtccccaccgagggcctgacacctgacgatgtcccagccctggccgacagggtccgccactccatgctcacagtgttccgagaaatttcaacagacggccgaggtggaggagactatctaaagaagccagggggaggcggatag

SEQ ID NO: 177247 - DNA, 516 bp, synthetic construct
  misc_feature 1..516: note = Description of Artificial Sequence: Synthetic coding sequence
  source 1..516: mol_type = other DNA
atgatggaggtgctgcccggccggtgcgtgcccatcgccaagcgggaacttttatgggccgggagcgccggactcgcctgttggcttgcaggggtcatttttatcgatcggaagcgcacaggagacgccatatccgtcatgtccgaggtggcccagactctactcactcaggatgtgagagtttgggtattccccgagggcacacggaaccacaatggctctatgcttccgttcaagcgtggcgcctttcacttggcagttcaggctcaggtcccgatcgttcctattgtcatgtctagctatcaggacttttattgcaaaaaagagcggcgatttacgtccggacagtgtcaggtgagggtgcttccccctgtcccgaccgagggcttgaccccggatgacgtcccagctctcgcggatcgtgtgaggcacagcatgctgacggtgttccgcgagatctctaccgacgggagaggtgggggcgattacctgaaaaagcccgggggggggggctag

SEQ ID NO: 177248 - DNA, 276 bp, synthetic construct
  misc_feature 1..276: note = Description of Artificial Sequence: Synthetic coding sequence
  source 1..276: mol_type = other DNA
cacagcgccagcacccccatcctgacccacagccaccccgcccagggaatgatggaggtgctgcctggccgatgcgtcccaatagcaaaaagagagctactgtgggctggaagcgcagggctcgcatgctggctggcaggggtgatctttatagacaggaaaaggactggtgacgccatatccgttatgtcagaagttgcgcaaacactgttaacacaggatgtttcccacccggggctacttctccaggagggagccagcttacacctggggtag

SEQ ID NO: 177249 - DNA, 276 bp, synthetic construct
  misc_feature 1..276: note = Description of Artificial Sequence: Synthetic coding sequence
  source 1..276: mol_type = other DNA
cacagcgccagcacccccatcctgacccacagccaccccgcccaggggatgatggaggttctgccaggcaggtgtgtgccgatcgccaagcgcgaactgctgtgggccggcagtgcagggctggcctgttggctcgctggagtgattttcattgacaggaagcggaccggggacgccatcagtgtcatgagcgaggttgcccagaccttgctgacccaggatgtcagtcatcctggtctcctactgcaggaaggagcctccctgcatctgggctag

SEQ ID NO: 177250 - DNA, 276 bp, synthetic construct
  misc_feature 1..276: note = Description of Artificial Sequence: Synthetic coding sequence
  source 1..276: mol_type = other DNA
cacagcgccagcacccccatcctgacccacagccaccccgcccagggtatgatggaagtgcttccaggaagatgtgtgcctattgcaaagagggaactactttgggccggcagcgcggggttggcatgctggttagccggggtgatctttatcgacaggaaacggacaggagacgccatatcggtcatgtccgaggttgcacagactctcctgacccaggatgtcagccatcccggcctcctcctccaggagggtgcaagtctccacctgggatag

SEQ ID NO: 177251 - DNA, 516 bp, synthetic construct
  misc_feature 1..516: note = Description of Artificial Sequence: Synthetic coding sequence
  source 1..516: mol_type = other DNA
atgatggaggtgctgcccggccggtgcgtgcccatcgccaagcgggaattactttgggctgggagtgcaggcctggcatgctggctcgccggggttattttcattgacaggaagcgaactggcgacgcaatatccgtgatgtcggaagtggcacagactctattgactcaggacgttagagtttgggtgtttcctgagggcacacgcaatcacaatgggagcatgttacctttcaagcggggcgcttttcatctggccgtccaagcccaggtgcctattgttccgattgtgatgtcatcttaccaagatttctattgtaagaaggagagacggttcacttcaggacagtgccaagtgagggtgcttccacctgtacccaccgagggcctgactccagatgacgtgcctgctcttgccgatcgcgttaggcactcgatgcttacggtgttccgcgagatctccacggatggccggggcgggggtgactacctgaagaaacccggtggtgggggctag

SEQ ID NO: 177252 - DNA, 516 bp, synthetic construct
  misc_feature 1..516: note = Description of Artificial Sequence: Synthetic coding sequence
  source 1..516: mol_type = other DNA
atgatggaggtgctgcccggccggtgcgtgcccatcgccaagcgggaattgctgtgggccgggagcgcgggtctcgcctgctggttggccggagtgatattcatcgatcggaaaagaacgggtgacgccatctccgtgatgagtgaagtggctcagacattacttacacaggatgttcgtgtatgggtgttccccgagggaacccggaatcataacggctccatgctccccttcaaacgcggagcctttcacctggccgtgcaagctcaggtccccattgttccaatagtgatgtcatcttatcaggacttctactgcaaaaaagagaggcgcttcacttccggacaatgtcaggtgcgggtactgccgcctgtgcccaccgaagggctgaccccagacgacgtaccggcccttgcagaccgggtacgccattccatgttaactgttttccgcgagatcagcaccgacgggcgcggcggaggagattatctcaagaagcctggcgggggggggtag

SEQ ID NO: 177253 - DNA, 276 bp, synthetic construct
  misc_feature 1..276: note = Description of Artificial Sequence: Synthetic coding sequence
  source 1..276: mol_type = other DNA
cacagcgccagcacccccatcctgacccacagccaccccgcccaggggatgatggaggtcctccctggacggtgcgtcccgatcgctaagagggagctactctgggctggctcggccggccttgcctgctggctcgctggagtgatttttatcgaccggaaaagaacgggcgacgcaatttcagtgatgagcgaggtggctcaaaccctgttaacccaggatgtcagccacccaggactgctgttacaggagggggcctccttgcacctggggtag

SEQ ID NO: 177254 - DNA, 516 bp, synthetic construct
  misc_feature 1..516: note = Description of Artificial Sequence: Synthetic coding sequence
  source 1..516: mol_type = other DNA
atgatggaggtgctgcccggccggtgcgtgcccatcgccaagcgggagctgctgtgggcaggaagcgcaggcctagcctgctggttggcgggcgtgatttttatcgatcggaaacgcacgggcgacgcaatttctgttatgtccgaagtggctcagactctcctaacccaggatgtccgtgtgtgggtgttccccgaaggaacccgcaaccataacggctccatgctgcccttcaaacggggcgcctttcatcttgcagtccaagcccaggtacccattgttccaattgtgatgtcatcataccaagacttttattgtaaaaaagagcgccgcttcacatctggccagtgccaggttcgcgtccttcctccagtacctactgaaggactgactcccgacgatgtgcccgccctggccgatcgcgtcaggcactcaatgttgacggtcttccgcgagatatcaaccgacggaagggggggcggcgattaccttaaaaagccaggtggagggggatag

SEQ ID NO: 177255 - DNA, 516 bp, synthetic construct
  misc_feature 1..516: note = Description of Artificial Sequence: Synthetic coding sequence
  source 1..516: mol_type = other DNA
atgatggaggtgctgcccggccggtgcgtgcccatcgccaagcgggagttgctgtgggccggatccgcaggtttagcttgctggctggcaggggtgattttcattgatcgcaaacgcaccggggacgcaatctccgtgatgtccgaggttgcccagactcttctcacccaggatgtgagggtctgggtgttcccagagggaacccgcaatcataatggtagcatgttgccatttaagaggggcgccttccacctggccgtgcaggcacaggtcccaatcgtcccgatagtaatgtcaagttaccaggatttctactgcaaaaaggagcgacgttttacttccgggcaatgccaagttagggttctccccccggtccccaccgagggcctgacccctgacgacgttcccgctctggcggaccgggtgaggcactccatgttgaccgtctttcgggaaatcagtaccgacggccgcggcggcggggactatctgaaaaaacctggtggtggagggtag

SEQ ID NO: 177256 - DNA, 741 bp, synthetic construct
  misc_feature 1..741: note = Description of Artificial Sequence: Synthetic coding sequence
  source 1..741: mol_type = other DNA
atggagctgtggccctgcctggccgccgccctgctgctgctgctgctgttggtgcagttgagcagggctgccgagttctacgctaaagtggccctctactgcgcactctgtttcactgtttcagcagtggccagcttagtatgcctcctgcggcacggggggcgaaccgtggaaaatatgagcatcatagggtggtttgttcggtcctttaagtacttttacgggctgcgctttgaagtgagagatcccaggaggctgcaggaagcccgaccttgcgtgatagtctctaaccaccagtctatcctcgacatgatgggcttaatggaggtgctccccgagcggtgtgtgcagatcgcaaaacgcgaacttttattcctgggccctgtcggcctcattatgtaccttggaggcgtttttttcatcaacagacaacggtccagtactgctatgactgtaatggccgatctcggggaacggatggtaagagagaacgtgcctatcgttcccgtagtctactccagcttcagtagcttctacaacacgaaaaagaagttctttaccagtggtaccgtgacagtgcaggtcttagaagccattcccacctccgggctgactgccgctgacgtgcctgcactggttgatacatgccatagggccatgcgtactacgtttctgcatatctcaaaaacgccgcaggaaaatggagcaacagccggctcgggcgttcagcccgcccagtag

SEQ ID NO: 177257 - DNA, 837 bp, synthetic construct
  misc_feature 1..837: note = Description of Artificial Sequence: Synthetic coding sequence
  source 1..837: mol_type = other DNA
atggagctgtggccctgcctggccgccgccctgctgctgctgctgttattggtgcagttaagcagagccgccgaattctacgccaaggttgccttgtattgtgcgctgtgcttcactgtttctgcagtggccagtctggtctgcctgctgcgtcatgggggcagaaccgtagagaatatgagtatcataggctggtttgtgaggtcctttaaatatttttacgggttacgtttcgaggttcgcgacccacggcggctgcaagaagctcggccatgcgttatcgtgagcaatcatcagagcattctggacatgatgggcctgatggaggtgctgccagagaggtgtgtgcaaattgccaaacgcgaacttctgttcctgggacctgtcgggttgatcatgtacctgggcggtgtattttttattaacagacagagatcttctacagccatgacagtgatggccgacttgggtgaacggatggtcagagaaaacctaaaagtctggatttacccagaaggaactcgaaacgacaatggagatctgcttccctttaaaaaaggcgccttttacttggccgtgcaggcacaggtgcctatcgttcccgtggtctacagctcattttcaagcttctacaacacaaaaaagaaatttttcacatctgggaccgtgactgtgcaggttctcgaggctataccgaccagcggtctgactgcagcagacgttcctgccctcgtcgatacatgtcatcgcgccatgcgcaccaccttcctgcacatctccaaaacgcctcaagaaaatggcgctacagccgggagtggtgtgcaacccgctcaatag

SEQ ID NO: 177258 - DNA, 837 bp, synthetic construct
  misc_feature 1..837: note = Description of Artificial Sequence: Synthetic coding sequence
  source 1..837: mol_type = other DNA
atggagctgtggccctgcctggccgccgccctgctgctgctgctgcttctggtccagctgtcaagggccgcggagttctacgccaaggtcgccctttattgcgccctttgtttcacggtcagcgcggtggcttccctcgtgtgtctgctgaggcatggcggacggaccgtggagaatatgagcatcatcggatggtttgtgcggagtttcaagtatttctacgggttacggtttgaggtgcgcgatccgaggcgtttgcaggaagcccggccttgtgtcattgtgtccaaccatcagtctattctggatatgatgggactgatggaggtgctgccagaaaggtgcgtgcaaatagccaagagggaattgctgtttttgggccctgtgggtctcataatgtatcttgggggcgtatttttcatcaacagacagaggtctagtacagctatgacagtcatggccgacttaggggagaggatggttcgcgagaacctgaaggtttggatctatccagaggggacaaggaacgacaatggagaccttcttcccttcaagaagggggccttctacctggcagtgcaggcccaggttcccatcgtccctgtggtctactctagtttttccagtttttacaacaccaagaagaagttcttcacctctggtaccgttacggtgcaggtgctggaggccatccctaccagcgggcttactgctgccgatgtccctgctcttgtcgatacttgccacagggccatgagaacaacattccttcacataagcaagactccacaggagaacggcgcaactgcaggttctggtgtccagccggcacagtag

SEQ ID NO: 177259 - DNA, 1371 bp, synthetic construct
  misc_feature 1..1371: note = Description of Artificial Sequence: Synthetic coding sequence
  source 1..1371: mol_type = other DNA
atgttcctgctgctgcccttcgacagcctgatcgtgaacctgctgggaatctccttgactgtcttgtttacactgctgctggtgtttataatcgtcccggccatattcggagtgagtttcggcattagaaagctctacatgaaaagcctgctaaagatttttgcatgggccacccttagaatggaaaggggggctaaggagaaaaatcaccagctgtacaaaccatataccaatggcattatcgccaaagaccccaccagcttggaagaagagatcaaagaaattagacgcagcgggagctccaaggcgctggataacaccccagagtttgaactctcagatatattttacttctgccggaaaggcatggagaccattatggacgatgaggttactaagcggttttcggctgaggagttggaatcatggaatctgctttccaggacgaattataattttcaatatattagcctgagactgacagtcctatggggactgggggtcttaattcgctattgctttctactgcccctgaggattgcattggcgtttacaggcatctcattactggttgtaggaacgactgtggttgggtatttgcccaacgggcgctttaaagagttcatgtccaagcatgtgcacttgatgtgttatcgcatttgcgtgagagctttaacagcaatcatcacttaccatgacagagaaaacagaccacgtaacgggggtatttgcgtcgcgaatcacacaagtcctatcgacgtcattatactcgccagcgatggttactatgctatggtggggcaggttcacggtgggctcatgggtgtgatccagcgagcaatggttaaggcctgccctcacgtgtggtttgaaaggagcgaggtaaaggacagacacctcgtggccaaacgcctgaccgaacatgttcaggataaaagcaagctgcccatcctgatttttccagagggtacctgcatcaacaacacatccgtaatgatgttcaaaaagggtagtttcgagatcggcgccacagtttatccggttgccatcaagtatgatccacagtttggagacgcattttggaactcctctaagtatggtatggtgacatatcttctccgaatgatgacaagctgggccatagtgtgctcagtgtggtacttgccaccaatgacaagggaggccgacgaagacgctgtgcaatttgccaatcgcgtgaaaagcgcaatagctcgacaaggcggcctcgttgatttgttatgggatgggggtctgaagagagaaaaggtaaaggataccttcaaagaggaacagcagaagctgtacagtaagatgatcgtaggaaaccacaaggataggtctcgttcgtag

SEQ ID NO: 177260 - DNA, 1305 bp, synthetic construct
  misc_feature 1..1305: note = Description of Artificial Sequence: Synthetic coding sequence
  source 1..1305: mol_type = other DNA
atggagggcgccgagctggccggcaagatcctgagcacctggctgacgctcgttctcggatttattctgctgccttccgtctttggagtgagtttaggcataagcgaaatctacatgaagatactcgtaaaaaccctggagtgggcaactattaggatcgaaaaaggcacgcctaaggagagcattttaaagaacagcgctagcgtgggaattattcagagggatgaatcaccaatggaaaaagggctgtccggactaaggggacgtgacttcgaattgagcgatgtcttttacttttcaaaaaagggactcgaggctatagtggaagacgaagtaacgcagaggttcagctccgaagagctggttagctggaatctgctgactcgtaccaatgttaatttccagtacatctccctgcggctcacaatggtgtgggtgttaggtgtgatagttcgatactgtgtactgctgccactgagggtcactctggcgttcatcggcattagcctgctggtgattggtactacactcgttggccaactccccgacagctctctgaagaattggttgtccgagctcgtgcatctcacctgttgcagaatctgcgtgagagctctgtccggaactatccattaccataacaagcagtaccgcccacaaaaaggaggcatctgtgtggcgaaccacactagtccaattgacgtcctcattcttaccacagatgggtgttacgcaatggtgggacaggttcatggtggcttaatgggtataattcagagggctatggtgaaggcttgcccacatgtgtggttcgaaagaagcgagatgaaagatcgacatctggtaacaaagagactgaaggagcacatagctgataagaagaaactgcctattctgattttccctgaggggacttgtattaataatacatctgttatgatgtttaagaaagggtcgtttgagatcgggggcacaatacaccccgtggcaattaagtacaatcctcaatttggcgacgcattctggaattcttcgaagtataatatggtctcgtacctgctccgcatgatgacaagttgggccatagtttgcgacgtgtggtacatgccacctatgacgagggaggagggggaagacgcagtgcagtttgcaaacagagtaaaatctgccattgccatacagggaggcctgactgaactgccctgggacggcggcttgaaacgtgccaaggtaaaggatatcttcaaggaggagcagcagaaaaactactctaaaatgatagttgggaatggatcactgagctag

SEQ ID NO: 177261 - DNA, 1305 bp, synthetic construct
  misc_feature 1..1305: note = Description of Artificial Sequence: Synthetic coding sequence
  source 1..1305: mol_type = other DNA
atggagggcgccgagctggccggcaagatcctgagcacctggctgacgctcgtcctgggattcattctgctacccagtgtgttcggtgtatccttggggattagtgaaatctatatgaagatcctcgtgaagaccctcgagtgggccactattagaattgagaagggcacccctaaggagtccattctaaagaatagcgctagcgtcggaatcatccagcgcgatgaatcacccatggagaaaggcctgagtggattacgaggaagagattttgaactgtcagatgtgttttacttctcaaagaaaggtctggaagccatcgtggaggacgaggtcacccaaagattctcatctgaagaacttgtctcctggaatttgctcacccggacgaatgttaactttcaatatatttcattacgactgaccatggtttgggtccttggcgtaatcgtcaggtactgtgtcctgctgcccctccgggttacactggccttcattggaatcagcctgctcgtgattggtaccacacttgtggggcagcttccagactcgtcgctgaagaattggttatcagagctcgtccatctgacatgttgccggatctgtgtccgggctctgtccgggaccatccattatcataataaacagtacagaccccagaagggaggcatctgcgtcgcgaatcacacttcccccatcgatgtcctgatcttgaccacggacgggtgctacgctatggttgggcaggtccacggcggccttatgggtattatacagagagccatggtgaaagcgtgtccacatgtgtggttcgagcgcagcgagatgaaagatcgacatctggtgacaaaaaggttaaaggagcatatagccgataaaaagaaactccccatattaatatttcctgaaggaacttgcattaacaatacctctgtgatgatgttcaaaaaggggtcgtttgagattggcggaacaatacatcctgttgccatcaaatacaacccccagtttggagatgccttctggaatagtagtaagtacaacatggtgtcttacttacttagaatgatgacttcatgggccatcgtgtgtgatgtctggtacatgcctcctatgacccgcgaggagggcgaggacgctgtacagttcgctaacagggtcaaatccgccatcgcaatccaaggcggtctgacagagttaccatgggacggcgggttgaagagggcaaaggtgaaggacatctttaaggaagaacaacagaagaactatagcaagatgattgtcggcaacggttccctgtcatag

SEQ ID NO: 177262 - DNA, 1506 bp, synthetic construct
  misc_feature 1..1506: note = Description of Artificial Sequence: Synthetic coding sequence
  source 1..1506: mol_type = other DNA
atgttcaccctgccccagaaggacttccgggcccccaccacctgccttggaccaacctgtatgcaagacttagggtcctctcacggggaggatttggagggagagtgttcgcggaagctggatcaaaagttgcccgagttgaggggggtgggagaccctgcaatgatatcgtccgacactagctacttatcatcaaggggaagaatgatcaagtggttttgggattcagccgaggagggctatagaacataccacatggatgagtacgatgaggataagaacccatctgggattatcaatcttggtacaagtgaaaacaaactgtgctttgacttactgtcttggcggctgtcccagagggacatgcagcgagtggaacctagcctgcttcagtacgcagattggagggggcatctgttcctgagggaggaagttgcgaagttcctttcattctattgcaaaagccccgtacccctacgacccgagaacgtggtggtcctaaatggcggggcgtcactgttctctgccctggcgacagtgctgtgtgaggccggcgaagcatttctgatcccgaccccctactacggagctataacccagcatgtgtgtctctacggcaatataagactggcatatgtgtatctcgacagcgaggtgacagggcttgatacaaggccatttcagcttacagttgagaagctagagatggcgcttcgcgaggctcacagtgagggcgtgaaggttaagggcttaatattaattagcccccagaaccccttgggggacgtgtactctcctgaggagcttcaggagtatttagtgttcgcgaagaggcaccgtctacacgtgatcgttgacgaggtttatatgcttagtgtgtttgaaaaatcagttgggtataggtccgtgctcagcttggagcgcctcccagacccccaacgaacacatgtgatgtgggccaccagcaaagatttcgggatgagcggtttacggtttgggaccctctacacagagaatcaggacgttgccactgcggtcgccagcttatgcagataccacggtctgagcgggctggtgcagtatcagatggcacagctgcttcgggacagggactggattaatcaggtatatctacctgaaaatcacgcccgcttgaaagctgcccacacgtacgtgtctgaggagctgcgagcgcttggcattcctttcctcagccgaggcgccggattttttatatgggtagacctgcgcaagtacctgcctaagggcacctttgaagaggagatgttgctgtggagaagatttctggataataaagtattactgtcctttggcaaggcattcgagtgtaaagagcctggatggttcaggttcgttttttctgatcaggtgcaccgactatgtctcggaatgcagcgcgtccaacaggtcctggccggcaaaagccaggtggcagaggaccctcggccctctcagagccaggagcctagcgatcagaggcgttag

SEQ ID NO: 177263 - DNA, 477 bp, synthetic construct
  misc_feature 1..477: note = Description of Artificial Sequence: Synthetic coding sequence
  source 1..477: mol_type = other DNA
atgttcaccctgccccagaaggacttccgggcccccaccacctgcctcggacccacatgcatgcaagacctggggtcatcacacggcgaggacctcgaaggtgagtgctctcgcaagctggatcagaaattgcctgagctgaggggcgtgggagatcctgccatgatatcctcggatacatcgtatctctcctctcggggtcggatgatcaaatggttctgggactccgccgaagaaggctatcggacttatcatatggacgagtacgatgaagataagaaccccagcggaatcataaacctagggacttctgagaacaagctgtgtttcgatctgctgtcttggcgccccccgggcggaagcggccaggtgcccgttttcctgttacaagagccttccaccccccagactagagagtgcggatgccccgagtggtggtgtctagcactgttgtgttccggacatggcgccgtgtag

SEQ ID NO: 177264 - DNA, 420 bp, synthetic construct
  misc_feature 1..420: note = Description of Artificial Sequence: Synthetic coding sequence
  source 1..420: mol_type = other DNA
atgttcaccctgccccagaaggacttccgggcccccaccacctgcttggggcccacttgcatgcaggacttagggtcttcccatggtgaagatttggaaggggagtgctcacgtaaactggatcagaaactgcccgaactgcgaggggtgggagatcccgccatgatttcatccgacacatcctacctgagttctcgcggtagaatgattaagtggttctgggattctgcggaggagggctaccgcacatatcacatggacgaatacgatgaggacaaaaacccttcaggaattataaatttggggacatccgaaaacaagctctgcttcgatctgctttcctggcggttaagccagagagatatgcagcgcgtggagccctctttactccagtacgccgactggcggggacacctgtag

SEQ ID NO: 177265 - DNA, 234 bp, synthetic construct
  misc_feature 1..234: note = Description of Artificial Sequence: Synthetic coding sequence
  source 1..234: mol_type = other DNA
atgttcaccctgccccagaaggacttccgggcccccaccacctgcctgggaccaacctgtatgcaagatctcggcagcagccacggggaggatctcgaaggtgaatgcagtaggaaactggaccagaaactgcccgagctcagaggggtgggtgaccccgcaatgatcagttcagacacctcatacctgagttcccggggacgcatgatcaaatggttctgggactcggcatag

SEQ ID NO: 177266 - DNA, 780 bp, synthetic construct
  misc_feature 1..780: note = Description of Artificial Sequence: Synthetic coding sequence
  source 1..780: mol_type = other DNA
atgagcaagtacaagctgatcatgctgcggcacggcgagggcgcctggaataaggagaaccggttctgctcttgggtagatcagaagcttaactctgagggaatggaagaagccaggaattgtggtaaacaactgaaagctctgaatttcgagttcgaccttgttttcacgtcggtactgaataggtcaattcataccgcatggctgatcttggaggagttgggccaggagtgggtaccagtcgagagcagctggaggttgaatgagcgccattatggggcattgataggcctgaacagagagcagatggctttgaatcacggcgaggagcaggtacgactgtggagaagatcgtataacgtcacacccccaccaattgaagaaagtcacccctactatcaggaaatctacaacgaccggcgatataaggtgtgtgacgtgcccctcgatcaactacctcggtctgagtccctgaaggatgttcttgaaaggctcctgccgtattggaatgaaaggattgcccccgaagtgctgaggggtaagacaatcctcatctccgcacacggaaattcctccagggcactcctgaagcacctcgagggtatcagcgatgaggatattatcaacatcaccctgcctacgggagtgccaatcttactcgagctggacgagaacctgcgggcagttggaccccatcagtttcttggggatcaagaagctatccaagcagccatcaagaaggtggaggatcagggtaaagtaaagcaggccaagaaatag

SEQ ID NO: 177267 - DNA, 780 bp, synthetic construct
  misc_feature 1..780: note = Description of Artificial Sequence: Synthetic coding sequence
  source 1..780: mol_type = other DNA
atgagcaagtacaagctgatcatgctgcggcacggcgagggcgcctggaacaaagagaacagattctgttcttgggtggatcagaaacttaatagcgagggtatggaggaggccaggaattgcggaaaacaactcaaagcgcttaacttcgagttcgacctcgtgtttacctctgtactaaaccgaagcatccacacagcttggctgatcctagaagagctggggcaggagtgggtgccagtcgaatcctcctggcggctgaatgagaggcattacggagcactgataggtttgaatagagagcagatggctctgaaccatggcgaggagcaggtgcgcttgtggaggagaagctataacgtgactccgcctccgatcgaagagtcacacccatactatcaggagatatataacgaccggcgctataaggtttgtgatgttccgttggaccagttgccaaggtctgagagtctcaaagatgtcctcgagagactactgccttactggaatgagaggattgccccagaagtgcttagaggcaaaaccattctcatcagtgcccacggcaatagcagccgggctctcttaaagcacctggaaggaatttctgacgaagacattattaacatcaccttacctacaggcgtgccaatactgctcgagctggatgaaaatttgagagcagtgggtccacatcaattcctgggcgatcaggaagcgattcaggccgccatcaaaaaagttgaggatcaaggcaaagttaagcaggccaaaaagtag

SEQ ID NO: 177268 - DNA, 780 bp, synthetic construct
  misc_feature 1..780: note = Description of Artificial Sequence: Synthetic coding sequence
  source 1..780: mol_type = other DNA
atgagcaagtacaagctgatcatgctgcggcacggcgagggcgcctggaataaagagaaccgcttctgctcgtgggtggaccagaaacttaactccgaaggaatggaggaagctcggaactgcggcaagcagctgaaagctctgaatttcgagttcgatctcgtgttcacttcagtcttaaatagatctattcatacggcctggctaattcttgaagaacttggccaggaatgggttcccgtcgagtcaagttggaggttaaacgagcgtcactacggcgccctcattggcctcaatcgtgaacagatggccctaaaccacggcgaggagcaggtaaggttatggcgtaggtcttacaacgttacccctccccctattgaggagagccacccctactaccaggaaatttataatgataggaggtacaaagtgtgcgatgtgcccctcgaccagctgccccggagcgagtccctgaaagatgtgctggaacgactgctcccatattggaatgagcggatcgcacctgaagtcctccggggaaaaaccatattgatttctgcccacggaaattcttctcgggccctgctcaagcaccttgaggggatttccgacgaagacattattaacatcaccctgcctacaggtgttcccatcttgctggagctggacgagaacctccgagcagtgggcccccaccagtttctgggagaccaggaggccattcaagccgcaataaagaaggtagaagaccaggggaaagtgaaacaagcgaagaagtag

SEQ ID NO: 177269 - DNA, 237 bp, synthetic construct
  misc_feature 1..237: note = Description of Artificial Sequence: Synthetic coding sequence
  source 1..237: mol_type = other DNA
atgagcaagtacaagctgatcatgctgcggcacggcgagggcgcctggaataaggagaatagattctgttcttgggtggatcagaagttaaacagcgaagggatggaggaggctcgcaactgcgggaagcagttgaaggccctcaatttcgagtttgatttagtattcacctccgtgttgaacaggtctatccacaccgcctggctcatcctcgaggaattgggccaggagtggtag

SEQ ID NO: 177270 - DNA, 894 bp, synthetic construct
  misc_feature 1..894: note = Description of Artificial Sequence: Synthetic coding sequence
  source 1..894: mol_type = other DNA
atgaaccggggcttcagccggaagagccacaccttcctgcccaagatttttttccgtaagatgtccagttccggggctaaggacaagccagaactgcagtttccatttcttcaggatgaggacacggtcgccactcttctggagtgcaaaaccttgtttatcctgagggggctccccggttcgggaaagtcaacgctagcccgcgtcatcgttgacaaataccgggacggtactaagatggtgagtgccgacgcctataagatcacaccaggtgctaggggcgctctaaaggaactgcggcagttcgtacccggggatgaaccccgggagaaaatggatctggtgacgtatttcggcaagcgccctcctggggtgctccattgcacaaccaagttctgcgactacggtaaagcgcccggcgccgaggagtacgcgcagcaggacgtattgaagaaatcctactccaaagcgttcactctgacaatcagcgctctgttcgtcacccctaaaaccacgggggctagggtcgagctgagtgagcagcagctgcagctgtggccctcagatgtagacaagctgtcgccaaccgacaacttgccaaggggctcccgcgcccacatcactttaggctgcgccgccgacgtggaggccgtccagaccgggctggatctactcgagatcctgcgccaggaaaaaggaggaagccggggagaggaagtaggggagctatccagggggaaattgtactcattgggaaacggtaggtggatgctgactcttgccaaaaacatggaagtgcgcgcaatttttacagggtactatggcaagggcaagccagttcctacacaagggagccgaaagggcggggccttacagtcatgtaccatcatctag

SEQ ID NO: 177271 - DNA, 1206 bp, synthetic construct
  misc_feature 1..1206: note = Description of Artificial Sequence: Synthetic coding sequence
  source 1..1206: mol_type = other DNA
atgagcagcagcggcgccaaggacaagcccgagctgcagttccccttcctgcaggatgaggacaccgttgccactctactagaatgtaaaaccctattcattctccggggcctaccaggctccggcaagtccacacttgcccgagtgatcgtcgacaagtatcgggacggtactaagatggtcagtgctgacgcctataaaatcactcctggcgcaaggggggcattttcagaggagtacaaaagactggacgaggacctggccgcctactgccgcagacgcgatattcggatcctcgtcctggacgataccaatcacgagagagaaagactggagcagctatttgagatggcggaccagtatcagtatcaggtggtgctggtagaaccaaagacagcctggcggctggattgcgcccagttgaaggagaagaaccagtggcaattatcagctgatgatcttaaaaagctgaagcccggcctggagaaagatttcctgcccttatactttgggtggttcctcactaaaaaatcctctgaaacactgagaaaagctggccaagttttcctggaagagcttggaaaccataaggcctttaagaaagaactgcggcagtttgttcctggcgacgagccccgtgagaaaatggacctggtgacatactttggcaagaggcctcccggcgtgctccactgcacaaccaagttctgtgattacggcaaagcaccaggggccgaggagtacgcacaacaggatgtgctcaagaaaagctactccaaagctttcactttaaccatctcagctcttttcgtgaccccaaagactacaggggcgcgtgtagagctgagtgagcaacaattgcagctgtggccgtccgacgtggataagctctcacccaccgataatctcccgaggggcagcagagcacatattactctgggttgtgcagcagatgtggaagcagtgcagactggacttgatctactagaaatattacggcaagagaagggaggctcccgcggggaggaagtgggggagctgtccagagggaagctgtactctctgggaaatgggaggtggatgctgaccctggctaagaacatggaagtccgggcgatattcacaggatattacgggaaagggaagcccgtcccaacacagggcagtagaaagggcggagcactccagtcttgcactattatctag

SEQ ID NO: 177272 - DNA, 1266 bp, synthetic construct
  misc_feature 1..1266: note = Description of Artificial Sequence: Synthetic coding sequence
  source 1..1266: mol_type = other DNA
atgaaccggggcttcagccggaagagccacaccttcctgcccaagatcttctttagaaagatgtcctctagtggggcaaaggacaaacccgagctgcagtttccattcctccaggacgaagatacggtcgccactctgcttgaatgtaaaaccttattcatattacgcggcctgccaggcagcggaaagtctaccttggcccgggtcatcgtggacaaatatcgggatggtaccaagatggtgtcagccgacgcgtacaagatcacaccgggtgcaaggggggcattttcagaggagtataagagactggatgaagacctagccgcctattgtcgacgtcgtgatatcaggatactggttctcgatgatacgaaccatgagagagagcgtctggaacaactgtttgagatggctgatcaatatcagtaccaggtcgtgctcgtggagcccaagaccgcatggcgcctcgattgcgcacaactcaaggaaaaaaaccagtggcagctaagcgccgacgacctgaagaagttaaaaccagggctggaaaaagattttcttccactgtattttgggtggttcctcacaaaaaaaagctctgaaaccctccgcaaggccggccaggtgtttctggaggagctgggaaaccataaggcctttaaaaaggagctgcgccaattcgtcccaggcgacgagcctagggaaaagatggacctcgtgacctacttcggcaaacggccccctggagtgctgcactgcactacaaagttctgtgattatgggaaggcccctggtgccgaagaatacgcgcagcaggacgttttgaagaagagctatagtaaagcctttacattgaccatcagtgcccttttcgtcacacccaagacgaccggcgccagagtcgaattatccgagcagcaactgcagttatggccctccgatgttgacaaattaagtccaacagataacctccccagaggaagcagagcacacataactctggggtgcgcagcagacgtcgaagcagtacagactggccttgacttgctggaaatcctgagacaggaaaaaggaggtagtagaggcgaagaagtgggggaactgtccaggggaaaactgtacagtttgggaaatgggcgctggatgctgactttggccaagaacatggaggttagggcgatttttacaggctattatgggaagggaaaaccagtgccaacacagggatcccgaaagggaggcgccctccaatcttgtacaatcatttag

SEQ ID NO: 177273 - DNA, 174 bp, synthetic construct
  misc_feature 1..174: note = Description of Artificial Sequence: Synthetic coding sequence
  source 1..174: mol_type = other DNA
atgagcagcagcggcgccaaggacaagcccgagctgcagttccccttcctccaggacgaggacaccgtcgccacactgctcgagtgtaagacgctgttcatcttgcggggactgccggggtctggcaagagtactttggcccgggtgattgtggataagtaccgggatggatag

SEQ ID NO: 177274 - DNA, 1419 bp, synthetic construct
  misc_feature 1..1419: note = Description of Artificial Sequence: Synthetic coding sequence
  source 1..1419: mol_type = other DNA
atgaagttcctgatcttcgccttcttcggcggcgtgcacctgctgtcactctgctctgggaaggcgatctgtaaaaatggtatctctaagagaaccttcgaggaaatcaaagaggaaatcgcaagctgtggagatgtggctaaggcaatcattaatcttgccgtgtatggcaaagcgcagaaccggtcctatgaacgccttgccctgctggtggacactgtgggtccgcggctaagtggttcaaagaaccttgaaaaggctattcagattatgtaccagaatctgcaacaggacgggctggaaaaggtgcacctcgagccagtgcggatccctcattgggaaagaggcgaggaaagtgctgttatgctggaacccaggattcataagatcgccattcttgggctcggcagtagcatcggcaccccccccgaagggatcactgccgaggttctggtcgtaacttcatttgacgagctgcagcggagagcaagtgaagccagagggaagattgttgtgtataaccagccatacatcaattattcgcgcacagtgcaatacagaacccagggggccgtggaagctgctaaagtaggtgccttggctagcctcatccgatccgtcgcatctttcagcatctactctccacacaccggcattcaagagtatcaggatggagtcccgaagatcccgacggcctgcattactgtggaagacgcggagatgatgagtcgtatggcttcccatgggatcaaaatcgttattcagctgaaaatgggagctaagacataccctgacacagattccttcaacactgtggccgagatcactggatctaagtatccagaacaggttgtgctcgtatctgggcatttagactcctgggacgtgggccagggggctatggacgacggagggggagccttcataagttgggaggcgctgtccctgatcaaagacctcggtctgcggcccaaaagaaccctgaggctggtcctgtggacagctgaagagcagggaggtgtcggagctttccagtattaccaactccacaaggtaaacattagcaattacagcctggtgatggaaagcgatgctgggacgtttctgccgactggactgcagtttacaggctctgagaaagcccgcgctattatggaagaggttatgtcccttctgcagcccctgaatattacccaagtcttgtctcacggtgagggcacagatatcaacttctggattcaggctggtgtccctggcgctagccttcttgacgatttatacaagtattttttcttccatcactcacatggtgacacgatgacagtgatggatcccaagcaaatgaacgtcgccgccgccgtgtgggctgtcgtaagttatgtcgtcgcagacatggaggagatgttaccccgaagctag

SEQ ID NO: 177275 - DNA, 981 bp, synthetic construct
  misc_feature 1..981: note = Description of Artificial Sequence: Synthetic coding sequence
  source 1..981: mol_type = other DNA
atgagcggcctgggcaagaagcacctgctgctgatgggcgagttcttcagttatggcaccaaaatactctaccagaacaccgaagccttgcaatctaaatttttttccccactgcagaaagccatgctgcctcctaactctttccagggtaaggtagcctttattacaggcgggggaaccggtttggggaaaggaatgaccactctactaagttctctgggcgcccagtgtgtgatcgcctctcgtaagatggacgtgctgaaggccaccgctgagcaaatcagtagccagactgggaacaaggtccacgccattcagtgtgacgtgcgcgatcccgacatggtgcagaatacagtgagtgaactgattaaagtcgccggccatcctaacattgtgattaataacgctgccggaaattttatctccccaacagagcgactgagtcccaacgcctggaagactataacagatatcgtcttgaacggtacggcctttgtcacactggaaattggaaagcagctcataaaagcacagaagggagcagcattcctttcaatcaccactatttatgcagaaaccggctccggcttcgttgtgccatccgcatcagctaaagccggagttgaagctatgagcaaaagtctcgccgccgagtggggtaaatatgggatgcgtttcaacgtgattcagccaggaccgatcaagacaaagggcgccttttcccggctggacccaactggaacgttcgaaaaggagatgatcggtcgcataccttgtggcaggttggggacagtggaggagttagccaacctagcggcgtttctgtgcagtgactatgcaagctggataaacggggctgtcatcaaattcgacggaggggaggaagtgttaataagcggcgagttcaacgatctgaggaaagttacaaaggagcagtgggataccatcgaggagctaatcagaaagacaaagggatcttag

SEQ ID NO: 177276 - DNA, 1551 bp, synthetic construct
  misc_feature 1..1551: note = Description of Artificial Sequence: Synthetic coding sequence
  source 1..1551: mol_type = other DNA
atggagcccgccgtgagcctggccgtgtgcgccctgctgttcctgctctgggtgagacttaaggggttggaattcgtgctgattcaccagcgctgggtgtttgtgtgcctgtttcttctgccactcagcctcattttcgatatatactattacgtgagggcctgggtcgtcttcaagctgtcatcagctccccggctgcatgaacagcgtgtcagagacattcaaaagcaggtgcgagaatggaaggagcagggtagcaagactttcatgtgcaccggaaggcccggctggctaactgtttcccttcgagttgggaaatacaaaaaaacccataagaacattatgatcaacctgatggacattctggaagtggacacaaagaagcagatcgtcagagtcgagcctttggtgacaatgggccaggtcaccgctctcctcacctctatcggatggacactgcccgtccttcctgagctggacgacctgaccgtgggaggactgataatgggcacaggtattgagtcatcatcccataaatatggattgttccagcatatttgcaccgcatacgagctcgtactcgccgatggctctttcgtacggtgcactccaagcgaaaattcagatctcttctatgctgtgccctggagttgtggaactctcgggtttctggtggcagccgagatacgcatcatacctgcaaaaaagtacgtgaagttgcgttttgagccagtccgaggcttggaggcaatctgtgctaagtttactcacgaaagccaacgccaagagaatcattttgtggagggtttactctattccctcgatgaagcagtcatcatgacaggtgtaatgacggacgaggccgagccatccaaactaaattcgataggcaactattacaaaccttggttcttcaagcacgtggagaattacttgaagactaatagagaaggtcttgagtatataccactccgacattactatcatagacacacgcggtcgatcttttgggaattgcaggacatcataccctttggaaataacccaatatttcgctatttgtttggctggatggtgccccccaagatctctttactcaaactgacacaaggagagactttgagaaagctgtacgagcaacaccatgttgtacaggacatgctggtgcccatgaagtgtcttcagcaggccctgcatacgtttcagaatgatatccatgtctacccaatatggctctgtccgttcattctcccttcgcagcctgggctagtgcatccaaaaggaaatgaagctgaactgtacatagacataggggcgtacggcgagcctagggtgaagcacttcgaagcccgctcatgtatgagacagctcgagaagttcgttcgttcagtgcacgggttccagatgctatatgccgattgctatatgaatcgtgaggagttctgggagatgttcgacggatcactataccataagctgcgggagaaactggggtgccaggacgccttccccgaagtctacgacaagatatgcaaagctgctaggcactag

SEQ ID NO: 177277 - DNA, 465 bp, synthetic construct
  misc_feature 1..465: note = Description of Artificial Sequence: Synthetic coding sequence
  source 1..465: mol_type = other DNA
tgaagcctgctgaagctgacccagggcgagaccctgcggaagctgtatgagcagcatcacgttgttcaggacatgctggtccctatgaaatgtctgcagcaggccctccacacattccagaatgatatccatgtgtaccctatttggctctgcccgtttatcctaccgtctcagcctggtctggtgcatcctaagggtaacgaagctgagctctacattgacatcggcgcttatggagagcctcgtgtcaaacattttgaagccaggagctgtatgcggcaactcgagaagtttgttcgctccgtgcatgggtttcagatgctatacgccgactgttatatgaatcgggaagagttttgggagatgtttgatggttcgctgtaccataaattacgcgaaaagttaggatgccaagacgcattccccgaagtctacgacaagatctgcaaggctgctcgtcactag

SEQ ID NO: 177278 - DNA, 1428 bp, synthetic construct
  misc_feature 1..1428: note = Description of Artificial Sequence: Synthetic coding sequence
  source 1..1428: mol_type = other DNA
atgggcgccggcgagcagaaccggcagagcgcccactgcgtgcaggggatctgcgggtacctggagggtgacgaggaaggggaagagggggaagtgcggagcacccaagtgcgggaatggaaggagcaaggatccaaaacgtttatgtgtacaggaagacctgggtggctgactgtgtccctccgggtgggtaaatataaaaaaacacacaaaaatattatgattaatctcatggacatcctggaagtcgataccaaaaaacagatcgttcgagtagaaccgcttgttactatgggtcaggtgactgcactcctgactagcattggctggacactccccgtccttccggagctggatgatcttactgtggggggcctgattatgggcacaggcatagagagctcatcacataagtacggactttttcagcatatctgtactgcttacgaattggtgctggcggatggaagtttcgtgagatgcaccccttccgaaaacagtgatctcttttacgctgtgccttggtcttgtggaactctaggatttctggtggcggctgaaatccgcataattcccgctaagaaatacgtgaaacttcgtttcgagccagttcggggtttggaggccatatgcgctaagttcacccatgaatcacagcgccaggagaaccactttgtggagggactcttgtacagtcttgacgaggccgttataatgaccggagtgatgaccgacgaagctgaaccctcaaagctgaattctattgggaactattataagccgtggttctttaagcacgtagagaactacctcaagactaatagggaaggcctggaatacatcccgctgagacactactatcacagacacacacggtcgatcttctgggaactgcaggacatcataccttttggtaataacccaatcttcagatacctctttggatggatggtgccacccaagattagccttctgaaactgacacagggagagacactgcggaaactttatgagcagcaccatgttgtccaggacatgctggtcccgatgaaatgcctgcagcaggcattacacacctttcaaaacgacattcatgtgtatccgatatggctgtgtccattcatcctgccttcacagcccgggcttgtccaccccaagggaaacgaggctgagctctatattgatattggcgcctacggcgagccccgcgtaaagcattttgaggcaagatcctgcatgcgacagttagaaaagtttgtgagatcagtgcatggctttcagatgctatatgcggactgctacatgaacagggaagagttctgggaaatgtttgatggctccctatatcacaaacttagagagaagttagggtgccaggacgcttttccagaagtctacgacaagatatgcaaggcggccaggcattag

SEQ ID NO: 177279 - DNA, 903 bp, synthetic construct
  misc_feature 1..903: note = Description of Artificial Sequence: Synthetic coding sequence
  source 1..903: mol_type = other DNA
atgggcaccggcatcgagagcagcagccacaagtacggcctgttccagcatatctgcaccgcctatgagctggtgctggcagatggttcttttgtgcgctgtactccctctgagaactctgacctattttacgcagtgccatggagctgtggcactcttggttttctggtcgcagctgagatccgtattattcccgccaagaaatacgtgaaactccgcttcgaacctgtgcgaggccttgaggcgatctgcgccaagtttacacatgagagccagcgacaggaaaaccacttcgtcgaaggcctgctgtatagcctcgacgaggcggtaataatgaccggcgttatgaccgacgaggctgagccatcgaaggacataattccttttggtaataatccgatttttagatacctgtttggctggatggtccctccaaagattagtctccttaaactcacgcagggtgaaaccctgaggaaactatacgagcagcatcacgtcgtacaggatatgctcgtgcccatgaaatgcctgcagcaggcattgcacacctttcagaatgatattcatgtgtatcctatttggttatgtccgtttatcctgccttcacagccagggcttgtccacccaaagggaaacgaggccgagctgtatatcgacattggcgcttatggggaaccccgcgttaaacacttcgaggctcgctcttgcatgagacagcttgagaaattcgtccgtagcgttcacggctttcagatgctttacgctgactgctatatgaatcgggaagagttttgggagatgtttgacggctcattataccataagctcagagaaaaactggggtgccaagacgcattccctgaggtctacgacaaaatatgtaaggcagcccggcactag

SEQ ID NO: 177280 - DNA, 729 bp, synthetic construct
  misc_feature 1..729: note = Description of Artificial Sequence: Synthetic coding sequence
  source 1..729: mol_type = other DNA
atggagcccgccgtgagcctggccgtgtgcgccctgctgttcctgctttgggttaggctgaaagggctcgagttcgtgttgatccaccagagatgggtatttgtctgtctttttctgctgcccctctctcttatcttcgacatatattattacgttcgagcatgggttgtgttcaagctgagcagtgctccccgactccacgagcaaagggtccgtgatatccagaagcaggtcagggagtggaaggagcagggaagcaaaacattcatgtgcacgggtaggcctggctggctcacagtgagtttgcgcgtgggaaaatacaagaaaacccacaagaacattatgataaacttgatggatatactggaagtcgacactttccaaaacgacatacacgtttacccgatctggctgtgcccatttattctgccatcacaacctggccttgttcatcccaagggcaacgaggctgagctctacatagacatcggcgcatacggtgagccacgcgtcaagcactttgaagcccggtcctgtatgagacaacttgaaaagttcgtgagatccgtccacggatttcagatgttatacgcggactgctacatgaatagggaagaattttgggaaatgtttgacggctctttatatcataaactgagagagaaattagggtgccaggatgcctttcccgaggtgtatgacaagatttgcaaggccgctcgccactag

SEQ ID NO: 177281 - DNA, 1203 bp, synthetic construct
  misc_feature 1..1203: note = Description of Artificial Sequence: Synthetic coding sequence
  source 1..1203: mol_type = other DNA
atgatggacctgcggaacacccccgccaagagcctggacaagttcatcgaggattaccttttaccggatacatgcttcagaatgcagattaatcatgctattgatattatctgtggctttctgaaggagaggtgcttcagggggtctagctatcccgtgtgtgtctctaaagtagttaagggggggtcatccggcaaaggaaccacactgaggggccgatcagacgccgacttggtcgtgtttctttccccactgacaacctttcaggaccaacttaatcggcggggagaattcatccaggaaattcgcaggcagctcgaggcatgtcaaagagaaagggcattctcagtaaaatttgaagtccaggcccctcgctggggcaatccaagggccctgtcatttgtgttgtcctctctgcagctgggagagggggtagaattcgacgtgctgccagcgttcgacgccctgggtcagctaacgggcggttacaagcccaatcctcaaatctacgtgaagttgatcgaggaatgcacagacctgcagaaagaaggcgaatttagcacctgttttacggaacttcagcgagatttcctaaagcaaaggcctaccaagctgaaatctcttatccgcctcgttaagcactggtatcagaactgcaagaagaaactcgggaagctgccacctcagtacgcacttgagcttcttaccgtctacgcttgggagaggggtagcatgaagacgcattttaacactgctcaaggttttcgcactgtccttgagctggtgattaattaccagcaactatgtatatactggacaaagtactacgatttcaagaatccaatcatcgagaagtatttgaggaggcagctcaccaagcctcgcccagtcatcttggaccctgccgaccccacggggaatctgggggggggcgatccaaaaggttggcgccagttagcccaggaggcggaggcttggttaaactacccatgtttcaagaactgggatggcagcccagtgtcatcctggatcctgcttgccgagagtaactcagccgacgacgagaccgatgatccccggcggtaccaaaagtacggctatattggtacccacgaatatccacatttcagccatcgtccctccaccctgcaggccgcatcaacaccccaggcagaagaagattggacttgtactatcctgtag

SEQ ID NO: 177282 - DNA, 1146 bp, synthetic construct
  misc_feature 1..1146: note = Description of Artificial Sequence: Synthetic coding sequence
  source 1..1146: mol_type = other DNA
atgatggacctgcggaacacccccgccaagagcctggacaagttcattgaggactatcttttacccgatacttgcttccgcatgcagattaaccatgccatagacatcatatgtggcttcctgaaagaacggtgttttagaggaagcagctaccctgtgtgtgtaagcaaggtggtaaagggtggaagttcagggaaggggaccaccctccgaggtaggagtgatgctgacctggtggtcttcctatccccccttactacgttccaagatcagctcaatcgcaggggcgaatttatacaggagatcaggcgtcaactcgaggcctgtcaaagggaaagggcatttagcgtcaagttcgaggtgcaggcgcctcgatggggaaatccacgtgcgttatcatttgtgctatcctctctgcagcttggtgagggagtcgagtttgacgtgctccctgcatttgacgccctcggacaactgaccggcggttataaaccaaaccctcagatatacgtcaagctgatcgaggaatgcacagacctccagaaagagggggaattcagcacttgctttaccgagcttcaacgcgattttctgaagcagcggccgacgaaactgaaaagtcttatcaggctggtgaagcactggtaccagaattgcaagaagaagctggggaagctccctccacagtatgccctggagctactgacggtatatgcttgggaaaggggcagtatgaagacccactttaacactgcgcagggatttcgcacagtgctggaacttgtgattaattatcagcagctgtgtatttactggactaagtattatgattttaagaatcccataatagaaaaatacctgcgccggcagttaaccaagccccgaccagtcattctggacccagccgacccaacaggcaatctggggggcggggacccgaaaggatggaggcagctggctcaggaggctgaagcctggctaaattatccctgctttaaaaactgggacgggagccctgtcagtagctggatcctcctggtgaatctgacacttgtgggccggaggaattacatcatcagcgaacacgcggtcaatttacagcaaacccgcggagccagtctgagctacagttttcaggtggcttag

SEQ ID NO: 177283 - DNA, 1245 bp, synthetic construct
  misc_feature 1..1245: note = Description of Artificial Sequence: Synthetic coding sequence
  source 1..1245: mol_type = other DNA
atgatggacctgcggaacacccccgccaagagcctggacaagttcatagaagattatctgctgcccgacacctgctttcgtatgcagattaaccatgccattgatatcatttgcggtttcctaaaggaaaggtgctttcgcggctcatcttacccagtgtgtgtctctaaagttgtcaaagggggcagcagtggaaaaggaaccaccttgaggggcagaagcgacgctgatctcgtggtgtttttgtcccccctcaccacatttcaggatcaacttaacaggagaggcgaattcatacaggaaattcgcaggcagctcgaagcttgccagagagagcgggccttctcagtcaagttcgaggtccaggctccacgatggggaaatcctagagctctatccttcgtcctgtcgagcctgcagctgggggagggggtcgagtttgacgtacttcccgcctttgatgccctggggcagttaacgggtggttataagcccaacccccagatctacgtgaaactcatcgaagaatgtaccgacctgcagaaagagggagagttctcaacatgctttacggaactgcaacgtgactttctgaagcaaaggcctactaagctgaagagcttgattaggcttgttaagcattggtatcagaactgcaaaaaaaaactcgggaagctgcctccccagtacgctttggagctgctcacggtgtacgcctgggaaagaggaagtatgaaaacccactttaacactgcgcagggtttcagaaccgttctggaacttgttataaactaccagcagctgtgcatctattggaccaagtattacgacttcaagaatcctatcattgaaaaatatttacggagacagttgacaaaacctcgcccagtgatcctggacccagccgatcccaccgggaacctcggaggtggtgatcctaaagggtggaggcaactcgctcaggaagcagaggcttggctcaactacccctgctttaagaactgggatggtagcccggtctctagctggatcctgctcacacagcatacaccgggctccatccatcccaccggcagacggggactggatcttcatcacccccttaacgcatcggctagctggggcaaaggtctgcagtgttatttagaccaattcctacatttccaagtgggcctcttgatccagcgaggccagtctagctccgtatcatggtgtattatccaggatcgaactcaggtgtcctag

SEQ ID NO: 177284 - DNA, 1095 bp, synthetic construct
  misc_feature 1..1095: note = Description of Artificial Sequence: Synthetic coding sequence
  source 1..1095: mol_type = other DNA
atgatggacctgcggaacacccccgccaagagcctggacaagttcatagaggattatctattgcctgacacgtgctttaggatgcagataaaccatgccattgacatcatttgtggttttctgaaggaaagatgcttcagggggagctcctacccagtatgtgtgtcaaaagtggtgaaaggggggtccagtggcaagggaacaacattgcgaggccgctctgatgccgatcttgtcgtcttcctaagcccattaactacctttcaggaccagctaaaccggcgaggggaattcatccaggagatcaggaggcaactcgaggcctgtcagagagagcgtgcgttctcagtcaagttcgaagtccaggcacctcgatggggaaaccctcgagccttgtccttcgtcctgagcagccttcaattgggagagggcgtggaattcgatgttcttcctgcattcgatgcactagggcagttaactggaggatacaagcccaatccacagatatatgtgaagctgattgaggagtgtaccgacctacaaaaggaaggcgaattcagtacctgttttactgagctgcagcgggactttctgaaacagagacccaccaagcttaaatccctcatacgactagtcaaacattggtatcaaaattgtaaaaagaaacttggcaagttgcccccccagtacgctctagagctcctgaccgtctacgcctgggaacgaggaagcatgaagacgcactttaataccgcccaggggttccgaacggtgctggagctggtgatcaattaccagcagttgtgcatctattggacgaagtattatgacttcaaaaaccccattatcgaaaagtatctgcgacggcagctcacgaagcctcgtcccgtgatactggatcctgcggaccctaccggaaatctcgggggaggagacccaaaaggctggcgtcaactggcccaagaggctgaggcttggctcaactatccctgtttcaagaattgggacggatcgccagtgagttcatggatcctgcttgtgcgtccgcctgcatcaagcttgccctttattccggcaccactgcacgaggcttag

SEQ ID NO: 177285 - DNA, 2160 bp, synthetic construct
  misc_feature 1..2160: note = Description of Artificial Sequence: Synthetic coding sequence
  source 1..2160: mol_type = other DNA
atgggcaacggcgagagccagctgagcagcgtgcccgcccagaagctgggctggttcatccaggaatacctgaagccatatgaggagtgtcagacgctgattgatgagatggtgaatacgatttgcgacgtcttgcaggagcccgagcagttcccactcgtgcagggagtcgccattggggggtcctatgggcggaaaacagtcctgaggggcaacagtgacggaactcttgtgctgtttttctccgatttgaaacagttccaggaccagaagcgctcacagagagatatcctggataaaaccggagataagctgaagttctgtctgttcacaaaatggctcaaaaataatttcgagatccaaaaatccctggatggattcaccattcaggtttttacaaaaaaccagcgcatctccttcgaagtactcgctgctttcaacgctcttagtctgaatgacaatccttcaccctggatttacagagaactgaagcggtcactggacaaaacaaacgccagccctggcgagttcgccgtttgcttcaccgagctgcagcaaaagttcttcgataaccgccccgggaagctgaaggacctcatcttactgatcaaacattggcaccagcagtgtcaaaaaaagataaaagatcttcccagccttagcccgtatgccctcgagctgctcacggtttatgcatgggaacaggggtgtcgaaaggacaactttgatattgcggagggcgtgcgcactgtgttggagttaatcaagtgtcaggaaaagttgtgcatctactggatggtgaactataatttcgaagacgaaactattcgcaatatactgctgcatcaactacagagcgccagacccgtgattttggaccctgtggaccccacgaataatgtctcaggggataagatctgctggcaatggcttaagaaggaggctcagacatggctgacctcacctaacctagacaacgaactccccgcacccagctggaatgtgctccctgctccactgttcaccacacctggccacctgttggataaatttatcaaggaatttttgcagccaaataagtgttttcttgaacaaatcgattcagctgtgaacataattcgaacattcctgaaagaaaattgtttcagacagtcaacggcgaagattcagatcgtcagaggcggctccactgccaagggcactgctcttaagaccggcagtgatgccgacctcgttgtgttccacaacagtctcaagagttacactagccagaagaacgaacgtcataaaattgttaaggagatccatgagcaacttaaagccttttggagagagaaagaggaggaattagaggtgtccttcgagccccccaagtggaaagccccccgagtgctttcgttttcactcaagagtaaggtgttaaatgaatctgtttcctttgatgtactgccagcctttaatgccctgggccagctgtcctctggtagcaccccctccccagaagtttatgcgggcctaatagatttgtataaatcaagtgacctgcccggaggcgaattctctacttgcttcaccgtgttacagcggaacttcatccgtagcagacctaccaagctaaaggatctcatccgcttggtcaaacattggtacaaggagtgtgagcgaaagctgaagcctaagggcagtcttccgcctaaatacgccctggagcttctcacaatttacgcttgggaacaagggagcggggtgcccgatttcgatacggctgaggggtttaggactgtactggaactcgtgacgcaataccaacagctatgcattttttggaaggtgaactacaatttcgaggatgaaaccgtgagaaaatttttgctgagccagctgcagaaaacacgtccagtgatcctcgatcctgccgagcctactggtgacgtgggaggcggcgatagatggtgttggcacttgctggctaaggaagccaaagaatggttgtcctcgccttgctttaaggacggcactggcaatcctatccccccttggaaggtaccaactatgcagacccccgggtcctgtggcgccaggattcatcctattgtcaatgaaatgtttagttccagatctcaccgaatcctcaacaacaattcaaagaggaacttttag

SEQ ID NO: 177286 - DNA, 2064 bp, synthetic construct
  misc_feature 1..2064: note = Description of Artificial Sequence: Synthetic coding sequence
  source 1..2064: mol_type = other DNA
atgggcaacggcgagagccagctgagcagcgtgcccgcccagaagctcggatggttcattcaggagtacctaaagccttatgaagagtgccagacacttattgatgagatggtaaacacaatctgcgatgttctacaggaaccggaacaatttcccctggtccagggtgttgctatcggcggctcttatggccgaaaaaccgtactccgtgggaacagtgacggcactctcgtgctcttctttagcgacttgaagcagttccaagaccagaagcgatctcagcgggatatcctcgataagacaggggacaaactgaaattttgcctatttaccaagtggttgaagaacaatttcgagatccagaagtctctggatggctttacaatccaagtatttaccaagaaccagagaatctcttttgaagtgctggccgccttcaacgcactctctttgaacgacaatcctagcccatggatttacagggagctgaaaagatcacttgataaaaccaatgcgtccccgggtgagttcgcagtttgtttcacagagttacagcagaaattcttcgataatagaccaggcaaactcaaggacctgatcctgctaattaagcactggcaccagcaatgtcagaaaaaaattaaggatctcccgagcttgagcccatacgccctggagctgctgacggtttacgcttgggaacaggggtgtcggaaagataatttcgacatcgcagaaggagttcgaaccgtgctcgaactgattaaatgccaagagaagctgtgcatttattggatggtgaattataactttgaagatgaaacaatcaggaacattctccttcaccagctccagagcgctcgtcccgtgatcctcgatcccgtggacccaactaataacgtctcgggggataaaatctgctggcagtggctgaagaaggaagctcagacttggctgacatccccaaacctcgacaatgaactccccgcccccagctggaatgttttaccagctccactgttcacaacaccgggtcacctcctagacaaattcatcaaagaattcctgcaacctaacaaatgcttcttggagcaaatcgactcagccgtaaacatcattcgtaccttcctaaaagagaactgcttccggcagtcaacagcgaaaatccagatcgtcaggggaggctccactgcgaaagggactgccctcaaaaccggatccgacgcggacttggtagtctttcacaactctctgaagtcctatacctctcaaaaaaatgagcggcataaaatcgtgaaggaaattcacgagcaactaaaggccttctggcgtgagaaggaggaggaattggaagtctcttttgagcccccaaagtggaaggcccctagagtcctgtctttctccctaaagtcaaaggtgctaaatgagagtgtgagcttcgacgtgctaccagccttcaacgctcttgggcagctgtcttcaggctcaaccccttctcccgaagtatatgccggcctcatcgatctctataaatcatccgacctccccggaggcgagttttctacctgcttcaccgtgctccagagaaatttcatcaggagccgacccaccaagctgaaggacctgatcaggttggtgaagcactggtacaaagaatgcgagaggaagcttaaaccgaagggtagcctgccccccaagtacgcactcgaactcctcacaatttacgcttgggagcagggctctggagtgcctgactttgatacagctgaaggatttaggacagtgttggagctcgtgacacaatatcaacaattatgcattttctggaaggtgaattataacttcgaggacgagactgtcagaaaatttctccttagccaattgcagaaaaccaggcccgttatcttggaccccgctgagcctacaggagacgtcggcgggggcgataggtggtgttggcatcttctcgcaaaggaagctaaagagtggctgagttctccgtgtttcaaggacggcactggaaacccaatacccccatggaaggtccctgtgaaagtgatttag

SEQ ID NO: 177287 - DNA, 519 bp, synthetic construct
  misc_feature 1..519: note = Description of Artificial Sequence: Synthetic coding sequence
  source 1..519: mol_type = other DNA
atgggcaacggcgagagccagctgagcagcgtgcccgcccagaagcttggctggttcatccaggaatacctgaaaccgtacgaagaatgccaaaccctgatcgacgaaatggtgaacaccatttgcgatgtgttgcaagaacccgaacagtttccgcttgtccaaggagtcgccattggcggttcttatggccgtaaaaccgtgttaagaggcaattctgacggaacactggttttattcttctcagatttgaagcagtttcaggaccaaaagaggagccaaagagacatcctcgacaaaaccggggacaagctcaagttctgcttattcaccaagtggctaaagaataacttcgagattcagaagtctcttgatgggttcactatccaggtttttactaaaaaccagaggatcagctttgaagtgttagccgctttcaacgctcttagcaagcactgctgggtcagcggcgaaaagagccagcggtctggatgccagactgcattatgtaatttgtag

SEQ ID NO: 177288 - DNA, 1053 bp, synthetic construct
  misc_feature 1..1053: note = Description of Artificial Sequence: Synthetic coding sequence
  source 1..1053: mol_type = other DNA
atggccaccgtgggcgccccccggcacttctgccggtgcgcctgcttctgcaccgacaatctctatgttgccagatatgggctgcacgttcgtttcagaggtgaacagcagctgaggcgggattacgggccaattctacgctctcgcggctgcgtctccgccaaggatttccaacaactgctcgctgagctggaacaggaagttgaacgtcgccagcgactggggcaggagtctgccgctcgcaaggctttgattgctagctcctatcatcctgccaggcctgaggtgtacgatagcctccaggatgctgccctggctcccgagttcctagcagtgacagaatatagcgtgagccccgacgccgacctcaagggactgttacagagactcgaaaccgtcagcgaggagaagcgaatttatagggttcccgtcttcacagcccccttctgtcaggctctactggaagagttggagcacttcgagcagtcagatatgcccaagggtcggccaaacacaatgaacaattacggagtgcttttgcatgaactggggctcgacgaacctcttatgacacccctccgggaaaggtttctgcagccattaatggcactgttatatcccgattgcggcggtggtagactggacagtcacagagcatttgtggtgaagtatgccccagggcaggatctggagctgggttgtcactacgacaatgcagagctaactctaaatgtcgcactaggcaaggtgttcacaggaggtgcgctttatttcggtggtctctttcaggctccgacagccctcaccgagccccttgaggttgaacatgtcgtgggtcagggcgtgttacacaggggagggcaattacacggagccagacccctggggacaggcgagaggtggaacttagtggtgtggctccgggcatctgctgtaaggaacagtctgtgtcctatgtgctgcagagagccggatttggtggatgacgaagggttcggagacgggtttacccgcgaggaacccgccactgttgatgtctgcgcacttacctag

SEQ ID NO: 177289 - DNA, 3261 bp, synthetic construct
  misc_feature 1..3261: note = Description of Artificial Sequence: Synthetic coding sequence
  source 1..3261: mol_type = other DNA
atggacctgtacagcacccccgccgccgccctggaccggttcgtggccagaagactacagccccgcaaagagtttgttgaaaaggccaggcgggcgctgggcgctctggcagccgctctgcgggaaaggggaggtcgactgggggccgccgctccacgcgtgctcaagaccgtaaagggcggcagttcgggtcgcggcaccgcactgaagggggggtgcgatagcgagctcgtaattttcctggattgcttcaaatcatacgttgatcagagagcaaggcgagctgagatcctttccgagatgcgggcgtctctggaatcatggtggcagaaccctgtgccgggcctcagactgacttttcctgagcagagcgttcctggagctctccagtttagattaacatccgtcgatctggaggattggatggatgtgtcattagtcccagcctttaacgtactcgggcaagctgggtcgggggtgaaaccaaagccacaggtgtattctaccctgttgaactcagggtgccaaggcggcgaacacgctgcgtgctttactgagcttcgtagaaacttcgtgaacattcgccccgcgaagcttaagaacctgatcttactggttaagcattggtatcaccaagtgtgcttacagggcttatggaaggagactttaccccccgtatatgccctggaacttctgaccatcttcgcttgggagcagggatgcaagaaggacgcatttagcttagccgagggcctccgtaccgtgctgggtttgattcagcagcatcagcacctatgtgtgttctggaccgtaaattacggtttcgaagaccctgccgtaggtcagttcctgcaaagacagctgaagcgaccaagaccagttatacttgacccagcagaccctacttgggacctaggcaacggcgctgcatggcactgggacctgttggcccaagaggctgcctcatgctacgatcacccctgttttttacgcgggatgggcgatcccgtgcaatcatggaaggggccggggctcccacgagccgggtgttccggcttgggccatcctatccagctggacccgaatcagaagacacctgaaaactctaaaagtctaaacgccgtctatccacgggcaggttccaaaccacccagttgtcccgcaccaggccctactggccagcctgcttctagttctgtgcctggtatggcactggaccttagccagatccccacgaaggagctggaccgcttcatccaggatcatctcaaaccctctccacagtttcaggagcaggttaagaaagctatcgatataattttaaggtgtcttcatgagaattgcgttcacaaggccagccgagtcagcaaaggtggttcctttggccggggcactgatctgcgggatgggtgtgatgtggagttaataattttcttaaattgctttaccgattataaagaccagggtccacgtcgggcggagattctggatgagatgagagcccaactggagtcctggtggcaggatcaggttcctagcctgtcactgcagttcccagagcaaaacgtgcctgaggcccttcagtttcagttggtgagcactgcgctcaagagttggaccgacgtgagcctgctccctgctttcgacgctgtagggcagctaagcagtggcaccaagccgaaccctcaggtgtacagccgtttgctcacttctggctgccaggagggtgaacacaaggcatgctttgccgagctgcgccggaacttcatgaacatccgtcccgttaaattgaaaaacctgattttgttagtgaagcattggtatcggcaggtggctgctcagaacaaaggtaagggtcccgcccccgcatctcttcctcccgcttatgccctggaattgctgaccatcttcgcttgggaacagggttgccggcaggattgtttcaatatggcccagggatttcggactgtgctggggctggtccaacagcatcagcagctctgtgtgtattggactgtgaattatagcacagaggatccggcgatgcgcatgcacttactgggccagctgagaaaaccccgacctctggtgttagaccccgctgaccctacttggaatgtgggccatgggtcttgggaactcttggcccaggaagccgcagctttagggatgcaggcatgctttctgtcacgcgatggcacgtctgtccagccatgggacgtgatgccagcgctgctctatcagacgcctgctggtgacctggataagtttatctcagaattcctgcaacctaaccggcaatttttagcccaagttaacaaggcggtagacactatctgttcttttctgaaggaaaattgttttcgcaactctccaatcaaggtgatcaaggtggtgaaaggtggaagtagtgccaagggtacggcactgcgcggaaggtccgatgccgacttagtcgttttcctgtcatgcttcagtcaattcactgaacagggcaataagcgcgctgagattatttccgaaattcgcgctcagctcgaagcctgtcaacaggagcgtcagttcgaggtgaaattcgaggtttccaagtgggaaaatcccagggtattatcattcagcttgacgtcccagacaatgctggaccagagcgtcgatttcgatgtattaccggccttcgacgccctggggcaattggttagcgggtcaaggccatcaagccaagtgtatgtcgacctgatccactcctactcaaacgcaggagaatactctacttgctttaccgagctgcagcgggacttcatcatctcacgccctactaagcttaagtccctcattagacttgtaaaacattggtaccagcagtgtacaaagatctctaagggccgcggcagtctccctccgcaacatggcctggagcttctaacagtttatgcctgggagcaggggggaaaggactcacaatttaacatggcagagggcttcagaacagtcttagaattggtgacacagtatcgtcagctgtgtatctactggaccatcaactataacgctaaggacaagaccgtgggggacttcctaaaacaacagctgcaaaaaccccggccaattattctggaccctgccgatcctactgggaatttgggccacaatgccaggtgggatcttctggcaaaagaagccgccgcttgcacctctgctctgtgttgcatggggaggaatggtatcccaatacagccctggcccgttaaggcggcagtttag

SEQ ID NO: 177290 - DNA, 1545 bp, synthetic construct
  misc_feature 1..1545: note = Description of Artificial Sequence: Synthetic coding sequence
  source 1..1545: mol_type = other DNA
atggccctgatgcaggagctgtacagcacccccgccagccggctggactccttcgttgcgcagtggttgcagcctcacagggagtggaaagaggaagtgctggatgcagtacggacggtcgaagaattccttaggcaggaacattttcagggaaagcgcgggctagatcaggacgtgcgggtgctgaaggtggtgaaagttggaagctttggaaatggaacagttctgagatctaccagagaggtcgagttagtagccttcctttcttgcttccactcttttcaggaagccgccaagcaccacaaagacgttctcaggctgatctggaagacgatgtggcagagccaagacctcctggatctaggtctggaggacctgcggatggagcagagggtcccagatgccctggtcttcactatccaaacacggggcaccgctgagcccatcaccgtcacaattgtgccggcctacagggccctgggtccatccctccccaattcacagcctccccctgaagtgtacgtgtccttgatcaaagcctgtggagggccaggaaacttttgcccaagtttttcggagctgcagaggaatttcgtcaaacaccggcctactaaactcaaaagtcttttaagattggtcaaacactggtaccagcagtacgttaaggctaggagtccgcgggccaatctcccccctctttacgctctagaactcctgacaatatacgcttgggagatgggcaccgaggaggacgagaacttcatgttggacgaaggtttcacgacagtcatggacctgctccttgagtacgaagtcatttgcatctattggactaagtactatactctccacaacgccattatcgaagactgtgtgcggaagcaactgaagaaagaacgaccgataattctggacccagcagaccccactttgaacgtggctgaaggttacagatgggatatagtggcacaacgagcgtcacaatgcttgaagcaagattgttgttatgataatcgagagaaccccattagcagctggaacgtcaaacgtgcccgagatattcacctaacggttgaacaacgggggtatccagattttaaccttatcgtgaacccatatgagccgattaggaaggtgaaagaaaagatcagaagaacaagggggtattcggggctacagaggttgtcctttcaggtccccggctcagaaaggcagctgctcagctcgagatgttctctggccaagtacgggattttcagtcacacccacatttacctgcttgaaactatcccctcagaaattcaggtgttcgtgaaaaatcccgacggtgggagctacgcatacgcaatcaacccaaatagttttatcttaggcctcaagcaacaaattgaagaccaacaaggacttccaaaaaagcagcagcagcttgagtttcagggccaggtgctgcaagactggctcggcctcgggatctatggcatccaggactcggacacactgatattgtctaagaaaaagggtgaagctctatttcccgcttcctag

SEQ ID NO: 177291 - DNA, 768 bp, synthetic construct
  misc_feature 1..768: note = Description of Artificial Sequence: Synthetic coding sequence
  source 1..768: mol_type = other DNA
atggccctgatgcaggagctgtacagcacccccgccagccggctggactctttcgtggctcagtggctacaaccccatcgggagtggaaagaggaagttctggacgcagtaaggactgtggaagagttccttcgccaggagcactttcaggggaaacggggccttgatcaggacgtccgggtgctgaaggtcgtgaaagtgggttcgtttggcaatggaaccgtcctacgatccactcgggaagttgaacttgttgcttttctgtcatgctttcactccttccaagaagccgccaaacatcataaggacgttctgaggctgatatggaaaacaatgtggcagagtcaggacctactggaccttgggctggaagaccttaggatggagcagagagtccccgacgctctggtgttcaccatccagacgcggggcacggccgagcccattactgttacaatcgtccctgcctacagagcactcggcccttccctccccaattcccaaccgcctccagaagtgtatgtgagtttaatcaaggcatgcgggggacccggaaacttttgccctagttttagcgaactacagagaaactttgtaaaacaccggccgaccaaactaaagtcactgttgcgactagtgaaacattggtaccagcaagcacatcatcctggatcgggaaggccccacccacaacgcggaagaagggtgcagatggggcatagatgttccgagggattgcccgtgcctgaaaccgggcttctgctatag

SEQ ID NO: 177292 - DNA, 1737 bp, synthetic construct
  misc_feature 1..1737: note = Description of Artificial Sequence: Synthetic coding sequence
  source 1..1737: mol_type = other DNA
atgcccgacagcaacttcgccgagcggagcgaggagcaggtgagcggcgctaaagttatcgctcaagcccttaagacgcaagacgtggagtacattttcggaattgttgggattcccgtgacagaaatcgctatagcggctcagcagctgggaatcaagtacattgggatgcgcaacgagcaggccgcatgctatgccgccagcgcaatcgggtatctgactagcagacctggcgtgtgtctggtcgtgagcgggccaggtctgatacacgcactcggcggaatggctaatgcgaacatgaactgttggccactgctggtgatcggagggtcatcagagcggaaccaggaaacaatgggggctttccaggagtttcctcaggttgaggcctgccggttgtataccaagttttcagcccgccccagttccatcgaggccatcccctttgtcattgaaaaggccgtgcgcagtagcatctacgggaggcccggggcttgctacgtggatatccctgccgactttgtgaacctgcaggtaaacgtcaacagcatcaaatacatggaacggtgcatgagcccacccatatctatggcggagacctccgcggtttgtaccgcggcgtcagtgataagaaacgccaagcagcccctgctcattatcggcaagggtgctgcgtacgcacacgccgaagagtcaatcaagaagctggtggaacagtataagttgccattcttaccgactcccatgggtaaaggagtcgtgccagacaatcatccctattgcgttggcgctgcaagatcacgcgctctgcagttcgcggatgtgattgttctgttcggcgcccgcttaaactggattctccatttcggcctcccaccacggtaccagccagacgttaaattcatacaggtggacatttgtgcagaagagctggggaacaatgtgaaaccggccgtgactctgctaggcaatatacatgccgtcaccaagcaactcttagaggagcttgacaagaccccgtggcaatacccccctgaaagcaaatggtggaaaacactgcgggaaaaaatgaaatccaatgaagccgcttcaaaagaactggcgtctaagaagagtctgccaatgaattattatactgtgttctaccatgtgcaggaacagttgccgagggattgcttcgtggtctcagaaggggctaacaccatggatattggccgcaccgtgttacagaattacctgccacggcaccgccttgacgccgggacattcgggactatgggagttgggctcggcttcgccatcgcggctgccgttgtagccaaggacaggagtcccggtcaatggatcatttgtgttgaaggagatagcgcctttggattttccggcatggaggtggaaaccatttgtagatataatctacctattattctcctggtggtcaataacaatggcatttatcaagggttcgacaccgacacttggaaggaaatgcttaagtttcaggatgccactgcagtagttcctccaatgtgtctgcttcccaacagtcattatgaacaagtcatgacagcatttggaggcaaggggtactttgtccagactcccgaggagctccagaagagtctgagacagtcccttgcagataccacaaagccctccctcatcaacatcatgatcgagcctcaggccacccgcaaggctcaagacttccactggttgaccagaagcaacatgtag

SEQ ID NO: 177293 - DNA, 1563 bp, synthetic construct
  misc_feature 1..1563: note = Description of Artificial Sequence: Synthetic coding sequence
  source 1..1563: mol_type = other DNA
atgcccggcagcctgcccctgaacgccgaggcctgctggcccaaggatgtgggcattgtcgcactggagatctacttcccatcacagtatgtggatcaggccgagcttgaaaagtacgacggcgttgacgccggtaaatatactattggtctggggcaggctaaaatggggttttgcactgatagagaggatatcaattcactatgcatgaccgttgtacagaatctcatggagcgaaacaacttgtcatacgactgcatcgggcgcctggaggtgggaacagaaactatcattgataagtcaaaatccgtcaagactaacctgatgcagctttttgaagagtctggtaacactgacattgaaggcatcgacacaactaacgcctgctatgggggcacagccgctgtctttaatgcagtgaattggatagagtcaagttcttgggacggcagatacgccttggttgtggcgggggacattgcggtctacgcgactggcaacgctcggccaaccggaggtgtgggagctgtcgccctgctgattgggccgaacgcccctttgatctttgaacgtggactccgcggcactcatatgcaacacgcgtatgacttttataagcccgatatgctgtctgaatatcctatcgtcgatgggaagctctccatccagtgctacctgtccgctttggaccgctgttacagcgtgtattgcaaaaaaattcatgcccagtggcagaaggagggcaatgacaaggatttcacgctaaatgactttggatttatgatctttcactccccttactgtaagctggttcagaaatctttggcaagaatgctcttgaatgactttctcaacgaccagaatagagataaaaactccatctactctgggctggaggccttcggtgacgtgaagcttgaggacacctactttgaccgggacgttgagaaagcctttatgaaggcctcgagtgagctgttttctcagaagacgaaagccagcttactggtcagtaatcagaatggaaatatgtacacctcatccgtgtacggatcactggcctcagtgctggctcagtatagtccccagcagcttgccggcaaacgaattggggtcttcagctatggttcaggcctggccgctaccctctactctctgaaagtcacgcaggatgcgaccccaggcagcgcgttggacaaaatcactgcatccctatgtgacttaaaaagccgactagacagtaggaccggcgtcgcacctgacgtcttcgctgaaaacatgaaacttcgcgaggatacccaccacctagtaaattacattccccagggctcaattgactcactgttcgaaggaacatggtatctcgtgcgtgttgacgaaaagcataggcgaacttatgcgcggcggccgactcccaatgatgacactctggacgagggagttggccttgtgcactcgaacatcgccacggagcatatcccttctcctgccaagaaagtccccagattaccagctactgcagctgagcctgaggccgccgtgatttcaaacggggagcactag

SEQ ID NO: 177294 - DNA, 1563 bp, synthetic construct
  misc_feature 1..1563: note = Description of Artificial Sequence: Synthetic coding sequence
  source 1..1563: mol_type = other DNA
atgcccggcagcctgcccctgaacgccgaggcctgctggcccaaggatgtgggcattgtggccctcgaaatttatttcccatcgcagtacgtggaccaggcagagctcgaaaagtatgacggtgtggatgctggtaagtataccattggcctcggacaggccaaaatgggattctgcaccgatcgagaagacatcaactcactgtgcatgacagttgtgcagaatctgatggaaaggaataatttgagttatgattgtataggtcgactggaggtgggaacagaaacaatcatcgacaagtccaagtctgtgaaaacgaatcttatgcaactgttcgaggaatccggcaatacggatatcgaagggatcgataccacaaacgcatgttacggtgggacagccgcggtctttaacgctgtcaactggattgagtcctcttcttgggacggccgttatgcactggtagtggctggagacattgcagtatacgccacgggaaacgcacgccctaccggcggggtgggggccgtggctttgttgattggccccaacgctcctctgattttcgaacggggactcagaggaactcatatgcaacatgcatacgatttctataaacccgacatgctctccgagtatcctattgtcgatggaaagctgagtatccagtgctacttaagtgctctggatcgttgttactcggtgtattgcaagaaaatccacgcgcagtggcaaaaggaggggaacgataaagattttactcttaatgattttggctttatgatatttcacagtccctattgcaagcttgtgcagaagtcactcgcgaggatgctgctgaacgacttcctaaacgatcagaaccgggacaagaacagtatttatagcgggttggaagcctttggcgatgtaaaactggaggacacatactttgatagagatgtggagaaagcctttatgaaagccagcagtgagctgttttcacagaaaactaaagccagtctgctcgtgtccaaccagaatggaaatatgtacacaagctccgtgtacggaagccttgcttcggtgctggctcagtactccccgcaacagctcgcaggaaagcggatcggtgtgtttagctacggctccgggttagccgctacgctgtactcactcaaggtaacccaagacgcgactccgggaagcgcactggataaaatcaccgcctctctttgtgatctgaaatctaggcttgactcaagaaccggagtggcgcccgacgtctttgccgagaatatgaagctgcgggaggatacacatcatctagtgaattacattccacaaggatctatagactcgctgtttgaaggaacttggtatctggtgcgagtagacgagaagcatcggcggacgtacgcccgacgtcctacccccaacgatgacactctggacgagggagttgggctggtccattctaatatcgcaactgagcatatacctagccccgcgaaaaaggtcccgagactgccggcgaccgccgcagaaccagaagcggcggtgatcagcaatggcgaacattag

SEQ ID NO: 177295 - DNA, 291 bp, synthetic construct
  misc_feature 1..291: note = Description of Artificial Sequence: Synthetic coding sequence
  source 1..291: mol_type = other DNA
atgcccggcagcctgcccctgaacgccgaggcctgctggcccaaggacgtgggcattgtggctctagagatctatttcccctcccaatacgtggaccaggcagaacttgagaagtacgatggcgtggatgccgggaagtacacaataggcctcgggcaagcgaaaatgggattctgtacggatagagaggacataaactccctctgcatgaccgtggtacaaaatcttatggagagaaacaatttatcttacgactgcatcggcagacttgaggttggaaccgaaacgtag

SEQ ID NO: 177296 - DNA, 1530 bp, synthetic construct
  misc_feature 1..1530: note = Description of Artificial Sequence: Synthetic coding sequence
  source 1..1530: mol_type = other DNA
atgcccggcagcctgcccctgaacgccgaggcctgctggcccaaggatgtggggatagtcgcactcgagatttatttcccgagccagtacgtagaccaggccgaactggagaagtatgatggcgtggacgcagggaagtatactatcggcttaggccaggcaaaaatgggtttctgcaccgacagggaggatatcaattccctgtgtatgacggtagtgcagaacttaatggagcgcaacaatctgtcttacgattgtatcggacgccttgaggttggaaccgagaccataatcgataagtctaagagtgtgaagactaacctgatgcagctcttcgaagagtcagggaataccgacatcgaaggaattgacacaacgaatgcagttaactggattgaatcatccagctgggatgggaggtacgccctggtggttgcaggagatattgcggtgtacgccacggggaacgcacgccctacgggcggggtaggggcagttgcactcctgatcggacctaatgcccccctgatcttcgagcgagggttgagagggactcatatgcaacatgcgtacgacttttataagccagatatgctgtcggagtaccctatcgtcgacggaaagctgagcattcagtgctacctgagtgcgctcgatcggtgctattctgtatactgcaaaaagattcacgcccaatggcaaaaggagggcaatgataaagatttcaccctcaacgacttcggcttcatgatctttcactcaccttactgtaagctggttcagaagtctctggcaagaatgctgctaaacgatttcttgaatgaccagaaccgggacaagaacagcatttacagcgggctcgaggcctttggtgatgtaaagctggaagacacctatttcgatcgggacgtcgagaaagcattcatgaaagcaagcagtgagctgttctcccagaaaacaaaggcgagtctgctcgtaagcaatcagaatggaaacatgtatacctccagtgtgtatgggagtcttgcctccgtgctggcacaatactcccctcagcagctagcgggtaagcgtataggagtgttcagctacgggtccgggctggccgcaacactatactctctcaaagtcacacaagatgccacccccgggagcgctctcgataaaatcactgcttcactctgtgacttgaaaagtagactggactcccggactggagtcgcaccagatgtgtttgcggagaacatgaagctgagagaggacacgcatcatctggtcaactacattcctcagggcagtatcgattctctctttgaaggcacatggtatctggtgcgggtcgatgagaaacataggcgaacctatgccaggcggcctaccccaaacgatgataccttggacgaaggtgtcgggttagtgcacagcaatattgccaccgagcatattccctcaccagccaagaaagtgccccgcctgccagctactgctgcggagccagaggctgcagttattagcaatggtgaacactag

SEQ ID NO: 177297 - DNA, 1527 bp, synthetic construct
  misc_feature 1..1527: note = Description of Artificial Sequence: Synthetic coding sequence
  source 1..1527: mol_type = other DNA
atgcagcggctgctgacccccgtgaagcggatcctgcagctgacccgggccgtccaggagacaagcttaacaccggcccgactgctacccgtagcacatcagagattcagcacagcgagcgctgtacctcttgccaaaaccgatacgtggcccaaagatgttggcattctggctctggaggtgtactttcctgcacagtacgtagaccagactgatctggagaaatataataacgtcgaggccggtaaatacacagtggggctgggacagacaaggatggggttctgctccgtgcaagaggatataaattcactatgcctgacagttgtgcaacgccttatggaacgtattcaattgccctgggacagcgttggccgcctggaagtcggtacggaaacaatcatcgacaagagcaaagcagttaagactgtgcttatggagctttttcaagatagcggaaacacggacatcgagggaatagacacaacaaacgcctgctatggcggaacagcctcactgttcaacgcagcaaattggatggaaagcagctcttgggatggtcggtacgcaatggtggtgtgcggagatatcgctgtataccctagcgggaatgctagacctaccggcggagccggagccgtagctatgctgatcgggcccaaggcccccctggcactggagagagggctccgcggcacacatatggagaacgtgtacgacttctataagcccaatctcgccagtgagtatccaatcgtggacggcaagctttctatccaatgttatctccgtgcactggatcgctgttacacgtcttaccgaaagaaaatccagaatcagtggaagcaagcgggctccgataggccttttaccctggatgacctccagtatatgatcttccatacacccttctgtaagatggtccaaaagtcacttgctagactaatgttcaatgacttcctctcagcttcatccgatacccaaacatcactgtataagggattagaggcctttggaggtttgaagttagaggatacttacaccaacaaggacctcgataaggctctcctcaaggccagccaggacatgtttgacaagaaaaccaaggcgtccctatacctgagtacccataatgggaacatgtacacgagctcattgtatggatgcttagccagcttactcagccaccactcggcgcaggaactggcaggtagtcgcatcggtgcgttttcttacgggagtggtctggccgcttcctttttctccttccgcgtcagccaagacgccgcgcccggatctccactcgataaacttgtatcctcaacatctgacctgccaaagcgactggctagcaggaagtgtgtctctcctgaggagtttaccgaaatcatgaaccagcgcgagcagttttatcataaggtgaatttctcacctcccggtgatacaaactcacttttccctgggacgtggtatctagagcgtgttgatgagcagcatcgccggaagtacgcccgtaggcccgtctag

SEQ ID NO: 177298 - DNA, 1401 bp, synthetic construct
  misc_feature 1..1401: note = Description of Artificial Sequence: Synthetic coding sequence
  source 1..1401: mol_type = other DNA
atgcagcggctgctgacccccgtgaagcggatcctgcagctgaccagagcggtgcaggaaacttctctgaccccagcacgccttcttcccgtcgctcatcagcggttctccaccgcctccgcagtccctctcgcaaagactgacacatggcctaaggacgtgggaattctagctctggaggtgtactttccagcacagtacgtggaccagactgaccttgaaaagtacaataatgtagaggctggcaagtataccgttggtttgggccagactaggatggggttctgctccgtccaggaagatatcaactctctttgtctgactgtcgtgcagagactcatggagcgcatacagctgccttgggacagcgtgggccgtctggaagtcggtactgagacaattatcgataagagtaaggcagtgaaaacggtcctcatggagctgttccaagattccggcaatacagatatcgaagggattgacacgactaacgcttgttatgggggcacagcaagcttatttaacgctgcaaactggatggagtctagctcatgggacgggcttagggggacacatatggaaaacgtctacgatttctacaaacctaacttggccagcgaatacccgatcgtcgatggcaaattgtccattcagtgttatcttcgggccctcgatcggtgctatacttcgtaccggaagaagatacagaaccagtggaagcaggcagggtccgatagaccatttactctggacgacttgcagtatatgatcttccatactccattttgcaaaatggtccagaagtccctcgccagactcatgttcaatgactttctaagcgcctcatctgacacccagacaagtttatataaaggcttggaggcctttggaggcttaaagttggaagatacgtataccaacaaagacctggataaagccctcctaaaagccagccaagacatgtttgataagaaaactaaggccagcctctacctgagcacccataatggaaatatgtacaccagtagcctttacggatgtctggcttcattgctgagccatcactccgcgcaagagctggctggaagcaggatcggagcattttcctacggcagcgggctagccgcgagcttcttctcctttagggtgtcccaggacgccgcaccaggttcccccctcgacaagctggtgtcgtccacaagtgatctgcctaaaagactggcctcacgaaaatgcgtgtccccagaagagttcaccgaaattatgaatcaacgtgagcaattctaccataaagtcaattttagccctccgggagacacaaactcactgtttcctgggacctggtacctggaacgggtggatgagcagcacagaagaaagtatgcccgccgccccgtttag

SEQ ID NO: 177299 - DNA, 1161 bp, synthetic construct
  misc_feature 1..1161: note = Description of Artificial Sequence: Synthetic coding sequence
  source 1..1161: mol_type = other DNA
atgggccagcgggagatgtggcggctgatgagccggttcaacgcctttaaacgaaccaatacaatcctccatcacttacgcatgtccaaacatacggacgcagccgaagaggtcttgctggagaagaaggggtgcaccggggtcatcacactgaaccgaccgaagtttctgaacgccttgaccttgaacatgatccggcaaatctatccacaacttaagaagtgggaacaggatcctgagacctttctgattattattaagggcgccggaggaaaagcgttctgtgccggaggtgatattagagttattagcgaggccgagaaggccaaacaaaaaattgcacccgtgttcttccgcgaggagtatatgctcaacaacgccgttggatcatgtcagaagccctacgttgctctgatccatggcatcacgatgggtggcggcgtgggactttcggttcacggacagttccgggtggcgacagagaagtgtctcttcgcaatgcccgaaactgccatagggctttttcctgatgtcggtggcggttacttccttcctcggctgcagggaaaactgggatatttcctggctctcaccgggtttaggttaaagggcagagacgtgtacagggcagggatagccacacacttcgtagattccgaaaagctcgccatgctggaggaagacctgcttgcattgaagtctccctcaaaggagaacatcgcctcggtgcttgaaaactatcataccgagtcaaaaattgatcgagataagtccttcattctggaagagcacatggataaaattaatagctgcttcagcgccaacaccgttgaagagattatcgagaacctacagcaggatggttcatccttcgccctcgaacagcttaaggttatcaataagatgtcccctacctccttgaaaataaccctcagacagctcatggaaggctcaagcaagactttgcaagaggtgctcacgatggagtaccgtttgtctcaggcttgcatgcgaggacacgatttccacgaaggagtgagggccgtgcttatcgataaagaccagtcccccaagtggaagcctgcagacctcaaggaggtgaccgaggaagatttgaacaaccacttcaagtcccttggctcaagtgacctcaagttttag

SEQ ID NO: 177300 - DNA, 1017 bp, synthetic construct
  misc_feature 1..1017: note = Description of Artificial Sequence: Synthetic coding sequence
  source 1..1017: mol_type = other DNA
atgggccagcgggagatgtggcggctgatgagccggttcaacgcctttaagcggacaaatacaatcttacatcatctgagaatgtccaagcacacagacgcggcagaggaggtcctgctcgagaagaaggggtgcacaggagtgatcaccctgaaccggcctaagttcctgaacgccctaacgctgaatatgattcggcagatttatcctcaactgaaaaaatgggagcaggatcctgagactttcctcattattatcaaaggggcaggaggaaaagccttctgtgcgggtggtgatatacgggtcatctcagaggccgagaaggcgaagcagaagattgcccccgtcttcttccgcgaggaatacatgttgaacaacgctgtaggatcctgccaaaaaccatatgtggcccttatccacggtattaccatgggtgggggcgtgggcctgagcgtgcatggacaatttagggttgctacagaaaaatgtctctttgcaatgcccgaaacagctatagggctgtttccggacgtgggcggcggctattttctgcctaggctgcaaggaaagctaggctattttttagctcttactggcttccgcttgaaagggagggacgtatatagggctggtatcgcgacccattttgtggacagcgagaagctggctatgcttgaggaggatctgttagctcttaagtccccttccaaggagaacattgcaagtgtcttagaaaactatcatacggaatctaaaatagaccgagataagagctttattctggaagagcacatggacaagattaactcatgcttttctgccaataccgttgaggagattatcgaaaacctccaacaagacggctccagttttgccctggagcagttgaaagtgatcaacaagatgagtccgacctccctgaagataactctgcgccagctcatggaagggtcttctaagacgttgcaggaggtgttgactatggagtacagactctcacaggcatgtatgttctag

SEQ ID NO: 177301 - DNA, 117 bp, synthetic construct
  misc_feature 1..117: note = Description of Artificial Sequence: Synthetic coding sequence
  source 1..117: mol_type = other DNA
tgactgatcgacaaggaccagagccccaagtggaagcccgccgacctcaaggaggttacagaggaggacctaaataatcactttaagtcactcggctcctcagatctgaaattctag

SEQ ID NO: 177302 - DNA, 903 bp, synthetic construct
  misc_feature 1..903: note = Description of Artificial Sequence: Synthetic coding sequence
  source 1..903: mol_type = other DNA
atgggcaccctgcccaagcgggtgaagatcgtggaggtgggcccccgcgatggcctgcagaacgagaagaatatcgtgtcaacccccgtcaagattaaactgattgatatgctgagtgaagcgggtttgagcgtgatcgaaaccacgtccttcgtctcgccaaagtgggtgccgcaaatgggtgaccacacagaggtgctgaaaggaattcagaaatttcccggtattaattacccagtcctgacgccaaacctcaagggctttgaggccgccgtcgccgccggggccaaagaggtggtgatcttcggcgcggcaagtgaattatttactaaaaagaatatcaactgcagcattgaagagagctttcagagattcgatgcaatcctgaaagctgcccagtcagcgaatatatccgtgagaggctacgtcagttgcgcactcggatgtccgtacgaaggcaagatctccccagccaaggtggccgaagtgacaaaaaagttctacagcatgggatgttacgaaatatcactgggggacacaattggcgtcggtacccctggcatcatgaaggatatgctgtctgctgtcatgcaggaggtacctctggctgctctggcggttcattgccatgacacgtacgggcaggctctggctaataccttgatggccctccagatgggtgtgtccgttgtggactcttctgttgcgggcctgggcggctgcccctacgcccagggcgcctccggcaaccttgcaacggaggacctcgtatatatgcttgagggattgggcattcacaccggcgtgaatctgcagaaattgttagaagctggtaatttcatatgtcaggctctgaatcggaagacgtcatctaaggtggcgcaagccacctgcaaactttag

SEQ ID NO: 177303 - DNA, 978 bp, synthetic construct
  misc_feature 1..978: note = Description of Artificial Sequence: Synthetic coding sequence
  source 1..978: mol_type = other DNA
atggccgccatgcggaaggccctgccccggcggctggtgggcctggcttccctacgtgccgtttccacctcctccatgggaacactgccgaaaagggttaaaattgttgaggttggccccagagacggcctccagaacgagaaaaatattgtgagcactccggtgaaaatcaagctgatcgacatgctgtctgaggctggcctttccgtgattgagaccactagctttgtctctcctaaatgggtgccgcaaatgggcgaccatacagaggtgctgaagggcattcagaagtttccaggaattaattatcctgtgctcacgcccaatctcaaagggtttgaagctgcagtcgcagccggcgcaaaggaggtcgtgatttttggtgcggcatcagagctgtttacgaagaagaatattaactgctcaatcgaagagtcgttccagaggttcgacgcgatcctgaaggctgctcagagcgcgaatatcagtgtgaggggttatgtttcctgcgcacttggctgtccgtacgaaggcaaaatttcgccagcaaaagttgctgaggtgacgaaaaaattctatagtatggggtgctacgaaatttctctgggggacaccatcggagtggggacaccgggtatcatgaaagacatgttaagcgccgtcatgcaggaggttccactggctgccttggcagtacattgtcatgacacttacggccaggcacttgccaatacattgatggctcttcaaatgggtgtctcagtggtcgattctagcgtagctggcctgggcgggtgtccatatgctcaaggcgcctctggtaatctcgcgaccgaggatctcgtttatatgctggaaggcttaggcattcacaccggggttaatctccaaaagttactcgaggccggcaacttcatatgccaagcactcaaccggaagactagtagcaaagtcgctcaggccacctgcaagctttag

SEQ ID NO: 177304 - DNA, 765 bp, synthetic construct
  misc_feature 1..765: note = Description of Artificial Sequence: Synthetic coding sequence
  source 1..765: mol_type = other DNA
atggccgccatgcggaaggccctgccccggcggctggtgggcctggcaagtctccgtgccgttagtacatcatcaatgggtactctgcccaagcgtgttaaaatcgtcgaggtaggccctcgggatggactgcagaacgagaaaaatatcgtgtccacaccagttaagataaagctgatcgacatgttgagtgaggctggcctatcggtcatagaaaccacatccttcgtcagccccaagtgggtaccccagatgggtgatcatacagaagtactaaagggcatccaaaagttcccaggcataaactatcccgtgctgacccccaacctcaaaggtttcgaggccgctgtaacaaagaagttctacagtatgggttgctacgagataagcttgggtgacacgattggcgtcggaacacctggcattatgaaagatatgttgtccgccgtcatgcaagaggtccctttggccgcactagctgtgcactgtcatgatacttatgggcaagcccttgcaaatacactcatggctctgcaaatgggcgtgtccgtcgtggatagctctgttgctggtctaggaggttgtccttacgctcagggcgcctccggcaatctggctaccgaggacctcgtctacatgctggagggtctgggcattcatacaggagtgaacttgcagaagcttctagaggccggtaatttcatttgccaggctctcaacagaaagactagcagtaaggtagcacaggcaacctgtaagctgtag

SEQ ID NO: 177305 - DNA, 501 bp, synthetic construct
  misc_feature 1..501: note = Description of Artificial Sequence: Synthetic coding sequence
  source 1..501: mol_type = other DNA
atgggcaccctgcccaagcgggtgaagatcgtggaggtgggccccagggacgggctccagaacgaaaaaaacattgtgtcaaccccagtaaaaattaagttgattgatatgctgtcggaggctggactgagcgtgatagaaaccacttctttcgtgagcccaaaatgggtgccacagatgggggatcatactgaggttctaaagggaattcaaaagttccctggtattaattaccctgtgttgacaccaaacttaaaggggtttgaggctgcaatgggagtatccgtcgtggacagctcagtggctgggctcggcggctgcccatatgcccagggtgcctcaggtaacctagcgactgaggacctcgtctacatgctcgaaggcttgggaatccacaccggcgtgaacctccaaaagctgctcgaggccggaaacttcatctgccaggcgctgaacaggaagacatcttccaaagttgcccaggcgacatgcaaactgtag

SEQ ID NO: 177306 - DNA, 1563 bp, synthetic construct
  misc_feature 1..1563: note = Description of Artificial Sequence: Synthetic coding sequence
  source 1..1563: mol_type = other DNA
atggccgccctgaagctgctgagcagcggcctgcggctgtgcgccagcgcacgcgggagtggggccacttggtacaagggctgtgtgtgctcattctctacctctgcccataggcacaccaagttctacaccgatcctgtggaggccgtgaaggatatcccagatggggcaacagtgctggtgggcggcttcggcctatgcgggattcctgagaacctgatagacgcattgctgaaaacgggcgttaagggcctgaccgcagtctcaaataatgccggcgttgataacttcgggttggggctgttgctgcggagcaaacagatcaaacgtatggtaagcagctatgtgggggaaaacgcagagtttgagaggcagtacctttccggcgagttggaagttgagttgaccccccagggaactcttgcggagcgaattagggccgggggagcgggggtcccagccttttatacacccaccgggtatggaacattagtgcaagaaggcggctcccccatcaaatacaacaaagacggttcagtcgcgatcgctagtaaacctagagaagttcgtgagttcaacgggcagcattttatccttgaagaggccattaccggggatttcgctctcgtgaaggcgtggaaggccgaccgggcggggaacgttattttccggaagagcgccaggaattttaacctgccaatgtgtaaggccgccgaaacaaccgtggttgaagtggaagaaatcgtcgacatcggcgccttcgcccccgaggatatccacattcctcagatttacgttcaccggctgataaaaggcgaaaagtacgagaaaagaattgagcgcttgtcaattcgaaaggaaggtgatggagaggccaagtccgctaaaccaggagatgacgtacgcgaacggatcatcaagagggccgccctggagttcgaggatgggatgtatgccaatttgggaataggtatccccctgctggcaagcaattttatatctcctaacataactgtgcatctgcagagcgagaacggggtcctgggattaggcccttatcctcgacagcacgaggctgacgctgacctaattaatgcaggaaaggaaacagtgacaattctgcctggtgcaagttttttttcctccgatgagtccttcgctatgattagaggagggcacgtggacctgaccatgctgggcgccatgcaggtgtcgaagtacggagacctcgcaaattggatgatccctggaaaaatggtcaaggggatgggcggagctatggacttggtgtcatctgctaagactaaggttgtggtgacaatggagcattctgctaagggcaatgctcacaaaatcatggagaagtgcacacttcccctgaccggtaaacaatgcgtgaatcgaattatcactgagaaggcagtcttcgacgtcgacaagaaaaagggactgaccctaatagagctttgggaagggctgactgtggacgatgtgcagaagtctaccggatgtgattttgcagtctcacccaaattgatgccgatgcagcagattgcgaactag

SEQ ID NO: 177307 - DNA, 1005 bp, synthetic construct
  misc_feature 1..1005: note = Description of Artificial Sequence: Synthetic coding sequence
  source 1..1005: mol_type = other DNA
atgatggtgcgggagttcaacggccagcacttcatcctggaggaggcaataactggcgacttcgcactggtaaaggcttggaaggccgatagagcgggaaatgttatcttcaggaaaagcgcacggaacttcaacttgccaatgtgcaaagctgccgaaacaacggtcgtggaggtggaagagatcgtggatatcggggcctttgcccctgaggacatccatatccctcaaatatatgtccaccggctgatcaagggagaaaagtacgaaaaacgcatcgagcggctcagtattcgcaaggagggcgacggcgaagcaaaatcagcgaaacctggagacgatgtgagagagcgtataatcaagagagcagctctggagtttgaggacggaatgtatgctaacttggggattggaatcccactcctcgcatcaaattttatcagcccgaacatcactgtgcatctccagagtgagaatggcgtgctcgggctgggcccgtaccctcggcagcacgaggccgacgccgacctgattaacgccggcaaggaaaccgttacgatcctccccggggcttcctttttctcttctgacgaaagctttgcaatgattcgcggcgggcacgtggacctcactatgctcggcgccatgcaagtctccaagtatggcgacctggccaactggatgatacctggcaagatggttaaagggatgggtggcgctatggatcttgtgtccagtgcaaaaaccaaagtggtggtaacgatggaacattcagcaaagggcaacgcccataaaattatggaaaaatgtacactccccttgactggcaaacagtgcgtcaataggattatcacagagaaggctgttttcgacgtagataagaagaagggcctaactctcattgagttgtgggaggggttgactgtcgacgacgttcagaagtcaacaggatgtgatttcgccgtttcaccaaaacttatgccaatgcagcagattgccaattag

SEQ ID NO: 177308 - DNA, 372 bp, synthetic construct
  misc_feature 1..372: note = Description of Artificial Sequence: Synthetic coding sequence
  source 1..372: mol_type = other DNA
atgctgggcgccatgcaggtgagcaagtacggcgacctggccaactggatgatccccggcaaaatggttaagggaatgggtggggcgatggatttagtctcatcggccaagacaaaggtcgtggtgactatggaacactctgccaaaggtaatgcccacaagattatggaaaagtgtacgctgcccctcaccggcaagcagtgtgtcaaccgaataattaccgaaaaggctgttttcgacgtggacaaaaaaaaaggcctgacactgatcgaactgtgggagggacttacggtggatgatgtgcagaagagtaccggctgtgactttgcagtgagccccaagctgatgcctatgcagcagatcgcaaattag

SEQ ID NO: 177309 - DNA, 372 bp, synthetic construct
  misc_feature 1..372: note = Description of Artificial Sequence: Synthetic coding sequence
  source 1..372: mol_type = other DNA
atgctgggcgccatgcaggtgagcaagtacggcgacctggccaactggatgatccccggcaaaatggtgaagggcatgggaggggccatggatcttgtcagcagcgcaaagaccaaagtagtggtaactatggaacacagcgcgaagggtaacgcccacaagatcatggagaaatgtactcttccattaaccggaaagcagtgcgtgaaccggataattacagaaaaagctgtgttcgatgtggacaaaaagaagggcctcaccttgatagagctctgggaaggtctgaccgtggacgacgttcagaagtcgacaggatgtgattttgctgttagccccaaacttatgcctatgcagcaaattgccaattag

SEQ ID NO: 177310 - DNA, 453 bp, synthetic construct
  misc_feature 1..453: note = Description of Artificial Sequence: Synthetic coding sequence
  source 1..453: mol_type = other DNA
agcaacgcctacaaggtggacaacttcggcctgggcctgctgctgaggtcgaagcagattaagaggatggtgtcctcctacgttggggagaatgctgaattcgagcgccagtacctgagtggggagctggaagtcgaattaactccccaggggacacttgctgaacgtatccgagccggtggtgccggagtacccgccttctacacccctacgggctacgggaccctagtccaagaaggcggaagcccaataaagtacaacaaagacggcagtgtagcaatcgcgtcgaagcccagggaagtgagagagtttaacggacagcatttcatcctggaagaggccattactggagattttgctctcgtgaaggcctggaaggctgatcgggcgggaaacgtgatcttccgtaaatccgcccggaattttaatctcccaatgtgtaaagcagcttag

SEQ ID NO: 177311 - DNA, 1131 bp, synthetic construct
  misc_feature 1..1131: note = Description of Artificial Sequence: Synthetic coding sequence
  source 1..1131: mol_type = other DNA
atgagcaactgcctgcagaacttcctgaagatcaccagcacccggcttttgtgctccaggctgtgccagcagctgcggagcaaaagaaaatttttcgggacagttcctatatcacggcttcacaggcgcgtcgtgataactggaatcggactcgtgacgcctctgggcgtcggtacccacctggtctgggatagactgatcgggggggaatccggcattgtctcgctcgtcggagaggaatacaagtctattccctgttccgtggctgcctatgttcctagaggttcggatgaggggcagtttaacgaacaaaactttgtaagcaagagcgatattaagtctatgtcaagtccaaccataatggccattggagctgctgagttggccatgaaagacagtggatggcacccccagagtgaagccgaccaagtcgctacaggagtggcgatcggcatgggaatgattcctttagaagtagtgtcagaaacggcactgaatttccagacaaagggttacaacaaagtgtcgccctttttcgttccaaaaatcttggtcaatatggcagcaggacaggtatcaattcggtataaattaaagggaccgaaccatgccgtgtcaactgcctgtactactggagcacatgcagtcggagactctttccgtttcatcgcacatggggacgcgggtcatatcaccgcccccgatccggagggagagggagctctgaggtgcatggcggctgccctgaaggatgccggggttcagcccgaggaaatatcgtacatcaacgcgcatgctacctctacgcccctgggggatgctgcagaaaataaagccatcaaacacttatttaaagatcatgcatacgccctcgccgtaagctctaccaaaggggccaccggccacctgttaggggcggctggcgcagtagaggccgcctttacgacactagcatgctactaccagaaacttccaccgaccctgaatcttgattgcagcgaacctgagttcgatctcaactacgttcccttgaaagcccaagagtggaagactgagaagagattcattggcttgaccaactcttttgggtttggaggaactaatgccactctgtgcatcgccggcttatag

SEQ ID NO: 177312 - DNA, 1380 bp, synthetic construct
  misc_feature 1..1380: note = Description of Artificial Sequence: Synthetic coding sequence
  source 1..1380: mol_type = other DNA
atgagcaactgcctgcagaacttcctgaagatcaccagcacccggttgctatgctcgcggttatgccagcagttgcggagcaaaagaaagttttttggcaccgtgccgattagtcggttacacaggagagttgtcattactgggatcggtctggtgactccacttggagtcggcacccatctggtttgggatcgcctgatcggcggcgagtccggaatcgtgagcctagtgggcgaggaatataaatctatcccatgtagcgtggcggcatacgtgccgagggggtccgatgagggacagtttaacgaacagaattttgtgagcaagagcgacattaagagcatgagctcccctactattatggcaatcggagcggccgagctggctatgaaggattctggatggcatccccagtccgaagcggatcaagttgccacaggggtggcaataggaatgggcatgatccccttggaggttgtatcagagacagcacttaattttcaaacaaaggggtataacaaggtgagcccattcttcgtgccaaagatcctggtgaatatggcggccggtcaggtgtccattcgttacaaacttaaaggcccaaaccatgccgtcagcacagcttgtacgaccggcgctcatgcagttggggactctttcagattcattgcccacggcgatgccgacgtgatggtagctggtgggaccgatagctgcatatcaccactgtcactggcggggttcagccgggcaagagctctctccacaaacagtgaccctaagctggcatgcagacccttccacccgaaaagagatggattcgtgatgggcgagggcgccgccgtattggtcctggaggagtacgagcacgcagttcaacggcgagcccgcatctatgctgaagtgctgggctacgggctctctggcgacgcaggccacattaccgctcctgaccccgagggtgagggcgcgctgcgttgtatggctgctgctttgaaggatgccggggtgcagcccgaggaaatttcttacatcaatgcccatgccacctctactccactcggggatgccgccgagaataaggcgattaagcatctgttcaaggatcatgcctatgctctggcagtgtcttccaccaagggtgctacaggtcacttgctgggtgccgcaggcgccgtggaggccgcctttaccactctggcatgttactaccagaaactgccgcccaccctgaatcttgactgttccgagcccgagtttgatttaaactatgtgccactcaaggcgcaggagtggaaaaccgaaaaacgctttattggccttacgaactcttttggtttcggcggaacaaacgccactctgtgcatagccggtttgtag

SEQ ID NO: 177313 - DNA, 696 bp, synthetic construct
  misc_feature 1..696: note = Description of Artificial Sequence: Synthetic coding sequence
  source 1..696: mol_type = other DNA
atgagcaactgcctgcagaacttcctgaagatcaccagcacccggttgttatgttctcggctctgccagcagcttcggtcaaaacgtaagttttttggcacagttccaatatcacggttacaccggcgcgtggtcataacaggcataggcctggtcacacccctcggagtgggcacgcacttggtttgggatcggctcatcggtggagagtccggtatcgtttcattggtgggcgaggagtacaagagcatcccttgttcagtggccgcatacgttcccaggggctcagacgagggccagttcaatgaacaaaatttcgtctcgaagtccgatataaaatccatgtctagccctaccatcatggccataggggctgccgagctggccatgaaggactccggctggcatccacagtcggaggctgaccaagtggctacaggcgttgccatcggaatggggatgatcccgttggaggtggtttccgagaccgcactgaactttcaaaccaagggatacaacaaagttagcccgttctttgttccaaagatcctcgttaatatggcggccggccaggtgtctatcagatataaactgaaaggcccaaaccatgccgtttctactgcctgcaccactggcgctcatgctgtgggcgattccttccggttcattgcccatggcgatgccgacgtaatgtag

SEQ ID NO: 177314 - DNA, 663 bp, synthetic construct
  misc_feature 1..663: note = Description of Artificial Sequence: Synthetic coding sequence
  source 1..663: mol_type = other DNA
atgagcaactgcctgcagaacttcctgaagatcaccagcacccggctgctgtgctcacgcctttgccaacagctccgtagcaaacggaagttctttggcaccgtgcctatctcacgattgcatcgccgggtagtcataactggaatcggtctggtgacccctttgggcgttgggacccatctggtttgggaccgcctcatagggggagagtctgggatcgtgagcttggtgggcgaagaatataagagcatcccatgcagtgttgctgcgtacgttccaagaggatctgatgagggccagttcaatgaacagaacttcgtgtcaaagtcagatatcaaatccatgagtagccccactattatggccatcggggcggccgaactcgctatgaaggattcaggatggcacccccaatctgaggccgatcaggtggcaacaggagtggcaataggcatgggaatgattcccttagaagttgtgtctgagaccgccttgaactttcagaccaaaggctataataaggtcagccctttctttgtgcccaagattcttgtgaacatggctgccggacaagtttccattcggtacaaactcaagggacccaaccacgctgtatcaacggcttgtacaacaggggctcatgcagtcggagactccttttag

SEQ ID NO: 177315 - DNA, 1875 bp, synthetic construct
  misc_feature 1..1875: note = Description of Artificial Sequence: Synthetic coding sequence
  source 1..1875: mol_type = other DNA
atggagatccccggcagcctgtgcaagaaggtgaagctgagcaacaacgcgcagaattggggaatgcagagggccaccaatgtaacgtatcaggcccaccatgtcagcagaaataagagaggccaagttgtgggcacaagaggcggattcagaggatgtacggtgtggctaacaggactgagtggggcaggcaaaacgactgtgtcaatggccctcgaggaatacctcgtgtgccacggaattccctgctatacactggacggcgataacatacggcagggtctgaataaaaacctagggttctctccagaggatcgagaagaaaatgtgaggagaatagccgaggttgcaaaactgtttgcagatgccggccttgtgtgcatcaccagttttatttccccatatacccaagacagaaacaacgcccgacagattcatgagggtgcaagcctcccattcttcgaagtgttcgtagacgcccccctccacgtgtgcgaacaacgggacgtgaaggggctttacaaaaaagcccgcgccggcgagatcaaagggttcacgggtatcgactctgaatacgagaagccagaagctcctgagctcgtcctgaaaactgattcctgcgacgttaacgactgtgtacaacaggtagtcgagttactgcaggaaagagatatcgtgccagttgatgcatcctatgaagtgaaggagctctatgttcccgagaataaactccacctcgccaagacggatgcggagacccttcccgccctaaaaatcaacaaggtggacatgcagtgggtccaggtgctagcagaggggtgggctactccccttaatggatttatgagagaacgcgaatacctgcagtgtttgcatttcgattgccttctcgacggaggggtgatcaatctgtcggtgcccatcgtactgacagctacccatgaggataaggagcgcttagacgggtgcaccgcttttgcgctcatgtatgaaggccgccgggtcgcaatcttaagaaaccctgaatttttcgagcataggaaagaggagcgatgcgcacgacagtggggaactacatgcaagaaccatccctacattaaaatggtcatggaacagggtgactggttgataggcggagacctgcaagtgctcgatcgtgtttactggaacgatgggcttgatcagtatagactcacccccacagagcttaagcagaagttcaaggatatgaacgcagatgctgtatttgccttccagctgaggaatccggtacacaacgggcatgctctccttatgcaggacactcataagcagttgctagaaaggggttatcggcgcccagtcctcctgctgcatcccttaggagggtggacgaaggatgatgatgtccctctgatgtggcggatgaaacagcacgctgccgtgctggaggagggcgtactcaaccctgaaacaactgtggtggccatcttcccctcaccaatgatgtacgcaggtcctaccgaagtacagtggcactgtagagctcgaatggtggcaggggcaaatttttacatcgtgggaagagaccccgcaggcatgccgcaccctgagactggtaaggacctgtacgaacctagccacggggcaaaagtgctgaccatggcccccgggctgatcactcttgagattgtcccctttcgggtagccgcctataataagaaaaagaagagaatggactactacgactccgaacaccatgaggacttcgaatttatcagtggcaccagaatgaggaagctggccagagagggtcaaaagcctccagagggatttatggcccctaaagcatggacggtgctcactgagtactacaagtctcttgaaaaagcctag

SEQ ID NO: 177316 - DNA, 1845 bp, synthetic construct
  misc_feature 1..1845: note = Description of Artificial Sequence: Synthetic coding sequence
  source 1..1845: mol_type = other DNA
atgagcggcatcaagaagcagaagaccgagaaccagcagaagagcaccaatgtggtttaccaggcgcatcacgtatcacgaaacaagagagggcaggtggtgggaacgagaggaggatttcggggctgcacagtctggcttactggtctgagtggggctggcaagactactatttcttttgccctggaagaatacctcgtttcccatgcaatcccctgctattctttggatggggacaatgttagacacggtctgaaccgcaaccttggtttctcccctggtgacagagaagaaaacatccgacggattgccgaggtcgctaagctttttgcagatgcaggcctggtctgcatcacaagtttcatcagcccatttgcgaaggatagggagaatgccaggaagattcatgagtccgccggactaccattcttcgagatctttgtggatgctcccctgaatatctgcgagtcacgtgacgtgaaagggctctacaagagggcaagggcgggcgaaatcaagggattcacaggtatcgactccgattatgagaaaccagagaccccggaacgggttctgaaaacaaacctgtctactgtcagcgattgcgtccatcaagtggtggagctcttacaggaacagaatattgtgccttacactattatcaaggatattcacgagctgttcgtgcctgaaaacaaactggatcatgtgcgcgccgaagctgaaaccctgccatcactgtctattactaagctggacctgcagtgggtgcaggtgctttccgaaggctgggctactccccttaagggtttcatgagagagaaagaatacctgcaggtgatgcattttgacacccttctggacgacggtgtgattaacatgtctattcccattgtgttacccgtcagcgcagaagataagacgcgtctagagggctgttccaagttcgtgttagctcacggcgggcgccgagtggctattctgagggatgctgaattttatgaacaccgaaaggaagagcgctgctctcgagtctggggcaccacctgcacgaagcatccccacatcaagatggtcatggagtccggagactggttggtcgggggagacctgcaggtgctcgaaaaaataagatggaacgacgggctggaccagtaccggctcacacccctggagctgaagcagaagtgcaaggagatgaacgctgacgccgtcttcgcctttcagttaagaaaccccgtgcataacggacatgctctgctgatgcaggatactcgccggcggctgctggaacgaggttataagcatcccgttttgcttttacatccacttggcggctggaccaaagacgacgatgtccctctcgattggagaatgaagcaacatgccgctgttcttgaagaaggggtgctggatcccaaaagtacaatcgtggctatcttcccaagtcccatgttgtacgcaggccctaccgaggtgcagtggcactgccggtccagaatgatagccggcgctaacttttatatagtaggtagggaccccgccggaatgccacatcccgagacaaagaaagacctttacgaacctactcacggagggaaagttctgtctatggcccccggcctgactagcgtggagattattccgttcagggtggccgcctacaataaggccaaaaaggccatggacttctatgaccctgcaagacacaacgaatttgactttatttctggcacgcgcatgcgcaaacttgcccgggaaggcgaaaatccaccggacgggttcatggctccaaaagcatggaaggtgctcaccgattattaccgctcactggaaaagaactag

SEQ ID NO: 177317 - DNA, 1857 bp, synthetic construct
  misc_feature 1..1857: note = Description of Artificial Sequence: Synthetic coding sequence
  source 1..1857: mol_type = other DNA
agcggcaagaagcaggagaaggaggagaaccagcagaagagcaccaatgtagtataccaggctcaccacgtgagtcgcaataaacgagggcaggtggtgggtacccggggcggatttagaggctgcactgtgtggttgactggactgagtggtgcgggcaagacaaccatttcattcgcattggaggagtacttagtgagccacgccatcccctgctattcccttgacggcgataacgttcgacatgggctgaaccgcaatctaggcttcagccctggcgaccgggaggaaaacattcgtagaatcgcagaagtggccaaactgtttgccgatgccgggctggtatgcattacaagctttatctctcctttcgccaaggaccgtgagaatgctcgcaagattcacgaaagtgcaggactcccgttcttcgaaatttttgtcgatgctccattgaatatttgcgaaagccgcgatgtgaagggcctgtacaagcgggcacgcgccggcgaaatcaaagggttcacaggtatcgatagtgattatgagaaacctgaaacacccgagagagttctgaagacgaacttaagcactgtgtccgactgtgtccaccaggtagtggaacttcttcaggaacagaatattgtaccatacaccatcattaaggacatccacgaactgtttgtccccgaaaacaagcttgatcacgtgagagccgaagcggaaaccctcccgagtttatccatcacaaagcttgacctccagtgggtccaggtactgtccgagggctgggctacaccattaaaaggcttcatgcgcgagaaggaatacctgcaggtcatgcacttcgacacgctattggatggaatgtttctcctggatggagttatcaatatgagcatacccatcgttctacctgtaagcgcagaggataaaacgaggcttgagggatgctcaaaattcgtcctggcgcatgggggccgaagggtggccattctgcgggacgcggaattttatgagcatagaaaggaggagcgatgttcccgcgtatggggtacaacctgtacaaagcacccgcatatcaagatggtgatggaaagcggagattggttggtgggcggcgatctgcaagtattagaaaagattcgctggaacgatggactggatcaatataggttaacaccactcgagctcaaacagaaatgcaaggaaatgaatgcagacgctgtattcgcgtttcagctgcgcaacccggtgcacaacggtcatgctctgctgatgcaggatacacgccgccgcttgcttgaacgcggatataaacaccctgtcctcttgcttcacccactcgggggatggactaaggatgacgacgtgccccttgattggaggatgaaacaacacgccgctgtactagaggagggcgtcctggaccccaagtccacaatcgtggcaatcttcccctctccgatgctctatgccggccctacagaggtgcagtggcactgtcggtctcggatgattgccggcgcaaatttttatatcgtgggaagggatcccgcgggcatgccgcaccctgagactaagaaagatctttacgagcctactcacggggggaaggtgctttctatggcgcctggtttaacgtcagtggagatcattccttttcgcgtagcggcctacaataaggccaaaaaagctatggacttctacgatcctgctaggcacaacgagttcgactttatctccgggacacgcatgcgcaaattggccagggaaggggagaatccacctgacggctttatggccccaaaggcctggaaggtcctgactgattattaccgcagcctggaaaaaaactag

SEQ ID NO: 177318 - DNA, 1857 bp, synthetic construct
  misc_feature 1..1857: note = Description of Artificial Sequence: Synthetic coding sequence
  source 1..1857: mol_type = other DNA
atgatcgtgctggtgaccgagtgggtggacctgagcctggagaaccaacagaagtccacaaatgtagtgtatcaggcacaccacgtgagtcgaaacaaaagaggccaagtggtcggcaccaggggcggttttcggggctgcacagtatggcttaccggtctctcaggggcgggaaagactacgatatccttcgcattagaggaatacctagtctctcacgctattccctgttattctctcgacggcgacaatgtccgtcacggtctgaaccgcaacctcggattctctccgggcgatcgcgaggaaaacataaggcgaatagcagaggtggctaagctgttcgccgacgcagggttggtatgcatcacttccttcataagcccttttgccaaggaccgcgagaacgctcgtaagatacacgaatccgcaggattgcccttcttcgaaatctttgtggacgctccccttaatatctgcgaatcaagggacgtaaagggtttatataagagagctcgagcaggcgaaattaaagggtttacaggcatagactcagattacgagaaacctgaaacacccgagagagtgctcaaaacaaatctttcaacagtgtccgactgcgtgcatcaagtcgtcgagcttctgcaggagcaaaatatcgttccctacacaattatcaaggacattcatgaattattcgtgcctgaaaacaaactggatcatgtgagggcggaagccgagacactgccttctctctcaatcacaaaactggacctgcagtgggtccaggtgttgtccgaggggtgggctacgcccctgaaggggttcatgagagagaaggaatacctgcaagtaatgcacttcgacactctgcttgacgatggtgttataaatatgtcaatcccgattgtgttgccagtgtccgctgaagataagaccaggctggaagggtgttccaagttcgtgctcgctcacggaggtagacgcgttgcaattctccgcgatgctgagttctatgaacacagaaaggaagagcggtgttccagggtctggggaactacatgcactaagcaccctcatatcaaaatggtgatggagtctggcgactggttggtggggggcgacctacaggtacttgagaagatcaggtggaatgatggactggatcagtatcgcctgactccgcttgagcttaaacagaagtgtaaggagatgaatgcagatgcggtgttcgcgtttcagctgaggaatcccgtgcacaacggtcatgcactcctgatgcaggacacaaggagacgcctgcttgagagagggtataagcaccccgtcctgttactacaccctctaggtgggtggaccaaagatgatgacgtgcccctcgattggcgaatgaagcagcacgcggccgtgctcgaggagggtgtccttgaccccaagagcactatcgtggctatcttccccagccctatgctctacgccggacctacagaggtacagtggcactgtcggtcaaggatgatcgccggcgcaaacttctatattgtgggcagggatcctgcggggatgcctcaccccgagaccaaaaaagatttgtatgaacctacccacggtggaaaggtcctcagcatggcccccgggctcacatcagtcgaaatcatccccttccgagtagccgcttataacaaggcaaagaaagctatggatttttacgatcccgcaaggcacaatgaattcgactttattagcggaactcggatgagaaaactcgccagggagggcgaaaatccacctgacgggttcatggcccctaaggcctggaaagttctgaccgattattatcgaagcttagagaagaattag

SEQ ID NO: 177319 - DNA, 1860 bp, synthetic construct
  misc_feature 1..1860: note = Description of Artificial Sequence: Synthetic coding sequence
  source 1..1860: mol_type = other DNA
atgagcggcatcaagaagcagaagaccgagaaccagcagaagagcactaacgtagtatatcaggcccatcatgtctctcggaacaagaggggccaggtggtgggaacacgtggcggatttaggggatgcactgtgtggctgacgggactgagcggggcagggaaaaccaccatctcctttgcccttgaagaatatttagttagccatgcaataccttgttattctctcgacggagataatgtgaggcatggactgaacaggaacctcggtttttcgcctggagaccgcgaagagaacatccgacgcatcgccgaggtcgccaaattgtttgctgacgcaggcctggtctgtattacaagctttatctcaccctttgcaaaggaccgagagaacgccaggaaaatccacgaatctgctggactcccgttctttgagatctttgtggacgcccctctgaacatttgcgaatcacgggacgtaaagggtctgtacaaaagggcccgagcaggggagataaagggcttcacaggcatagattccgactacgagaagccagagaccccagagagggttctgaagaccaatctcagtaccgtgtccgattgtgtgcaccaggtagtggaacttctccaggaacagaatattgtgccttatacgattataaaagacatacatgagctctttgtccctgagaataagctggatcatgttcgcgccgaagcagaaaccctgccttctctgagtataacaaagttggacctgcagtgggtccaggtcctgtccgaaggttgggctactcctctcaagggttttatgcgagaaaaggagtacttgcaagtaatgcactttgacaccctgctggacggtatggcactgcccgacggcgtgatcaacatgtcgattcctattgtgctgccagttagcgctgaggataagacccggctcgaggggtgcagtaagtttgtcttggcccatgggggcagacgagtggcaattcttcgcgatgctgagttctatgaacacagaaaggaagagagatgttctagggtgtggggaacaacctgtaccaagcatccccacatcaagatggtgatggaatctggagattggttagtgggaggggacctgcaggtattggagaagatccgctggaatgacggcctggaccagtatagactgaccccgcttgagctgaagcagaagtgcaaggaaatgaatgccgacgctgttttcgctttccagctgcgcaacccagtgcacaatgggcatgctctcttgatgcaggacaccagacgcagattgctggaacgcgggtacaagcaccctgttctgctattacatccgctaggtggctggaccaaagacgacgacgtcccactggattggagaatgaaacagcatgccgccgtgctggaagagggcgtgcttgaccccaagagtactattgttgcaatttttccttccccaatgttgtacgccgggccgacagaagttcaatggcattgtcgatcacgcatgatcgctggggccaacttttacatcgtcggccgggaccccgctgggatgccccatccagaaactaagaaagatctatatgaaccaacacacggtggcaaggtgctgagcatggcccccggcctgacttccgtcgaaatcatcccatttagggtggctgcttacaacaaagctaaaaaagctatggatttttatgaccccgctcgacataacgagttcgattttatctcggggacaaggatgagaaaactggccagagaaggcgagaaccctcccgacggatttatggcaccaaaggcatggaaagtgctcactgattactatagaagcctggaaaagaactag

SEQ ID NO: 177320 - DNA, 1503 bp, synthetic construct
  misc_feature 1..1503: note = Description of Artificial Sequence: Synthetic coding sequence
  source 1..1503: mol_type = other DNA
atggccagcatgctgctggcccagcggctggcctgcagcttccagcacagctatcggctgctcgtgcccggttctaggcacatctcccaggctgctgccaaggtggacgtcgagtttgattacgacggcccgctgatgaaaaccgaagtaccaggcccgagaagccaagaactgatgaaacagctcaatatcatccagaatgctgaggcagtgcactttttttgtaactacgaggagtccagaggcaactatttggtagatgtcgatggaaaccgaatgttagatctttatagccagatcagttccgtccccattggttattcgcaccccgctttactcaaactgatccagcaaccacaaaatgccagtatgtttgtgaacaggccagctctgggcatactacctcctgaaaacttcgttgagaagcttagacaatccctgctttctgtggcacccaagggcatgtcacagctaattacaatggcctgtggaagttgctccaatgaaaatgcactgaaaacgatttttatgtggtatagatcgaaggagagaggtcagcggggattctcacaggaagaactggagacctgcatgattaaccaggcccctggatgtccggattattctatcctgagctttatgggcgcctttcacgggaggactatgggatgtctcgcaaccacgcattctaaggcgatccataaaatcgatattccatcgttcgactggcccattgctccgtttcctcgcttgaagtatcctctcgaagaattcgtgaaggaaaaccagcaggaagaagcacggtgtttggaggaagtggaagatctcattgtcaaatatagaaaaaaaaagaaaaccgtggctgggattattgtcgagcccatccagagcgaaggcggagacaaccatgctagcgatgatttttttaggaagctgcgcgatatcgcccggaaacacggctgcgccttcttggtggatgaagttcagactggcggcggatgtaccggcaagttttgggcacacgagcattggggactggatgatcccgctgatgtcatgaccttttctaagaagatgatgactgggggcttttttcataaagaagaattccgccccaatgccccttatcggatttttaacacatggcttggcgaccccagtaaaaacctgttgctggctgaagtgattaatataatcaaaagggaggacctgctcaacaacgcggcccacgccggcaaggccctacttacaggcctcctggatttgcaggcaaggtacccgcagtttatcagcagagtaagagggagaggtactttctgttccttcgacactcccgacgactcgataagaaataagctcatcctgattgccagaaacaagggcgtggttctgggtgggtgcggcgataaatctattagatttagacccacactcgtatttagggaccatcacgcacacctctttctgaacatctttagtgatattcttgcagactttaagtag

SEQ ID NO: 177321 - DNA, 1503 bp, synthetic construct
  misc_feature 1..1503: note = Description of Artificial Sequence: Synthetic coding sequence
  source 1..1503: mol_type = other DNA
atggccagcatgctgctggcccagcggctggcctgcagcttccagcactcataccgtctgctggtccccggctcgcgtcacatctcccaggccgccgctaaggtggacgtggaattcgattacgacggtccactgatgaagactgaagtgccgggaccacgttcccaagaacttatgaagcagctcaacataatacagaatgccgaagcagtgcattttttttgcaattatgaggaaagtaggggaaattacctcgtcgatgtggatgggaatcgcatgcttgacctgtatagccagatctcttccgtgccaatcggatattcacatccagccctcctcaagttgatccaacagccccagaacgcttccatgtttgtgaaccgcccagctctcggaatcctgccccccgagaattttgttgagaaactccgccaatctttactgagtgtggcaccgaaaggcatgtcgcagttaattacaatggcctgtggatcgtgctcaaacgagaacgctctgaagactatcttcatgtggtataggtctaaggagcgaggccagcggggtttcagtcaggaggagctggaaacttgtatgataaatcaggcgcctggttgcccagattactccattctatcctttatgggagctttccacggccgcaccatgggttgcctggcgaccacgcatagcaaagctattcataaaatagatattcctagtttcgattggccaattgccccctttccaagacttaaatacccactggaagagttcgttaaggaaaaccaacaagaagaggctaggtgtctggaggaggttgaagatttaattgtgaaatataggaaaaagaaaaagactgtagctgggataatcgtggaacctatccagtcggaaggaggcgataatcacgcctctgatgattttttccggaagctgcgggacatcgctagaaaacatggctgcgccttcctggtcgatgaagtgcaaaccgggggggggtgtactggaaagttttgggctcatgagcactggggactggatgatcccgccgacgtcatgacattctctaaaaaaatgatgaccggtggtttcttccacaaggaggagttccgccccaacgcaccatacagaatctttaacacatggctaggggacccctcaaagaacctcctcctggccgaggttattaatattatcaagagagaggatctgctgaataatgccgcccacgccggtaaggcactcctaaccggtttgctagatttgcaggcacgttacccccaatttatatcaagagtgcgaggtaggggtactttctgtagttttgacaccccagacgactccattaggaacaaactcattctgatcgccaggaataaaggcgtggtgctgggtggatgcggcgacaaaagcatccgttttaggcctacattggtgtttcgggaccaccacgcgcatctgtttctgaacatcttctctgacattttagcagacttcaagtag

SEQ ID NO: 177322 - DNA, 1503 bp, synthetic construct
  misc_feature 1..1503: note = Description of Artificial Sequence: Synthetic coding sequence
  source 1..1503: mol_type = other DNA
atggccagcatgctgctggcccagcggctggcctgcagcttccagcactcctaccggctgctagttccagggtcacggcacatcagccaggcagcggctaaagtggacgttgagttcgattatgatggccctctcatgaagaccgaggtacctggcccccggagccaggaactgatgaaacaacttaatatcatacagaacgcggaggccgtccactttttttgtaactatgaggaaagcagaggtaattaccttgtggacgttgacggcaacagaatgctagatctttacagtcagatctcctcagttcctattggctattcacatcccgcgctcctcaagttgatccagcagccccagaatgccagtatgtttgtgaacagacctgccctgggcatccttccaccggagaattttgtcgagaaactgagacagagcttgctgtcagtagcgcccaaaggcatgagccaactgattaccatggcttgtggctcctgctctaatgagaatgcgctaaaaactatatttatgtggtacaggtccaaagaacgcggccagcggggtttttctcaggaggagttagaaacctgcatgatcaaccaggcccccggatgtcccgactattccatcctatcctttatgggtgcctttcacgggcggaccatgggctgtcttgccaccacacattcaaaggctatccacaaaattgacataccaagttttgattggcctatagcccccttcccacgcctgaaatatccactggaagaatttgtgaaggagaatcagcaggaggaagcccgatgcctggaagaagtcgaagacctgattgtaaaatatagaaaaaagaaaaagactgtggccggaatcatcgtagagccaattcagtccgagggcggggataaccatgcctctgatgatttcttccgaaagctacgcgacattgcccgcaagcacggctgcgcctttcttgtcgatgaagttcagacaggtggaggatgcaccggaaaattctgggcacacgagcactggggccttgacgatcctgccgatgtcatgacgttctcaaagaaaatgatgacaggtggattcttccacaaggaagagtttaggcccaatgccccctaccggatattcaatacttggctcggcgatcctagcaagaatctgctgctggctgaggtgattaacatcattaaacgagaggatctattgaataacgccgcacacgcaggcaaagctttgttgacaggattgctggaccttcaggcacggtatccacagttcatctccagagtgaggggaagagggaccttttgttccttcgatacccccgacgactccattcgaaataaactgatattgattgctaggaacaagggagttgtcctgggtgggtgcggggacaagagtatccgatttaggccgacactggtgttccgggatcatcacgcacatctcttcctgaatatcttttccgacattctggccgacttcaagtag

SEQ ID NO: 177323 - DNA, 462 bp, synthetic construct
  misc_feature 1..462: note = Description of Artificial Sequence: Synthetic coding sequence
  source 1..462: mol_type = other DNA
gtggacatggacggcgtgctggccgacttcgaggccggcctgctgcgtgggttcagaaggaggtttcctgaagaaccccatgtgccattagaacaaagacgcggattcctggcacgggagcagtatagagcccttaggcccgatctggcagacaaggtcgcttcagtgtacgaggcccccggatttttccttgatcttgagccgattcctggagccttggatgcagtcagggaaatgaacgacttgccagatactcaggtttttatttgtacctcccctcttcttaagtatcaccactgtgttggcgaaaaggaggagacgcccagctgggaacacattctgtttacatgttgccacaatcgacacttggttctgccccctacaagacgcaggctgctctcctggtcggataactggcgagagatcttggacagcaagaggggcgccgcccaaagggagtag

SEQ ID NO: 177324 - DNA, 606 bp, synthetic construct
  misc_feature 1..606: note = Description of Artificial Sequence: Synthetic coding sequence
  source 1..606: mol_type = other DNA
atggcccggagcgtgcgggtgctggtggacatggacggcgtgctggcggactttgaggccggactgctccgcggtttcagacggcgctttcctgaggaaccacatgttccccttgaacaacgacgcggcttcctggcgagggaacaataccgcgccctgagaccagacttagcggataaggtggcttcggtctacgaagccccaggattctttttggatttagaaccaattccaggcgcgctcgatgctgtcagggaaatgaacgacctccctgacactcaagtgtttatatgcacctcacccctgctgaagtatcaccattgtgttggtgagaaataccgctgggtggagcagcacctcgggccgcagttcgtggaacgaatcatccttacacgggataagactgtggtgctgggagacctattaatagacgataaagacaccgtacgagggcaagaggagactccttcctgggaacacattcttttcacctgttgccataataggcacctagtgctgcctccaaccaggcgaaggctgctctcctggagcgacaattggagagagatattagacagtaaacggggtgccgctcagcgggagtag

SEQ ID NO: 177325 - DNA, 687 bp, synthetic construct
  misc_feature 1..687: note = Description of Artificial Sequence: Synthetic coding sequence
  source 1..687: mol_type = other DNA
atgatccggctgggcggctggtgcgcccggcggctgtgcagcgccgccgtgccggccggtcgccgaggggcagcgggaggtctcggtctggcaggaggtagagcgctccgggttttggtggatatggatggggtgctcgctgacttcgaaggaggtttcctcaggaagtttagggcccggttcccagatcagccttttatcgcgcttgaggacagacgaggcttctgggtttcagagcagtacgggagacttagaccgggactcagcgagaaagccataagcatctgggaatctaagaatttctttttcgagcttgagccccttccaggtgccgtggaggccgtgaaagagatggcttcactgcaaaacacagatgtattcatatgtacctcaccgataaaaatgtttaagtattgcccctacgagaagtacgcgtgggtagaaaagtattttgggccagattttctggaacagatcgttctgacccgcgataagactgtcgtgagtgcagacctccttattgatgaccggcccgatatcacgggcgcggagcccacccccagctgggaacacgtgctgtttacagcatgtcacaatcagcatctgcagcttcagcccccacggagacgtctgcactcatgggctgacgattggaaggccattctggactctaagagaccatgctag

SEQ ID NO: 177326 - DNA, 720 bp, synthetic construct
  misc_feature 1..720: note = Description of Artificial Sequence: Synthetic coding sequence
  source 1..720: mol_type = other DNA
atgatccggctgggcggctggtgcgcccggcggctgtgcagcgccgcagtcccagccggccgacgcggagccgcaggcgggttaggcctcgcaggggggagggctctgcgcgttctggtggatatggacggagtactagccgattttgagggtggatttttgcggaagttccgagcccggttccctgaccagccgtttattgcgctggaggatcgaaggggtttttgggtgtctgaacagtacgggcgtctcaggcccggcctgtcagaaaaggccatcagtatctgggaatccaagaatttttttttcgaattagagcccctgccaggggccgtggaggccgttaaagagatggcctccttgcagaacaccgacgtgttcatctgcacgagccccattaagatgttcaaatattgcccctatgagaaatacgcatgggtagagaaatattttggaccagattttttagagcagatagtccttacacgcgacaagacggttgtgagcgctgatctccttatcgacgaccgaccggatattaccggcaatcagccacctgctggcagtatgtcatccagcccacctgcaacaactagtacttgttcttgttcaccaccagccgctggatgcacaagaggacgcactactggacggccattctggaccgcttcagggccggccgaactggactgcgcttctggaagctctgtggggctgtag

SEQ ID NO: 177327 - DNA, 2853 bp, synthetic construct
  misc_feature 1..2853: note = Description of Artificial Sequence: Synthetic coding sequence
  source 1..2853: mol_type = other DNA
atgggcgtgcccgccttcttccggtggctgagccggaagtacccctctatcattgttaactgtgtcgaggagaaaccgaaggagtgcaatggcgtgaaaatccccgtggatgcttcaaagcccaaccccaatgatgtcgagtttgacaatctctatctggacatgaatggcatcattcacccctgcacgcaccccgaagacaagcctgcgccaaagaatgaagatgagatgatggtcgcaatcttcgaatacatcgaccggcttttttccatagtcaggccaaggcgcctgctgtatatggcgattgacggcgtggctccgcgggctaagatgaaccagcagagaagcaggagatttcgcgcctctaaagaggggatggaagcagccgtggaaaaacagcgagtcagagaggaaattctggcaaaaggtgggtttctgccacctgaggaaattaaagagagatttgacagtaactgcattaccccaggaacagagtttatggacaatctcgctaagtgcctgagatattacatcgctgaccgcttaaacaacgaccccgggtggaagaatttaactgttattctgtctgacgccagcgctcctggagagggcgaacataagatcatggactatatcagacgacagcgggcccaaccaaaccacgaccccaatacccatcactgcctttgcggagctgacgcagacctgataatgctgggactggcgactcacgaaccgaatttcaccataattcgcgaagagttcaaacctaacaagcctaagccttgcggtctctgcaaccagtttgggcatgaagtgaaggattgcgaaggactccctagggagaagaaaggcaagcacgatgaattggcggattcactgccttgcgccgagggcgaattcatatttttgcgtcttaatgtcttacgcgagtatcttgagcgtgaactgaccatggcctctctgcctttcacattcgatgtggaacgcagtattgatgattgggtctttatgtgcttttttgtcgggaacgattttctcccacacctgccgagtttagaaatcagagagaacgccatagatcgcctggttaacatttacaagaacgtggtgcacaagaccggagggtatctgacagaatcaggatatgtgaatctccagcgggtgcagatgatcatgctggcagttggggaagtggaggactctatattcaaaaagagaaaggacgacgaagatagttttaggcgtcgacagaaagagaagcgaaaacggatgaagagggatcagcccgccttcacaccatcaggcattctgacgcctcacgcgctcggctcccgcaattcaccggggtcacaggtcgcgagtaaccccaggcaggctgcttacgagatgcggatgcagaataactcaagcccatccatttcgcctaacaccagttttacctcggatggaagcccctctcccctgggcggcatcaagcgcaaggcggaagattctgattctgagccagagcctgaagataacgtgcgcctatgggaggccggatggaagcagcggtactataaaaacaaattcgacgtggatgccgccgatgagaagtttagaaggaaggtggtgcagagctatgtggaagggttatgttgggtgctacgctattattatcaggggtgcgccagctggaaatggtattacccttttcattatgcgccgttcgccagcgacttcgagggcattgcggacatgccatccgatttcgagaaaggcaccaaaccttttaaacccctcgagcagctgatgggcgtgtttcccgcagcctctggtaactttctgcctccttcctggcggaaattaatgtctgacccagattcctcaatcattgacttctatccagaagattttgccatagatttaaacggaaaaaaatacgcttggcaaggtgtggcactgttaccatttgtggatgaacgtcgcttgcgcgccgcactcgaggaagtgtaccccgacctgacgccagaggaaacccgaaggaattctctgggcggcgacgttctatttgtggggaagcaccaccccctgcacgattttatcctcgaactataccaaaccgggagcaccgagccagtggaggtgccaccagagctctgtcacggcatccagggaaagttcagtctggacgaagaggcaattcttcccgatcagattgtgtgctctcctgtaccaatgctgcgggatctcacacaaaacaccgtggtgagcataaacttcaaggaccctcagtttgccgaagattatattttcaaggctgtgatgctgcctggtgcacgaaaacccgctgcagtcctgaagccaagcgactgggaaaagtcatctaacggacggcagtggaaaccacagctaggctttaacagggatcgaagacccgtccacctagatcaggccgccttccgaacactggggcacgtgatgcccagggggtccggtaccggaatctattccaacgccgctccgcctcctgttacttatcaggggaacctgtaccgacccctgctgcgaggtcaggctcagatcccaaagctcatgagcaacatgagacctcaagattcatggagaggtcccccccccttattccagcaacaaaggtttgataggggcgtgggtgctgaaccactgctgccatggaatcgcatgctgcagactcagaacgccgccttccaacctaaccagtaccaaatgctcgctggtccaggtggttatccccctagaagggatgatcgaggtggcagacaggggtacccccgggagggaaggaaataccccctacctccaccttcaggtcggtacaactggaactag

SEQ ID NO: 177328 - DNA, 2625 bp, synthetic construct
  misc_feature 1..2625: note = Description of Artificial Sequence: Synthetic coding sequence
  source 1..2625: mol_type = other DNA
atgatggtggccatcttcgagtacatcgaccggctgttcagcatcgttcgaccaagacgtcttttgtacatggccatagacggagtagcaccaagagctaaaatgaaccagcagcgcagcagaaggttccgtgcatccaaagaggggatggaagcggcagtggagaaacagagagtgcgcgaagagatcttggcgaaaggtggttttctcccaccagaggagattaaagagaggttcgattctaactgtataacacccgggaccgaattcatggacaacctggcaaaatgtctgagatactatatcgcagacaggctcaacaatgacccaggctggaaaaacctgaccgtaatactatccgacgcctctgcacccggggaaggcgaacacaagatcatggattacattcggaggcaaagagctcagcccaatcatgacccgaacactcatcactgcttgtgcggagcggacgccgatctcatcatgctggggcttgctactcacgagcccaattttaccatcattcgggaagaattcaagccaaataagcctaagccttgcggcttgtgcaaccagtttggccacgaagtgaaagactgcgaggggctgccgagggagaaaaagggcaagcatgatgagctggccgattcactaccatgcgccgaaggtgagtttatcttcctgagactgaacgtcctcagggaatacctggagcgggagctcaccatggcctccttgccattcacattcgacgtggagcgctctattgatgattgggtcttcatgtgcttctttgtgggaaacgatttccttccacatctgccttcactggagattcgagaaaacgcgattgacaggctggtgaacatatacaagaacgttgttcacaaaactggcggttaccttacagaatctgggtacgtcaacttacagagagtgcagatgattatgttagcagtgggcgaagttgaagattctatattcaaaaagcgtaaggacgatgaggactcttttaggcgaaggcagaaagaaaagcgcaagaggatgaaacgggatcagccagcctttaccccatcgggcattttaacacctcacgctctcggatcccgcaactccccaggaagtcaagtggcttctaatccaaggcaggccgcttacgagatgaggatgcagaataacagctcacccagtataagccccaacacaagttttaccagcgatggatcccccagccctctgggtgggataaaacggaaggccgaagattcggatagcgagccagagcctgaggacaacgtgagactctgggaagcaggctggaaacaacgttactacaaaaacaaatttgacgtggatgccgcggatgagaagttccgaaggaaagtggtgcaaagctacgtcgaagggctatgctgggttctgcggtactactaccagggttgcgcctcttggaagtggtattacccctttcactacgctccttttgcaagcgacttcgagggcatcgccgacatgccaagtgactttgagaaaggaacaaaaccgttcaaaccccttgagcagctgatgggcgtgtttcccgctgcgtctggtaacttcctgccaccctcttggaggaagctcatgtctgaccccgactcctctatcatagacttctatccagaggatttcgctatcgatctcaacggaaaaaagtatgcttggcaaggcgttgctctgctgcctttcgtcgacgagcgacggctgagagccgctctcgaggaggtgtatcctgacctgactcccgaggagactcggcgaaactcactgggaggagatgttctgtttgtggggaagcatcatccgctgcacgactttatacttgagctttaccagacaggatctaccgagccggtcgaggttcctcccgagctgtgccatgggatccagggcaagttttcgctggacgaagaggctattctgcctgaccagattgtctgttctccggtccctatgctcagagaccttactcagaataccgtcgtaagcatcaactttaaggacccgcaattcgccgaagactatatctttaaggccgtgatgctgcccggcgcccggaaaccagctgcagtccttaagcctagcgattgggaaaaatcttctaacggccgacagtggaaaccccaactcgggttcaatcgagacagaagaccagtgcacctggatcaagcagcttttaggactttggggcacgtgatgcctcgaggctcgggtaccggaatctactctaacgctgcgcctcctcctgtgacgtaccaaggtaacctctatcggcctctgcttagagggcaggcgcagatacctaaacttatgagcaacatgaggccccaggacagttggcgaggcccacccccactgtttcagcaacagcgctttgaccggggcgtcggagctgagccactactaccttggaatcgcatgttgcagacacaaaatgccgcctttcagcccaatcagtatcagatgttggcagggccgggcggatatcctccccgacgtgacgatcgcgggggtagacagggctacccccgcgaggggcggaaatacccactcccccctccaagtggacgttacaactggaactag

SEQ ID NO: 177329 - DNA, 2691 bp, synthetic construct
  misc_feature 1..2691: note = Description of Artificial Sequence: Synthetic coding sequence
  source 1..2691: mol_type = other DNA
atgaacggcatcatccacccctgcacccaccccgaggacaagcccgccccaaaaaatgaagatgaaatgatggtcgcgattttcgagtatattgatcggttattttcaatcgtgagacccagaaggctgctgtacatggcaatcgacggggttgcaccaagggcgaagatgaatcaacagcgatccaggcgctttcgagcctctaaagaaggaatggaagccgccgtggaaaagcagcgtgtgagggaggaaattctggcaaaaggcggttttctgccccctgaagagataaaggaaagattcgatagcaactgtatcacgcctggtactgaatttatggataacctggccaaatgtctgagatattatatcgctgaccggttgaacaatgaccccgggtggaagaaccttaccgttatactaagcgatgctagtgctcccggggagggagagcataagataatggactatattcgccggcagcgggctcagccaaaccatgatcccaatactcaccactgtctatgtggagctgacgcagacctaatcatgttaggacttgccacacatgagcctaactttacgatcatccgagaggagtttaagcccaacaaacccaagccctgcggcctctgtaatcaattcggccatgaggtcaaagattgcgaaggacttcctagggaaaagaaaggtaagcacgacgagcttgccgacagtttgccctgtgctgagggggagttcatcttcctacggctgaatgttctgcgcgagtatctggagagagaattaacgatggccagtcttccgttcacttttgacgttgagcgctcaattgatgattgggtattcatgtgttttttcgttgggaatgactttcttcctcatttaccttctctcgagatcagggaaaacgccatcgatcgtctggtgaatatctataagaacgtagtacataagactggcggatatctgaccgagtccggttatgtgaatttacagagggtccagatgatcatgctggctgtgggagaggtcgaggatagtattttcaaaaaacgcaaggacgatgaggatagttttaggcgccgccagaaggaaaaaagaaagaggatgaagcgggatcagccggcattcactcccagtggcatcctaacgccccacgccttgggcagcaggaatagtcccggaagccaagtggcaagtaacccgcggcaggctgcctacgagatgagaatgcaaaacaattctagtcctagcatttccccgaacacttcatttacatccgatggctcaccctcaccgctgggcgggatcaaaaggaaggccgaagacagcgacagcgagccggagccagaagacaatgtaagactttgggaagccgggtggaaacaacgatattataagaataagtttgacgtcgacgcggctgacgagaagttccggcggaaggtcgtgcagagctatgttgagggattgtgctgggtcttgaggtactattaccagggatgcgcgtcttggaaatggtattacccgttccactatgctccgtttgctagcgacttcgaagggatagctgacatgccatccgattttgaaaaagggactaagccctttaagcccctggaacaattaatgggcgtgtttcccgccgcctccgggaactttctgcctcctagctggcggaaattgatgtccgatcctgacagttccattattgacttctatccagaggactttgctatagatctgaatgggaagaaatatgcatggcagggcgtcgcactgctgccattcgtggatgagcgtagactgagagcggccctggaggaagtgtatccagatctcacccccgaggagacacgacgcaactcgcttggcggggatgtcttgtttgttgggaaacatcaccccctgcatgatttcattctcgaactgtaccagacaggaagcacagagcccgtggaggtaccacccgaactttgccatggtattcagggaaagttttccctcgatgaggaagctatcctgcctgaccagatcgtttgttctcctgtccccatgttgagagacttaacacagaacacggtcgtgtctatcaactttaaggatccccagttcgcagaagactatatcttcaaggcagtgatgttgcccggagctagaaagcctgcagctgtgcttaaaccctccgattgggaaaaatccagcaatggtaggcagtggaagccccagttgggtttcaatcgggatcgcaggccagtgcatcttgaccaggcagctttccgcaccctgggacatgtgatgccgagggggagtggcacagggatttattcgaatgccgcccccccacccgtaacataccagggaaacctatacaggcccctgctccgtggtcaagctcagatccccaagctgatgtcaaatatgaggccccaggactcttggagagggcctccgcctctgtttcagcaacagagatttgacagaggcgtaggggccgagcctctactgccttggaataggatgctccagacccagaatgccgccttccagccaaaccagtatcagatgctggccggccccggtggctatcccccccgccgtgacgacaggggcggtcggcagggttacccacgagagggaaggaaatacccgctgccccccccgtccggccgctacaattggaactag

SEQ ID NO: 177330 - DNA, 1779 bp, synthetic construct
  misc_feature 1..1779: note = Description of Artificial Sequence: Synthetic coding sequence
  source 1..1779: mol_type = other DNA
atggcccccggccagctggccctgttcagcgtgagcgacaagaccgggctggttgagtttgcgaggaacctgaccgctcttgggctgaacctggtggccagcggcggaactgctaaagccctgcgtgatgccggtctcgccgtccgggacgtaagcgagctcacaggcttcccggaaatgctgggagggagggtgaaaaccttgcatcctgccgttcatgcgggcatcctggccagaaatatccccgaagacaacgcagatatggcaagactggatttcaatctgatccgggtcgtggcatgcaatttgtacccctttgtgaaaacagtggcatctcccggcgtgacggtggaggaagccgtggagcagatcgacattgggggggtcacattgctgcgggcagctgccaaaaatcatgcacgggttaccgtggtttgcgaacctgaagactatgtggttgtcagcactgagatgcagtcatccgagtctaaagatacctcacttgaaacacgcagacaactcgctctgaaggccttcacacacacggcccagtatgacgaggccatctcagactattttaggaagcagtactcaaagggggtgagtcagatgcctctccgctatggaatgaatccccaccagacaccagcccagctgtacactctccagcccaagttgcccattaccgtcttgaacggcgcacccggattcataaacctctgcgatgctctgaacgcctggcagttggtcaaggagcttaaagaagcactcggaatcccggccgctgcttcctttaaacacgtttcaccggcaggcgccgccgttgggatccccctgagtgaagatgaggccaaagtttgcatggtgtacgacttgtataaaacactgacacctatcagcgcggcctacgcccgcgctcgcggagctgaccgcatgtcctcctttggggattttgtcgccctatccgacgtttgtgacgttcccaccgctaagataatctcccgggaggtcagtgacggcataatcgcccccggctacgaggaagaagcactgacaatcctgtctaagaaaaagaacgggaattattgcgttttgcaaatggaccaatcttataaacctgatgagaatgaggtgcgtacactgttcggactgcacctgagtcagaagcggaataacggtgtcgtggataagtctcttttttctaacgtcgttactaagaataaggacctccctgagagcgcccttcgagacctgattgtggctaccatcgctgtgaagtatacccagtcaaatagtgtgtgctatgccaagaacggtcaggtgattggtatcggggccggtcagcagtcaagaattcactgcacccgactggctggggacaaggccaactactggtggcttagacaccacccacaagttctcagcatgaagtttaagaccggggtgaaacgagccgaaattagtaatgctatcgaccagtacgtgacaggaacaattggagaggacgaagatttaattaaatggaaggcgctgtttgaggaggtgcccgagctgctaactgaggctgagaaaaaagaatgggtggaaaagctgactgaggtctcaatatcctccgatgccttctttccatttcgcgataacgtggatcgcgccaagcgctcaggggtggcctacattgccgccccatctggttccgccgctgataaggtcgtgattgaagcttgcgatgagctgggcattattttggcacataccaacctacgccttttccatcattag

SEQ ID NO: 177331 - DNA, 1602 bp, synthetic construct
  misc_feature 1..1602: note = Description of Artificial Sequence: Synthetic coding sequence
  source 1..1602: mol_type = other DNA
atgctgggcggccgggtgaagaccctgcaccccgccgtgcacgccggtatcttagctcgcaacattcccgaggacaatgccgatatggcccgtctggatttcaatctcatccgcgtcgtggcctgcaacctttacccgttcgttaagactgtagcctcccctggcgttactgtcgaagaagctgttgagcagatcgatattgggggcgtcacgctgctccgtgctgccgcaaaaaaccatgcccgtgtgaccgtcgtgtgcgagccagaagactacgtggttgtgagcacagagatgcagtcatccgagtctaaagatacgtctttggagacgcgccggcagctggctctgaaagccttcacacatacggcacaatacgatgaagccatctcagattactttcgcaagcaatatagcaagggcgtgtcccagatgccacttcggtatggaatgaacccgcaccagacccctgcccagctgtataccctccagccaaaactgccaatcaccgtgctgaatggggcacctggctttatcaacctgtgcgacgcactgaacgcgtggcagctggttaaggagcttaaggaagccttgggaatacctgctgccgcaagcttcaagcacgtatcacctgccggagccgccgttggcatcccgttgagcgaggatgaagccaaagtttgcatggtttacgatctttacaagacccttacccctatctccgccgcatacgctagggctcgcggtgcggacaggatgtcttctttcggcgattttgtggcactcagcgacgtatgtgatgttcctaccgcaaagattatctctcgcgaagtatccgatggaattatagcgcctggatacgaggaggaagctctcacgattctcagtaaaaaaaagaatggcaactattgcgtcttacaaatggatcagtcttataaaccagacgaaaatgaggtaaggaccctgtttgggctccatctcagccagaaaaggaacaacggagtggtcgataagtcattgttttcaaacgtcgttacaaagaacaaagacttgcctgaaagcgcactgcgggacctgatcgtggccacaatcgccgttaaatatacccagtccaactctgtgtgttatgctaagaacggccaagtcattggtataggggcgggacagcaaagccgaattcattgtacccggctagctggcgacaaagctaactattggtggttgcgtcaccaccctcaggtcctgtccatgaaattcaaaacaggggttaagcgggccgagatcagcaacgccattgaccagtatgtgaccggtaccatcggggaagatgaagacctaatcaaatggaaggctctctttgaagaagtccctgaactgctcacggaagctgagaagaaggagtgggtcgagaagctgactgaggtgagtatctcctctgatgctttttttccctttcgcgacaacgtggatagggctaagcgttctggggtggcatatattgccgcaccatcagggtcagccgcagataaggtggtgattgaggcttgtgacgaactgggtatcatcttagcccatactaaccttcggctgtttcatcactag

SEQ ID NO: 177332 - DNA, 3252 bp, synthetic construct
  misc_feature 1..3252: note = Description of Artificial Sequence: Synthetic coding sequence
  source 1..3252: mol_type = other DNA
atgaagggcacccgggccatcggcagcgtgcccgagcggagccccgctggggtggacctgtccttgaccggattgcctccccccgtctcaaggaggcctgggtctgcagccacgacaaagccaatcgtccggagtgtgtccgtggtcaccggttcagaacagaaacggaaagtactggaggcgactggccccggggggtcccaggctatcaacaatttgaggcgctccaattccacaacgcaggtgtcacagccaagatccgggagtccacgcccaacagagcctacagattttctcatgctgttcgagggctctcccagcggaaagaaaaggcccgcctcacttagcacagccccatcagaaaagggcgctacatggaatgtgctggacgatcagccaagggggtttacacttccctctaacgctaggagtagtagcgcccttgattcacctgcaggcccacgacggaaagagtgcacagtggccctggcacccaacttcacagccaataaccgctctaacaagggggctgtgggcaactgtgtaaccaccatggtacacaacagatatactccaagtgagagagccccaccgctcaagtcaagcaaccagaccgctccctcactcaataacattataaaagccgccacttgcgaaggcagtgagtcctccggattcggaaagctcccaaagaacgtttcttctgcaacccacagcgcccgaaacaacactggcggatccacaggccttccccggcgaaaggaggtgaccgaggaggaggccgagcggttcatacatcaagtcaaccaagcaaccgtaacaatacaacgttggtaccggcatcaagtgcagaggcgtggggcaggtgcggccaggttggagcatctgttacaagcaaagcgggaggagcagagacagcgcagtggcgagggcacattattagaccttcatcaacagaaagaggccgcccggaggaaggcaagggaagagaaggcgaggcaggcgaggcgggccgcaattcaggagcttcagcaaaaacgagccttaagggcccagaaggctagcactgccgagcgtggaccccctgagaatccgcgggaaacgagggttccggggatgcgccagccagcccaggagctgtctccaacccctggtggtactgcccaccaggctctaaaggccaataacaccgggggtggattgcctgccgctggacctggcgacaggtgcttaccaacatccgactcatcaccagagcctcagcagccccctgaggataggacccaggacgttctagcccaagatgccgctggcgacaacctagagatgatggctccttccagaggatccgctaaatccagaggaccgctcgaagaattactccatacactccagcttctggaaaaggaaccggacgtcttaccgagaccaagaactcatcacagaggacggtacgcctgggccagcgaggtgaccactgaggatgacgcttcctctctgactgcggataatctcgagaagtttggcaagctatctgcatttcccgagccgcccgaagatggcacccttctgtctgaagccaagctccagagcatcatgtctttcctagacgaaatggagaaaagcggtcaggatcagctggattcccagcaagaaggatgggttccagaggccgggcccggtccactggagctcggatccgaggtttcaacttccgtgatgagactcaagcttgaggtggaggaaaaaaaacaagcgatgctattgctccagcgggcgctagcccagcagcgggatctgacagctcggcgggtcaaagagactgagaaggcactgtctcggcaactacaaagacaacgggaacactatgaggcgacaattcagcgtcatctggcatttattgaccagctgatcgaggataagaaagtcctctccgagaagtgcgaagccgtcgtggcagagctgaagcaggaagaccagagatgtacggagagggtggctcaggcacaggctcagcacgaactcgagattaagaagctgaaagagctcatgtccgctacggaaaaagcccggcgcgaaaagtggatttcagagaagaccaaaaaaataaaagaggtaacggtgagaggacttgagcccgagatccagaagttaattgccaggcataaacaggaggttcgcaggctgaagtcactgcatgaggcagagcttttgcagtcagatgaacgtgcgagtcagcgatgcctgcgccaggcagaagaactgagggaacagttggagagggaaaaggaagcactgggccaacaagagcgagagagagcacgccagcgcttccagcagcatctggagcaagagcagtgggcactgcagcagcagcggcagcgattatacagcgaagtggctgaggagcgagagcgtctggggcagcaggccgcccgccagcgtgcagagctcgaagaacttcgacagcaattggaagaatcttcctctgccctgactcgtgcactccgcgccgagtttgaaaagggccgggaggaacaggaaaggagacatcaaatggaactgaataccctgaaacagcagctggagctggaaagacaggcttgggaggccggacgaaccaggaaagaagaggcttggcttcttaatagggagcaagaactacgggaggaaatccgcaaaggcagggataaggagatcgaacttgtgattcaccgcctcgaagcagatatggccctcgcaaaagaagagtccgagaaggcggcggagtctagaattaagagactgagggataaatacgaggccgagctgagtgagctggaacaatccgagcggaagctgcaagaaaggtgcagcgaattgaagggacagctgggtgaggcagagggcgagaacctccggctccagggtctagtccgccaaaaggagcgggccttggaggacgcccaagctgtgaatgagcaacttagctcagaacgttcgaatttggcacaggtcatacgacaagaattcgaggatcgacttgccgccagtgaagaggagacccgtcaggcgaaggcagaactggcgactctccaggcccggcagcagttggagcttgaggaggtccacagacgtgtcaagactgctcttgcccggaaggaggaagccgtgtcaagcctgagaactcagcatgaggccgcggtgaaaagagccgaccacctggaggagctgctggaacagcacaggaggcccaccccctcaacgaagtag

SEQ ID NO: 177333 - DNA, 3135 bp, synthetic construct
  misc_feature 1..3135: note = Description of Artificial Sequence: Synthetic coding sequence
  source 1..3135: mol_type = other DNA
atgaagggcacccgggccatcggcagcgtgcccgagcggagccccgctggggtggacctctccctcactggactgccacctccagtgagtcggagacccggatcggctgctaccacgaagcctatcgtgagatctgtgtccgtcgtgaccggctcagagcagaagaggaaagtcctggaagccaccgggcccggaggttcccaagcaataaacaatctccgccgcagcaactccactactcaggtgtctcaaccacgttcagggtcccctcgaccaacagaaccaaccgattttcttatgcttttcgaaggtagcccctccggcaaaaaacggccagcttccctgtcaacagcacccagtgaaaagggcgccacctggaacgtcctagatgatcagccaaggggctttaccctgccctcaaacgcccgatctagctccgcactggactcccccgcggggcctcgccgaaaggaatgtactgttgctctggccccaaattttacagcaaacaatcgctccaataaaggtgccgtgggcaattgcgttaccaccatggtgcacaatcgctacacaccttccgagcgggccccacccctgaagtcttctaatcagactgccccaagcctgaataatatcattaaagccgccacatgcgaaggatccgaaagtagcggcttcggcaaattgcccaagaatgtgtccagcgccacccacagcgcgaggaacaacacgggaggctcaaccgggctgccacgccgcaaagaggtgacagaggaggaggctgagaggtttattcaccaggtgaatcaggctaccgtcaccatccagcggtggtacaggcatcaggtacagcggaggggagcgggggctgcccggctggagcacctgcttcaggcaaaacgtgaagagcaacggcaaaggagcggtgagggcaccctcctcgatcttcaccagcagaaagaggccgcccggcgaaaggcacgcgaggagaaggcaaggcaggctcggcgcgccgccatccaggagttgcagcagaagcgcgcgcttagggctcaaaaggccagcaccgcagagcgcgggccacctgaaaacccgagggaaacaagggtcccaggtatgagacagcccgcccaggaactaagccctacaccaggaggcaccgcacaccaggccttgaaggccaacaacaccgggggcggcctgcccgctgccggcccaggcgataggtgtctacccacttccgactcatctccagagccgcagcaaccgcccgaggatagaacccaggacgtgttagcccaggacgctgccggtgataatctcgagatgatggcaccttccagaggctccgcaaagtcgcgcggacccctggaagaactgctccacaccctgcagctgttggagaaagagcccgatgttctcccaagaccaagaactcatcataggggcagatacgcctgggcatctgaagaagacgacgccagctctctcacggctgataatctagagaagtttgggaagctgtcggcatttccagaaccacccgaggacggaaccttgctgagcgaagctaagctgcagtcaattatgtcctttctggatgagatggaaaaatcgggacaggatcagctggactcccagcaggaaggctgggtccctgaagcggggccggggcccttagaactggggagcgaagttagtacatccgtgatgcgtttgaaactggaggttgaggaaaaaaagcaggctatgctgctactccagagagctctggcgcagcaacgcgatctaaccgctagaagggtgaaggaaactgagaaggcactgtcccgacagctccagcgccagcgcgaacattacgaggccactatccagagacatcttgcctttatcgaccaattgatcgaagacaaaaaggtgctcagtgagaagtgcgaggccgtggtggctgagttgaagcaggaagaccagcggtgtaccgagcgagtcgctcaggcccaggctcagcatgagctggaaatcaaaaaactgaaggaacttatgagtgccactgaaaaggccaggcgggagaaatggatcagtgagaaaaccaaaaaaatcaaggaggttacggtacggggcctcgaacccgaaattcagaagcttatcgctagacacaagcaggaggtgcggagactgaagtccttgcatgaggctgagctcctacagagtgatgagcgggcttcacagcggtgtctgcgccaagccgaggaattacgcgaacagctggaacgcgagaaggaggcactggggcagcaggagagggagcgggccagacaacggcagcgtgctgagctggaggaactgcgtcagcagttggaggaatcatcttcagctctgaccagagctctcagggcagaattcgaaaaaggacgcgaggagcaagagcggagacaccaaatggaactcaacaccttgaaacagcaactggaactagagcgccaagcctgggaggccgggcgtacacgtaaggaggaagcatggctgctgaatagggaacaggaactcagggaggagataaggaagggacgcgataaggagattgagttggtgattcaccgcttggaggccgatatggccctggctaaggaggagagtgagaaggccgctgagtcgcggataaaacgtctgcgagataagtacgaagctgagctttccgaactggagcagagcgaacggaaactacaagagaggtgtagcgagttgaagggacagctcggtgaagccgagggtgaaaaccttcgcttacaaggcctcgtgcgtcaaaaagagagagctttggaagacgcacaagccgtgaatgaacagctctcgtccgagcgctccaatctagctcaagttattagacaggagtttgaggatcgactggccgcctctgaagaagaaactcggcaggcaaaggcagagctggctacattgcaggcgcgtcaacagctcgaactggaggaagtgcatcggcgtgtgaagaccgcattagcgaggaaggaggaggcggtgagttcattgcgtacacagcacgaggcagccgtgaagcgagccgatcacttagaagagctgctagaacagcaccgtagacccacccctagtaccaagtag

SEQ ID NO: 177334 - DNA, 3243 bp, synthetic construct
  misc_feature 1..3243: note = Description of Artificial Sequence: Synthetic coding sequence
  source 1..3243: mol_type = other DNA
atgaagggcacccgggccatcggcagcgtgcccgagcggagccccgcaggcgtcgatctgtcactgaccgggcttccacccccggtgagcaggcggcccggttccgcggccactactaagccaattgtgcgaagcgtgagcgtggtgacagggtctgagcagaaacgtaaggtcctggaggcaacaggacctggaggctcccaggccatcaacaacttgcgaaggtctaatagcacgacccaggtgagtcagccaagatcaggctcaccaaggcccacggagccaacagacttcctgatgctcttcgagggttctccctcaggtaagaaacggccggcttccttgagcaccgccccttccgaaaagggtgccacctggaatgtactcgacgatcaacctcggggattcacactgccctccaacgcccggtccagctccgctctggactcgcccgcggggccgagaagaaaggaatgtaccgtggcattggctcccaattttaccgcaaataataggtccaataaaggggcagtgggcaattgtgtcaccaccatggtgcacaaccgctacactccatctgagagggcgcctcctctgaagagcagcaatcagaccgctcccagccttaataatatcattaaagcggccacttgtgaggggagtgagtccagcggatttggcaaactgcccaagaatgtttcctcggctacccatagcgccaggaacaacacaggcgggagcactggcctgcccaggaggaaagaagtaacagaagaggaagcggagaggtttattcatcaggtaaatcaggccaccgttactatccagcgatggtacagacaccaagtacagcgtagaggagcgggcgcagctagactggagcatctactgcaagccaagagagaggagcaacgacagaggagcggcgaaggaacactattagacctgcaccagcaaaaagaggccgctcgcagaaaagccagggaagagaaggcaaggcaggcccggagagccgctatccaggagctccagcagaagagggcactgcgcgctcagaaggcgagtacagctgagcgtgggccacctgaaaatcctcgcgagacacgcgtgcccgggatgcggcagccagcacaggagctcagtccaactcccggcggaacagctcatcaggctttaaaggcaaacaataccggcggtggcctgccagccgccggccctggggaccgctgccttcccacgtcagactccagccccgaaccccagcagccacccgaagatcgcacccaggacgtgctggcccaggacgcagctggcgacaacttggagatgatggctcctagccgtggctccgccaagtccaggggcccccttgaggagctgctccacacactacaactgcttgaaaaagaacccgatgttctgcccagaccccgaactcatcaccgcggccgttatgcttgggcttctgaggaggacgatgccagctctttgacagcggataacctggagaaattcggtaagctgagtgcgttccccgagccacctgaggacggaaccctgctgagcgaggctaagctgcagtcaatcatgagttttctggacgaaatggagaagtcgggacaggaccagctggatagccagcaggagggatgggtgcccgaggcagggcctggccctctggaactcggaagtgaagtgagcacttccgtgatgcgcctaaaactcgaggtggaagagaagaaacaagccatgttgcttctccagcgcgcgttggctcagcagcgggatttgaccgcacggagagtgaaggagaccgagaaagccctgtcgcgacagcttcagagacagcgggagcattacgaagccacaatacagcggcacctggcctttatcgatcagctcattgaagataaaaaggttctaagcgagaaatgcgaggctgtggtggcagaattgaagcaggaggaccagaggtgcacagagagggttgctcaggcccaggctcagcacgaactcgaaattaaaaaactcaaagagttgatgtctgcaaccgagaaggcccgaagggagaagtggatctccgagaaaaccaaaaaaattaaggaagtaaccgtcagaggcctcgagccggaaattcagaaattaattgctagacataaacaggaagtgcggagactgaagagccttcacgaggctgagctcctgcagagcgacgaacgtgccagccagcgttgcctccggcaggctgaggagctaagagaacagcttgaaagagagaaggaggctctgggccagcaagagagggagcgtgcaagacagcggtttcagcagcaccttgagcaggaacagtgggccttgcagcagcagagacaacggctctattccgaggtggctgaggagagggagcgactgggtcagcaggctgccaggcagagagcagagttagaggagctgcggcaacaattggaggaaagttctagcgcgctcacccgtgcactgcgggccgagttcgagaaaggacgtgaggaacaagagcggcgacaccagatggagctaaacaccctgaagcaacagctggagcttgaaagacaggcatgggaagccgggcgaactaggaaggaagaagcgtggctcttaaatcgggaacaggaactgagggaagagattaggaaggggagggacaaagaaatcgagctcgtcattcacagattggaagccgacatggcactggctaaggaagaaagcgagaaagctgccgaatctcgcatcaaaagattgcgagataagtatgaagcagaactctcggagctcgaacagagcgagcggaagcttcaagagcggtgctccgaacttaagggccagctgggcgaagcagaaggcgaaaacctccgtcttcagggtctcgtccgtcagaaggaaagggccttggaggatgctcaggctgttaacgagcagctctcctccgaacgaagcaacctggcccaggtcattcggcaggaattcgaagaccggctggcggctagcgaggaggaaacgcggcaggcaaaagccgaactggccaccttgcaggcaagacagcaacttgaattggaggaggttcataggcgggttaaaaccgctttggcccggaaggaggaggcagtatcgtctctgagaacccagcatgaggccgccgttaagcgtgccgatcatcttgaggaactgctggaacaacacagacggccgacaccttccacaaaatag

SEQ ID NO: 177335 - DNA, 699 bp, synthetic construct
  misc_feature 1..699: note = Description of Artificial Sequence: Synthetic coding sequence
  source 1..699: mol_type = other DNA
atggacgccctggtggaggacgacatctgcatcctgaaccacgagaaggcacacaagcgggatacagtgacgcccgtgtccatctattcaggagacgaaagcgtcgcctcccacttcgctctggtgacagcttatgaagatatcaaaaagaggctgaaagatagcgagaaggaaaactcgttacttaaaaagcggatacggttcctggaggagaaactcatcgcccggttcgaggaggagacctcgtccgttggccgggagcaggtgaacaaggcctatcacgcctaccgagaggtgtgtatcgatcgcgataacctgaaaagcaaactggacaagatgaacaaagacaactccgaatctctgaaagtgctgaacgaacagcttcagtccaaggaagtggagctgctgcagctccgcaccgaggttgagacacaacaggtcatgaggaatctcaacccgccctcctccaactgggaggttgaaaaactttcgtgtgatttgaaaatccacggcttggagcaagagctcgagctgatgagaaaggagtgcagcgaccttaagatagaactgcagaaggctaaacagacggacccctaccaggaggataaccttaagtccagagatctgcagaaactgagtataagcagagtctccgttgcacaacccggcgttcaatggcggaaccacggcattgcctag

SEQ ID NO: 177336 - DNA, 648 bp, synthetic construct
  misc_feature 1..648: note = Description of Artificial Sequence: Synthetic coding sequence
  source 1..648: mol_type = other DNA
atggacgccctggtggaggacgacatctgcatcctgaaccacgagaaggctcacaagcgggatactgttactcctgtgtcaatttatagcggcgacgagtcagtcgcatctcacttcgcccttgttactgcctatgaggatattaaaaagagactcaaggattccgagaaggagaacagcctgctgaagaagcgaatacgctttttggaagaaaaattgatcgccagatttgaagaggaaacatcaagcgttggtcgggaacaagtaaacaaagcttaccatgcctatagagaggtgtgtattgatcgggataatctcaagagcaaattagacaagatgaataaagataatagtgagtcgctgaaggttctcaatgagcaattacaaagcaaagaggtggaactcctacagttgcgcacagaggtggagactcagcaggttatgagaaaccttaaccccccctcatccaattgggaggtggagaaactctcttgcgatttaaagattcatggacttgagcaggaattggagttgatgaggaaggaatgcagcgatctcaaaatcgaattgcagaaagcgaagcagactgatccataccaggaggataatctaaagtcccgcgaccttcagaagctgagtatttcatag

SEQ ID NO: 177337 - DNA, 288 bp, synthetic construct
  misc_feature 1..288: note = Description of Artificial Sequence: Synthetic coding sequence
  source 1..288: mol_type = other DNA
atggacgccctggtggaggacgacatctgcatcctgaaccacgagaaagctcacaagcgggacactgtaactccagtctccatttattctggtgatgagtcagtcgcgtcacattttgcactggtgaccgcttatgaagatatcaaaaaacggttgaaagattccgagaaggaaaatagcctcctgaaaaaaagaattcggtttctggaggagaagcttatcgctcggttcgaagaggaaacctctagtgtaggccgggagcaagtaaataaagcatatcacgcctag

SEQ ID NO: 177338 - DNA, 732 bp, synthetic construct
  misc_feature 1..732: note = Description of Artificial Sequence: Synthetic coding sequence
  source 1..732: mol_type = other DNA
atggacgccctggtggaggacgacatctgcatcctgaaccacgagaaggcccacaagcgtgatactgtcaccccggttagcatttattcaggcgatgagagcgtagcaagtcatttcgccctcgtcacagcttatgaagacatcaagaagcggctgaaagactcggaaaaggagaactctcttttgaagaaacgcattcggtttctggaagagaaattgatcgctcgctttgaggaggagacatcctcagtgggacgggagcaggtcaacaaagcctaccatgcatatcgggaggtgtgtattgaccgcgacaacttaaaatccaaactcgacaaaatgaacaaggataactccgaaagtctgaaggttctgaacgagcagctgcagtcgaaggaggtggaactcctgcagttgcgcactgaggtggaaactcaacaagtaatgagaaatcttaacccacccagcagcaattgggaggttgagaaactttcttgcgacctgaaaatccatggactggagcaggaactggagctcatgaggaaggagtgttctgacctcaagatcgagttacagaaagcaaaacagacggatccatatcaggaggacaatctgaaatctcgggacctgcagaagttgtctatctcacggcagagcatttgctcgaccgcttggtccgccgtcgcccagagctgggacagtatgaacttcgaggactgttctctattcgcctag

SEQ ID NO: 177339 - DNA, 732 bp, synthetic construct
  misc_feature 1..732: note = Description of Artificial Sequence: Synthetic coding sequence
  source 1..732: mol_type = other DNA
atggacgccctggtggaggacgacatctgcatcctgaaccacgagaaagctcataagcgtgacacggttacgcctgtttccatttattccggagatgagtcagtggcatctcattttgcactggtgactgcatatgaggacataaaaaagcggctgaaggactccgagaaagagaattcactcctgaagaagcgcatcagattcctcgaagaaaagcttattgcccgtttcgaggaagaaaccagttctgtgggaagggagcaagtgaacaaggcttatcatgcctaccgggaagtgtgtattgacagggacaacttgaaatccaagcttgataagatgaacaaggacaatagtgagtcactcaaagtattaaacgagcaactgcagtctaaagaggtggaactactacaattaaggaccgaagtggaaacacagcaggtcatgagaaacttgaatccaccatccagcaattgggaagtggaaaagctctcttgcgacctgaaaatacacggcctcgagcaggagcttgaactgatgagaaaagaatgtagtgacttgaagatcgagctccagaaggcaaagcagacggatccttaccaagaggataacttgaagagccgcgaccttcagaaactgtctatttcacgccagtccatatgtagcactgcctggtccgccgtggcacagtcctgggactcaatgaacttcgaagattgtagccttttcgcttag

SEQ ID NO: 177340 - DNA, 1179 bp, synthetic construct
  misc_feature 1..1179: note = Description of Artificial Sequence: Synthetic coding sequence
  source 1..1179: mol_type = other DNA
atggacgccctggtggaggacgacatctgcatcctgaaccacgagaaggcacacaaacgggatacagtcaccccggtatcgatttacagtggggatgagtcagttgcttcacacttcgcgcttgtgaccgcatatgaggacataaagaaaagactgaaagacagcgaaaaagaaaactcacttctgaaaaagaggattcgcttcctagaggaaaaacttatcgcgcggttcgaggaagaaacttctagcgtaggacgcgagcaggtgaataaggcctatcatgcttatcgcgaggtctgcatcgaccgggacaatctcaagagcaaattagacaagatgaacaaggataatagtgaatctctgaaggttctgaatgaacagctacagtcaaaggaggtagaactgcttcaactgcgaacagaagttgaaacgcaacaggtgatgcgaaatctgaacccaccttcaagtaattgggaagttgagaaattgtcttgtgacctcaagattcacggcctggagcaggaactggagctcatgcgcaaggagtgcagtgacctcaaaatagagcttcagaaggccaagcagactgacccataccaggaggacaatctgaagtccagagatctccagaagctatccattagctcagacaacatgcagcacgcttattgggagttgaaaagagagatgtccaacttgcatctagtcacccaggtgcaggccgagctcctgagaaaactgaagacaagcaccgcgattaagaaggcgtgcgcccccgttggatgctccgaggacctgggtcgagacagtaccaaactacatctgatgaactttaccgcaacctacacccggcatcctcccctcctccccaacgggaaagcgctatgtcataccacatccagccccctccctggcgacgtaaaggtgttgtctgaaaaggccatactgcagagttggaccgataatgagaggtcgatcccgaacgacggcacgtgcttccaggaacactcttcctatggacgtaacagcctagaagacaacagctgggtttttccctccccaccaaagagttctgagacagcctttggcgagacaaagactaagaccctgcctctgccaaacctgccccctctgcattacctggatcagcacaaccaaaattgcctttacaagaattag

SEQ ID NO: 177341 - DNA, 1269 bp, synthetic construct
  misc_feature 1..1269: note = Description of Artificial Sequence: Synthetic coding sequence
  source 1..1269: mol_type = other DNA
atggacgtgctgagccccggccagggcaacaacaccaccagcccccctgcaccctttgaaaccgggggaaacactacaggcatctcagacgttacagtgagctaccaggtcatcacttccctcctgttaggcactctgattttctgtgctgtgctgggcaatgcctgcgtcgtggcggctatagcactggagagaagtctacagaacgtagctaattacctgatagggtcgctggctgtgaccgacctgatggtgagtgtacttgtgctgcccatggccgctttgtatcaggtcctgaataagtggacccttgggcaggtgacctgcgacttattcattgctctagatgtgctgtgttgtactagttcaatactgcatctgtgcgccatcgcattagatcgctattgggccataaccgatcctatcgattatgtgaacaaaaggacaccgcggagagctgctgcactcatttcactcacctggctcattggctttcttatctcaatcccaccaatgctcggctggaggactcctgaggatagatccgatccggacgcatgtaccatctccaaggatcacggatatacaatctattccactttcggggcattctatatccctttgctgctcatgctggtcttatacgggcgcatcttcagggctgccagatttaggatccgcaagactgttaaaaaggtcgaaaaaacgggagccgacacccgacatggtgctagcccagccccccaacccaagaaatccgtcaatggtgagtccggaagcaggaattggcgcctaggagtcgaaagcaaagcgggcggcgctctctgcgcaaacggcgctgtgcgccaaggtgatgatggagccgccctggaagtgatcgaggtgcatagggtgggcaattcaaaagagcaccttccactgcccagcgaggccggacctaccccatgtgcccccgcctcttttgagaggaagaatgaacgtaacgccgaagccaagaggaaaatggcactcgcccgagaacgcaagactgtaaagacattgggtatcatcatgggaaccttcatattatgctggctgccattctttatcgttgcccttgtcctgcctttttgcgaatcttcttgtcatatgcccactctgttgggcgcaattattaattggttgggttatagtaacagcttgctgaatccagtgatctacgcctattttaataaagatttccagaatgcctttaagaagatcatcaaatgcaagttctgtaggcagtag

SEQ ID NO: 177342 - DNA, 129 bp, synthetic construct
  misc_feature 1..129: note = Description of Artificial Sequence: Synthetic coding sequence
  source 1..129: mol_type = other DNA
atggacgtgctgagccccggccagggcaacaacaccaccagcccccccgcccccttcgagactggcggtaatacaacaggcatctccgatgtcaccgtttcttaccaggtgataacatccttgctatag

SEQ ID NO: 177343 - DNA, 1173 bp, synthetic construct
  misc_feature 1..1173: note = Description of Artificial Sequence: Synthetic coding sequence
  source 1..1173: mol_type = other DNA
atggaggagcccggcgcccagtgcgccccccccccccccgccggcagtgagacctgggtgccacaggcaaatctgtccagtgcaccaagccagaattgctccgccaaggactacatctatcaggactctatctccctgccatggaaagtgttgcttgtgatgctgctcgctctgattacgcttgcaactactctgtcgaacgcgttcgtgatcgccacagtgtatcggaccaggaagctccatactcccgccaattacctgattgcctcacttgccgtgaccgatctgctagtttctattttggtgatgccaattagcacgatgtacacagttaccggcaggtggacccttggtcaggtcgtgtgcgatttttggctgagctccgatattacctgctgtacagcctccattctgcacctgtgcgtcatagccctcgatcggtactgggctatcaccgatgctgtcgaatacagcgcaaaacggaccccgaagagggcagcagtgatgatagcacttgtgtgggttttttctataagcatttcactgcccccatttttttggagacaagccaaggctgaagaagaggttagtgagtgtgtcgtcaacactgatcatatactgtacactgtctattcaaccgttggtgctttttacttcccaaccctgttattgatagctctctatggccgaatctacgttgaggctaggtctagaatactgaaacaaacacctaacaggacgggcaaaagactgactcgagcccagttaataaccgatagcccagggagcacctcatccgtgacctctataaatagtcgggtgcctgacgtgcctagcgaaagtgggtcccccgtctatgtgaaccaggtgaaggttcgggttagtgacgccctgctcgagaagaaaaagcttatggctgctcgggaaagaaaggccacaaagaccctgggcattatattaggcgcctttattgtttgttggttacccttttttataatctctctggtgatgcctatctgcaaggacgcatgctggttccatctcgccatcttcgacttcttcacctggcttggatatctgaactcccttatcaatcctataatttataccatgagcaatgaggatttcaagcaggcgtttcacaagttgattcggttcaaatgtacatcctag

SEQ ID NO: 177344 - DNA, 1134 bp, synthetic construct
  misc_feature 1..1134: note = Description of Artificial Sequence: Synthetic coding sequence
  source 1..1134: mol_type = other DNA
atgagccccctgaaccagagcgccgagggcctgccccaggaggccagtaatcgttcccttaatgccacagaaacctcagaggcatgggaccctaggacgttacaagctctgaagatctcgcttgcggtagtactcagcgtgattaccctggcgacagttcttagcaacgcctttgtgctgaccacgatccttctgactagaaaactccatacgcccgcaaactacttgatcggaagtctggccactaccgatctgctggtaagcatcttggtcatgcctattagcatagcctacactattacgcacacctggaattttgggcagatactgtgtgatatctggctgtcaagcgacattacctgctgcacagcatccatcctccacctttgtgttattgctctggaccggtactgggcaatcacagacgccctggagtacagcaagcgccgtacggctggacatgctgccaccatgatcgctatcgtgtgggccatatctatttgcattagcatcccacctcttttctggcgacaggctaaagcccaggaggagatgtccgactgtttggttaatacatcccagattagctatacgatttacagcacctgtggtgccttctacataccctctgtcctgctgattattctttatggccggatttaccgcgccgctagaaacagaatcctcaaccccccttctctgtatggaaagaggttcaccaccgctcatttgataacggggtctgccggctcctctctatgctccctaaactctagcctccacgaaggccattctcactcagcaggtagccccctgttctttaaccatgtgaagattaagctggcggattctgcactagagcggaagaggatatctgccgcacgggagcgaaaagctaccaagatcttgggaattatactgggggccttcatcatttgctggttgcctttttttgtggtcagtctggtgctcccaatctgccgcgactcttgttggattcatccggcactgtttgacttctttacctggctcggatacctgaatagtctaattaacccaattatctacactgtgttcaatgaggagtttagacaggcctttcaaaagatagtcccgttccggaaggcctcatag

SEQ ID NO: 177345 - DNA, 1134 bp, synthetic construct
  misc_feature 1..1134: note = Description of Artificial Sequence: Synthetic coding sequence
  source 1..1134: mol_type = other DNA
atgagccccctgaaccagagcgccgagggcctgccccaggaggcctcaaaccggtccctgaatgccaccgaaacatctgaggcatgggacccacgaactctgcaagcactgaagattagcttagccgttgttctcagtgtcataaccctcgccacagtcctgtctaatgcgtttgtgctcacgactatattattgaccagaaagcttcacacacctgcaaattacctaatcggcagcctagccactacagatctgctggtgtccattctagtcatgccaatctcaattgcttatactattacccacacttggaacttcggccagattttatgtgatatatggttgagctccgacattacatgttgcaccgcaagtatccttcacctatgtgtgattgcactagataggtactgggcgattaccgacgctttggagtacagcaagagacgtaccgctggtcacgctgctacaatgattgccatagtgtgggccatttcaatctgcatatctatacctcctttgttctggaggcaggccaaggctcaggaggagatgtccgactgtttggtcaatacgtcccagatcagttacaccatctattcgacgtgcggggcattctacatcccaagtgtgctcctgataattctgtatggccggatttatcgggcggcacggaaccgcattctcaaccctccttccttgtatggaaagcggtttaccactgctcatctcatcacgggcagcgcaggctcaagcctctgtagcttgaatagctcactgcacgaggggcactcccattcggccggttcacctttgttctttaaccatgtgaaaattaagttggccgacagtgctcttgaaaggaagagaatctctgctgccagggagcgtaaggctacaaaaatcttaggcataatactcggggcgttcattatttgttggttgccgtttttcgtggtcagcctcgtgctaccaatctgtagagatagttgctggatccatcccgccctttttgatttttttacatggctcgggtatctgaattccctcatcaatcccatcatctatacagtcttcaatgaagaatttagacaagcgttccagaaaattgtacccttcaggaaggcgtcatag

SEQ ID NO: 177346 - DNA, 1098 bp, synthetic construct
  misc_feature 1..1098: note = Description of Artificial Sequence: Synthetic coding sequence
  source 1..1098: mol_type = other DNA
atgaacatcaccaactgcaccaccgaggccagcatggccatccggccaaagacaattaccgaaaaaatgcttatctgcatgaccctcgtcgtcatcaccactctaactacgctcctgaaccttgcagttattatggctatcggaacaacaaaaaagctacaccagcccgcgaattacctgatctgtagcctggcagttactgatcttttagtcgctgtcttagtgatgcctctgtcgataatttacatcgtcatggacagatggaagctgggttacttcctgtgtgaagtgtggcttagcgtggacatgacttgttgtacatgctctatactacacctctgtgtgattgcactcgaccgctactgggccattacaaatgccatagaatacgcccgcaaacggaccgccaagagagctgctctgatgatcttgaccgtgtggacaatatcaatctttatctccatgccccctctcttctggagatcccacagacgtttgagtcccccaccctcccagtgcaccatacagcacgatcacgtgatctataccatatacagtactttgggggccttctatatccccctgacccttattttaatactttactaccgtatctatcatgccgccaaatcattgtatcaaaagcgaggttctagtcgccacctgtcaaatcgatcaactgacagtcagaactctttcgcctcatgtaaattgactcaaacgttctgtgtttccgatttcagtacttcagacccgacaaccgagttcgaaaaatttcatgcttcaatcagaatcccgccctttgataatgaccttgaccaccccggggagcggcaacagatatctagcacccgcgagagaaaggcggcccgtatcctcggactcattctgggcgccttcatactgagttggctcccctttttcataaaggaacttattgtaggactgtccatctacaccgtgtcctcagaagttgctgacttcctgacctggttgggatacgtgaactctctgattaatccactactttatacatcgtttaacgaggactttaagttagcgtttaaaaagttgattcgctgcagggaacatacttag

SEQ ID NO: 177347 - DNA, 1098 bp, synthetic construct
  misc_feature 1..1098: note = Description of Artificial Sequence: Synthetic coding sequence
  source 1..1098: mol_type = other DNA
atgaacatcaccaactgcaccaccgaggccagcatggccatccggcccaagaccatcaccgaaaagatgctgatctgtatgaccctagtagtcataacaactttgactaccctcctcaacctggctgtcatcatggcaattggcacaactaagaaactgcaccagcccgcaaattacttgatttgcagtctggcagtgactgatctgcttgtggcagtgctggtcatgcctctctcaatcatctatatcgtgatggataggtggaaattggggtacttcctttgtgaagtgtggttatccgtcgacatgacttgttgcacctgttcaatcttgcacctgtgcgtgatcgctcttgaccgttactgggctatcacaaacgctatcgagtacgcaagaaaacgtacagctaagcgagctgctttaatgatcttaacagtgtggactatcagtattttcataagcatgccccccctgttttggaggtctcaccgcagattgtcccccccccccagccagtgcactattcagcatgaccatgtgatttatacaatatactctaccctaggagccttctacataccactcacattgattttaattttatattaccggatttaccacgctgcgaagagcctctaccagaagcgaggctcctcccgccatctgtccaatagatctacggatagccagaattcgttcgcaagctgcaaactcactcagactttctgcgtgtctgacttctctaccagcgaccccacaacagagttcgaaaagtttcatgccagcatccgcatccctcctttcgacaatgatttagatcacccaggtgagaggcaacaaatttcaagtacacgagagagaaaggctgctcggatcctgggtctgatactcggggcattcattctctcttggcttcctttctttatcaaggagcttattgtgggattgtccatttacaccgtgtccagcgaagtcgcggattttctaacttggctcggttacgtgaatagtcttatcaaccctctgctctacacctcttttaacgaagactttaaacttgcttttaagaagttaatcaggtgtcgcgagcatacctag

SEQ ID NO: 177348 - DNA, 1101 bp, synthetic construct
  misc_feature 1..1101: note = Description of Artificial Sequence: Synthetic coding sequence
  source 1..1101: mol_type = other DNA
atggacttcctgaacagcagcgaccagaacctgaccagcgaggagctcctcaatcggatgccatccaaaattctagtgagccttactctgtccggcctggctctgatgacaacaacgattaacagcctggtgattgcggccatcatcgtcacacggaagctgcaccaccctgccaattacctgatctgttctctggccgtaacagattttctggtggcagtcctggtgatgccgttcagcatcgtctatattgtacgcgaatcatggattatgggacaggtagtgtgcgatatctggctatcagtcgatatcacctgctgtacctgttccattttacacttatctgccatcgcactggatagatatagggccatcaccgacgccgtcgagtatgcccgcaagcgtacaccaaaacacgcaggaattatgatcactattgtgtggataatcagcgtattcatttctatgccgccccttttttggcggcatcaggggacaagccgtgacgatgagtgtattatcaaacacgaccacattgtgagcacaatctatagcacatttggcgccttctacattcccctggccctgatcctgatcctctattataagatctacagggctgcgaaaacattgtaccacaaacgccaggcaagcagaattgccaaggaggaggtaaatgggcaggttctgctggagtccggagagaaatccactaagtctgtgtccacaagctacgtgctcgaaaagagtttgagcgatccatccaccgattttgataaaatccactcaacagtgaggtctctgcgctctgagtttaaacacgagaaatcttggcgacggcagaagatcagcggcacccgcgagcggaaagctgccacaacactcggtctcattcttggggcctttgtcatctgctggctgccgtttttcgtgaaggagcttgttgttaatgtttgtgacaaatgcaaaataagcgaggagatgagcaattttctcgcgtggttgggttatttgaactccttaattaatcctctgatctataccatcttcaacgaggacttcaagaaggccttccaaaagctggtcagatgccggtgttag

SEQ ID NO: 177349 - DNA, 1416 bp, synthetic construct
  misc_feature 1..1416: note = Description of Artificial Sequence: Synthetic coding sequence
  source 1..1416: mol_type = other DNA
atggacatcctgtgcgaggagaacaccagcctgagcagcaccaccaacagtcttatgcagttgaacgacgataccaggttgtacagcaacgatttcaactccggagaggcaaacacttctgacgccttcaactggacggtcgactccgaaaacaggaccaacttgtcttgcgaaggttgtttatcaccttcttgtttgtcacttcttcatttgcaagagaagaactggtctgccctgctgaccgcagtggttataatcctgacgattgccggtaacatcctcgtgatcatggccgtgtctctggagaagaaactgcagaatgcgacgaactacttccttatgagcctagccattgcagatatgcttctgggattcctggtcatgcctgtgtccatgctgactatcttgtacgggtacagatggcctctgccatccaagctctgcgcagtctggatctatttggatgtcctcttcagtaccgcatctatcatgcacttgtgcgcaattagcctggatcgctatgtcgctattcagaatccaatacaccattctaggttcaacagccgaaccaaagcgtttctcaaaatcattgcagtgtggaccatcagcgtgggcatcagtatgccaatccccgtcttcggattgcaggacgactcaaaagtgttcaaagaggggtcttgtctcctggcggatgataatttcgtgttgatcgggtccttcgtcagtttttttataccgctcaccattatggtgataacttattttctgaccatcaagtcattgcagaaagaagccacactctgcgtgagtgaccttggcacccgggcaaaacttgcctcattcagtttcttgcctcaatcctctctgtccagcgagaaattgtttcagcgatccattcacagagaacctggatcctacaccggtcgcagaacgatgcaaagtatatcaaatgaacagaaagcctgtaaggttctgggtatcgtattctttctgttcgttgtaatgtggtgtccattcttcataactaacataatggctgtgatttgtaaggagagctgcaacgaggacgtaatcggtgccctgctcaatgtattcgtgtggataggctatctcagttccgcagtgaatcctctggtttacacactttttaacaagacatatcgctctgccttttcccgatacatccaatgtcagtacaaagagaacaaaaagcccctacagctgatcctggtaaacactattcctgctctggcgtacaagagctcccagttacagatgggacagaagaaaaactccaaacaggacgctaaaaccacggacaatgattgttcgatggtcgcccttggaaaacagcactccgaagaggctagtaaagacaactccgatggcgttaacgaaaaggtgtcctgcgtctag

SEQ ID NO: 177350 - DNA, 1416 bp, synthetic construct
  misc_feature 1..1416: note = Description of Artificial Sequence: Synthetic coding sequence
  source 1..1416: mol_type = other DNA
atggacatcctgtgcgaggagaacaccagcctgagcagcaccaccaatagcctgatgcagcttaacgatgacacccgtctctacagtaatgacttcaactcaggagaggcaaatacatccgatgcctttaattggactgtcgattcagaaaataggacaaatttgtcatgtgaaggctgcctgtctccttcctgtttgtcactcctccacttgcaggaaaagaactggtccgccctcttaactgccgtcgtgatcattttgaccatcgctgggaacatcctggtcattatggcggtttcactcgagaaaaagctgcagaacgcaaccaattattttttgatgagtctcgctatcgccgatatgctattgggtttcctcgttatgccagtaagtatgttaactatactctacggctaccgatggccgctaccatctaagctgtgcgccgtctggatctacctggatgtgctgttctctaccgcaagtatcatgcatctttgtgctatttcccttgaccgctatgtcgccattcagaatcctatccatcattcacgctttaattcaagaacgaaagcattcctgaaaattatcgctgtctggacaatttcggtgggaatttctatgccgattcccgttttcggactccaagatgattccaaggtgttcaaagaagggtcttgtcttctggccgatgataactttgttttgattggttctttcgtatctttttttattccgctgaccatcatggttattacatacttcctgactatcaagtcattacagaaggaggccaccctttgcgtgagcgatctgggcactcgggcgaagcttgcaagcttttcattcctgccgcagtcttcactgtcttctgagaaactgttccagcggagcattcacagagaaccaggctcctataccggacgtcggaccatgcagagcattagcaacgaacaaaaagcttgcaaagtgcttggcatcgtttttttcctttttgtggtgatgtggtgccctttctttattaccaacattatggctgtgatttgtaaggagagctgtaacgaggatgtgatcggggcactgcttaatgtcttcgtgtggatcgggtacctatcttctgcggtgaatccgctagtgtacacgctcttcaacaagacctatagatcagcattctctcgttatattcagtgtcagtacaaagaaaataagaagccactccagctcatcctggtcaacacgatccccgcactggcttacaagtcttctcaattacagatgggtcagaagaagaacagcaaacaggacgcaaaaactacagataatgactgctcaatggtggcactgggcaagcaacactctgaggaagcctccaaggacaattccgatggtgtgaacgaaaaggttagttgtgtgtag

SEQ ID NO: 177351 - DNA, 1164 bp, synthetic construct
  misc_feature 1..1164: note = Description of Artificial Sequence: Synthetic coding sequence
  source 1..1164: mol_type = other DNA
atgcagttcctgaagagcgccaagcagaagcccaactactaccacattatgctggtggaggatcaggaggaaggaacactccaccagttcaactattgtgagagatgcagtgaatctcagaataacaagtgtataagctgcgtggaccctgaagacaaatggtatcgctggcctctcccatcgaaactctgtgcggtgtggatctatctggacgtgctgttctcaaccgcttcaatcatgcatctatgcgcaatttctttggatagatacgtggccattcagaatcccattcatcacagccggttcaactcacgcacaaaagctttcctgaagatcatcgcagtatggacgatttctgtggggattagtatgcctattcccgtatttgggctgcaggacgattccaaggtgttcaaggagggttcttgtctcttagctgatgacaactttgtgctaataggatcttttgttagtttcttcatccctttgacaatcatggtgatcacctacttcctcaccatcaaatccctgcagaaagaagcaacactctgtgtgagcgacctgggtaccagagctaagctggcaagcttctcctttctcccacaatcttcattatcttctgaaaagctgttccagaggagcattcaccgagaaccaggatcctacacagggagacggaccatgcagagtatcagcaacgagcaaaaagcttgcaaggtactcggcatcgtctttttcctgtttgttgtcatgtggtgccccttctttattacaaacatcatggccgttatctgcaaggagagttgtaacgaggatgtgatcggggcactgttaaacgtattcgtttggataggttatctatcctcagccgtgaatcccctcgtgtacactttattcaacaaaacatacaggagtgccttctcccgatacatccagtgtcagtataaggaaaacaagaagcccttacaactcatcctggtcaatacaattcccgcactggcttacaaatcctctcagctgcagatggggcagaagaaaaattcaaagcaagacgcgaagacaactgataatgactgttctatggtagctcttggaaaacagcactccgaagaagcatcaaaggacaattcagacggagtgaatgagaaggttagctgcgtgtag

SEQ ID NO: 177352 - DNA, 1446 bp, synthetic construct
  misc_feature 1..1446: note = Description of Artificial Sequence: Synthetic coding sequence
  source 1..1446: mol_type = other DNA
atggccctgagctaccgggtgagcgagctgcagagcaccatccccgagcacatcctgcagtctacattcgtccacgtaatttcctccaactggagcgggctgcagaccgagagtattcccgaggagatgaaacagatcgttgaggagcaggggaataagcttcattgggcagccctattgattctaatggttatcattccaaccatcgggggtaacacactcgtcatcttggccgtcagtttagagaaaaaattgcagtatgccacgaactatttcttgatgtctttggccgttgccgatctcctcgtgggcctgttcgttatgccaatcgcacttcttaccattatgtttgaagccatgtggccattgcccctggtcctctgcccggcctggctgttcctggatgtgctcttctcaactgcttccatcatgcacctgtgcgcaataagcgtggatcggtatattgccatcaagaagcccattcaggccaatcagtataatagccgggctaccgcattcattaagattacagttgtttggttaatctccattggaattgctattcccgtgcccattaaggggattgaaaccgacgtcgacaacccaaacaatatcacgtgcgtgttgaccaaagagcgatttggggacttcatgttgtttgggagcctggccgccttcttcacaccacttgctataatgatagtcacttatttcctcaccatacacgctcttcagaagaaggcatacctggtgaagaacaaaccaccacagagattgacctggcttaccgtgtcaactgtttttcagagagacgagacaccatgcagttcccctgagaaggtcgctatgttggatggatcacggaaagataaggccctgcctaatagcggcgacgaaaccctgatgaggcggaccagcacaattgggaagaagtccgtccagacaattagtaacgaacaacgggcctctaaggtgctggggatcgtcttcttcttatttctattgatgtggtgcccattctttatcactaacattactctggtgctctgtgactcctgcaaccagactacgcttcagatgctgctggaaatttttgtgtggataggttatgtctcctccggtgtcaatccgctggtctataccctgttcaataagacattcagggacgccttcgggcggtatattacctgtaactatagggcaacaaaatcggtaaagaccctgcgaaagcgatccagtaagatatatttcaggaatccaatggcggagaattccaagttttttaagaaacacgggattagaaatggcataaatccagccatgtatcagagccccatgcggctgcgcagcagcaccatacaatctagctccatcattttgctggacacactgctacttaccgaaaatgagggcgataaaactgaggaacaagtcagctacgtatag

SEQ ID NO: 177353 - DNA, 195 bp, synthetic construct
  misc_feature 1..195: note = Description of Artificial Sequence: Synthetic coding sequence
  source 1..195: mol_type = other DNA
atggtgatcatccccaccatcggcggcaacaccctggtgatcctggccgtcagcctcgagaaaaagctgcagtatgcgacaaactacttcttaatgagtctcgctgtggcagacctcttggtcgggctgtttgtgatgccaatcgcactgctgacaatcatgttcggcatcgccattcccgtgccaatcaagtag

SEQ ID NO: 177354 - DNA, 1377 bp, synthetic construct
  misc_feature 1..1377: note = Description of Artificial Sequence: Synthetic coding sequence
  source 1..1377: mol_type = other DNA
atggtgaacctgcggaacgccgtgcacagcttcctggtgcacctgatagggctcctcgtatggcaatgcgatatttcagtatcccccgtggcagctatcgtcacggacattttcaacacgtcagacggggggcgcttcaagttcccagatggcgtccagaactggcccgctttgagcattgttatcatcatcatcatgacaatcggaggtaatattttagtaattatggccgtttctatggagaagaagctccataatgcgacaaattattttctaatgtcactagctatcgccgacatgctcgttggtctgctcgtgatgccgcttagcctcctagccatcctttacgattacgtgtggcctctgccaaggtatttgtgcccagtgtggatatccctcgatgtgctgttctctacagcaagcattatgcatttgtgtgccatatccctggaccggtacgtagctatacggaaccctattgaacactcaaggttcaacagtaggacgaaagcaattatgaaaattgcaattgtgtgggctatcagcattggtgtgtctgtccctatccccgttatcgggttaagagatgaggagaaggtcttcgtaaacaataccacctgtgtccttaatgatccaaactttgtgcttatcggatctttcgttgccttttttatacctctcactattatggtgatcacttactgcttaacaatatatgtgctgagacgtcaggctctgatgctactgcatggccacaccgaggagcctccaggactcagccttgactttctcaaatgttgcaaacggaacacagccgaggaagaaaacagtgccaaccctaatcaggatcagaatgcccgaagacgtaagaagaaggaaaggagaccgcggggcacaatgcaggccataaataatgagcgaaaagcctcaaaggtgttgggcatcgtgttttttgtctttctgatcatgtggtgcccattttttatcaccaacatcctaagcgtgctgtgcgagaagtcatgcaaccagaagctcatggagaagctgctgaacgtctttgtctggattggctatgtgtgttccgggattaatcctctcgtgtatacgctgttcaacaaaatctacagacgggcatttagcaactatcttagatgtaattataaggtggaaaagaagcctccggtccgtcagatccctagggtcgctgctactgccctgtcgggccgggagctcaatgtgaatatttacagacatacaaacgagccagtgatagaaaaggcatctgataacgagcctggcatcgaaatgcaggtggagaatcttgagcttcctgtgaacccgtccagtgtggtgagtgaacgaatctccagtgtctag

SEQ ID NO: 177355 - DNA, 747 bp, synthetic construct
  misc_feature 1..747: note = Description of Artificial Sequence: Synthetic coding sequence
  source 1..747: mol_type = other DNA
atggtgaacctgcggaacgccgtgcacagcttcctggtgcacctgatcgggctgctggtatggcagtgtgatatctccgtctcacccgttgccgcgatcgtcacagatatcttcaatacatccgacgggggtaggttcaaatttccggacggggtgcaaaattggccagcattatccatagttataatcataattatgaccataggaggaaatatattggtcattatggcggtgtcgatggaaaagaagctccacaacgctactaactatttcctcatgtcacttgcaatcgccgacatgctagtgggacttctggtgatgccactgtccctcttggccatcctctatgattatgtgtggccattgccaaggtacctttgtcctgtttggatttctttggacgtgctattctcaaccgccagtatcatgcacttgtgcgcaattagcttggaccgctgcattagctcctatccctgcgattggaccgaagggcgacgcaagggcgttcgcgagcaacacgatgtgagggcgcagcgcccaaaattccgctcctattgggtcctgcgctcttttctgcacactgctgacgactatggcgattacgtcctgccagaccatctcaggtcggctcctacctcctttgatgtgacagccagaccccaccggggcaccgcttggaccaagagcggcttcccggaagtcctccaggaagaatatggacgaggtcgggagttgtgcaagccgtag

SEQ ID NO: 177356 - DNA, 1377 bp, synthetic construct
  misc_feature 1..1377: note = Description of Artificial Sequence: Synthetic coding sequence
  source 1..1377: mol_type = other DNA
atggtgaacctgcggaacgccgtgcacagcttcctggtgcacctgatcggcctgctagtttggcagtgtgatatttctgttagtcccgtcgctgccatcgtgactgatattttcaacacttcggatggcggccggttcaagtttcccgacggtgtgcagaactggcctgctttgagtattgtcattattattatcatgacaatcggaggcaacatcctggtcattatggccgtgagtatggagaagaaactacataacgctactaactacttcttgatgagcctcgcaatagcagacatgctggtgggcttgctagtaatgcctctgagtcttctcgcaatcctatatgattacgtttggcctctacccagatatctctgccctgtctggatcagtttagatgtgcttttttccacagcgagcattatgcacctatgcgcaatatctttagacagatatgtcgctatacgaaatcccatcgagcacagtaggttcaactcgaggacaaaggctattatgaagattgccattgtgtgggccattagcatcggtgtgagcgtccctattccggtgatcggtcttcgggacgaagagaaggtgttcgtcaataatacaacttgcgtgttgaacgatcctaattttgtactgataggcagttttgtcgcttttttcattcctctaactattatggttattacttactgcctcactatctacgtattgcgcagacaggccctgatgctgctgcacgggcatacagaagagccccctgggcttagcctggatttcctgaagtgttgtaaaagaaataccgccgaagaagagaatagcgccaatcctaaccaggaccagaacgcccggagacgcaagaagaaggagagacgcccaaggggcactatgcaagcaattaacaacgagcgtaaagccagcaaggtactgggaatagtatttttcgtgttcctcataatgtggtgcccgttcttcattacaaatatcttaagcgttctgtgcgagaagtcatgcaatcaaaaattaatggaaaagctactgaacgtgttcgtgtggatcggatatgtctgctctggaatcaatcctctcgtatacacactcttcaacaagatatacagaagggccttttccaactacctgaggtgtaactacaaagtggagaagaaacctcccgtccgtcaaattccaagagtagccgccaccgcactgtctggacgtgaacttaatgtgaacatttaccggcatacgaatgagccagtcattgagaaagcctctgacaatgagcccgggatcgagatgcaggtggagaatcttgaactgccagttaaccccagttcagttgtgtctgaacggatatctagcgtctag

SEQ ID NO: 177357 - DNA, 840 bp, synthetic construct
  misc_feature 1..840: note = Description of Artificial Sequence: Synthetic coding sequence
  source 1..840: mol_type = other DNA
atggccagcatgagcatcgtgaaggccaccagcaacaccatcagccagtgtggatggtctgcgtccgccaattggaccccaagcatcagccccagcatggacaggggcgagaggagcccctcagcactatctcctacccaagtagcaatccggcgcaggtgtcgtcccagcccctacgttgtcaacttcttggtcccaagcgggatcctgatagccatagatgccttatccttttacctacctctggaatcaggaaattgcgctccctttaagatgaccgtcctgctgggctattccgtgttcctgctgatgatgaacgacttactgcccgcaactagcacctctagccacgccagcctggtccgccctcatccatccagggaccagaagagaggcgtgtattttgctttatgtctgtcattaatggtgggctcccttctggagactattttcattacccatctgcttcacgtggccactactcaaccacttccactgccacgctggctgcattctcttctactgcattgcacaggacaaggccgctgctgtcccacagcccctcaaaaaggaaataagggcccgggattgacccctactcatttgcccggagtcaaggaacctgaggtgtctgccggccaaatgccaggacctggagaggccgaacttaccggtggatctgaatggaccagagcacaaagagagcacgaggcacagaaacagcactcagtggagctctgggttcagttctcacacgccatggatgccctgctgttccggctttacctgcttttcatggcgagtagcataatcaccgttatatgtctatggaacacatag

SEQ ID NO: 177358 - DNA, 1365 bp, synthetic construct
  misc_feature 1..1365: note = Description of Artificial Sequence: Synthetic coding sequence
  source 1..1365: mol_type = other DNA
atgcagaagcacagccccggcccccccgccctggccctgctgagccagtccttacttacaactggcaatggcgacaccctaattatcaactgtccgggttttgggcagcatagagtagacccggcagcttttcaggccgtttttgacagaaaggccatagggccagtgaccaactatagcgtggcaacgcatgtaaacatttcctttacgctctcagccatctggaattgctatagccgtattcataccttcaactgccatcacgctcggccgtggcacaatcagttcgtgcagtggaacccagacgaatgtggagggatcaagaagtctgggatggcaaccgaaaatctgtggctcagtgacgtcttcatcgaggaatcagttgaccaaacacccgccggattgatggcctctatgagcatcgttaaagcaaccagcaatacgatttcccagtgcggatggagtgctagcgcgaactggactcctagcatatcccccagcatggatcgagcccgcgcgtggagacgcatgtcacggagctttcagattcatcaccgaacatcattccggacgcgccgcgagtgggtgctattagggatacagaaaagaacaatcaaggtgacagttgctactaatcagtacgagcaggcgattttccatgttgccatccggaggcgttgtagaccttcaccttacgtggtaaattttctggtgcccagcgggatccttatagctatcgacgccttgagcttttatttacccctggagagcggcaactgtgctccctttaagatgaccgtgttactcggctactccgtctttctcctgatgatgaatgaccttctgcccgcaacatcaacatctagccacgcatccctggtggctcccctggctctcatgcaaacccctcttcccgccggggtgtatttcgctctgtgtctgagtttgatggtggggtcactcctggagacgattttcatcacacatctcctgcacgtcgcaactacccagcctctacctcttccgcggtggcttcacagtctgttactgcattgcactgggcagggaaggtgttgccccacagcacctcagaagggaaataaaggcccaggcctaactcccacccacctgcccggagtgaaggagccagaggtcagtgcaggacagatgccaggacccggagaggccgagttgacggggggtagcgaatggacccgggcacaaagagaacacgaggcccaaaagcaacactccgtggagctctgggtccagttttcccatgctatggacgcactgttgttcagactgtacctcttgttcatggcttcttcaattataaccgtcatctgcctgtggaacacatag

SEQ ID NO: 177359 - DNA, 1215 bp, synthetic construct
  misc_feature 1..1215: note = Description of Artificial Sequence: Synthetic coding sequence
  source 1..1215: mol_type = other DNA
atggagcggggctggttccacggcaagggcttcctgctgggcttcattttgcacctactgctccaggactcacatctccagttggtgacttcctttctatggttaaacatgtggaatccagacgaatgcggcgggataaagaaatccggaatggccactgagaatctctggctcagcgatgtgttcattgaggagagtgtagatcaaaccccggctggactgatggccagcatgtcaattgttaaagctacaagcaacactatttcacagtgcggctggagcgcatctgctaactggacgccttcaatctcgcccagtatggacaggggtgaaaggagcccgagtgccttgagcccaacacaggtgacaagagcctggaggaggatgtcacgctcatttcaaattcatcataggacaagcttcaggacaaggagggagtgggtgctcctgggtatacagaagaggactataaaagtcaccgtcgcgacaaatcaatatgagcaagcaatctttcacgttgccataaggcgaaggtgtagaccatcaccctacgtggtgaatttcttggtgcccagcggcatactgattgcaatcgatgccctgtcgttttatcttccgctggaatccggtaattgcgctccattcaagatgacggtgcttcttggttattctgtcttcctccttatgatgaatgatctgctgcccgcaactagcacctcatcacacgcatcactagtgcggccacacccctccagagaccagaagaggggcgtgtactttgctctgtgcttgagtcttatggtaggaagcctgctggagacaatattcatcacccacctgctgcacgtggcaaccacgcaacctctgcctctcccacgttggctccactccctgctcctgcactgcaccggccaggggcggtgctgccccaccgctccacaaaaggggaataagggcccagggcttactcctacccaccttcccggggtgaaggagccagaagtgagcgcaggacagatgcctggccctggcgaggccgagctgactggaggtagtgagtggacgagagctcagagggagcacgaagcccagaagcagcactccgtcgagctttgggtgcagttcagccacgctatggacgcactgctcttccggctctatctgttgttcatggccagttccatcataacagtgatctgcctgtggaacacttag

SEQ ID NO: 177360 - DNA, 702 bp, synthetic construct
  misc_feature 1..702: note = Description of Artificial Sequence: Synthetic coding sequence
  source 1..702: mol_type = other DNA
atggtggccatccggcggcggtgccggcccagcccctacgtggtgaattttctggtcccgtcagggatcctcattgcaatcgatgcactgagtttttatctcccgttggaatccgggaactgcgcacccttcaagatgacagtcttgctggggtattcagtttttttgctgatgatgaacgacctccttccagccacatctacttcttcacatgcctcactggtcagaccccacccttcacgagatcagaagcggggggtgtattttgctctgtgcctgagccttatggtgggatccctgctcgagacaattttcatcacccacctgctgcatgtggccacaacacagccgctcccactcccaaggtggctccactccctgctgctgcattgcacaggccaagggcgatgctgccccaccgcaccgcaaaaggggaacaaagggccaggcctgaccccaacccatctgcccggggtcaaagagccggaggttagcgctggacagatgcccggacctggcgaggccgagctgaccggagggtccgaatggacaagggctcaacgagagcacgaggcccagaaacagcactccgtcgagctgtgggtacagttttctcacgctatggatgccctcctgtttcgcctctatctacttttcatggcctcctcaatcattactgtgatctgcctctggaacacctag

SEQ ID NO: 177361 - DNA, 1344 bp, synthetic construct
  misc_feature 1..1344: note = Description of Artificial Sequence: Synthetic coding sequence
  source 1..1344: mol_type = other DNA
atggagggcggctggcccgcccggcagagcgccctgctgtgcctgaccgtgtctctccttttgcagggtcgcggcgatgcattcaccatcaactgcagtgggtttgaccaacacggcgttgaccccgccgttttccaagccgtcttcgaccggaaagcttttcgccccttcaccaactattctatccctacaagagtcaatatttccttcaccctcagcgcaatcctcggcgtggacgcgcagcttcagctgctgacctctttcttgtggatggacctcgtgtgggacaatccatttataaactggaaccctaaggagtgtgtagggatcaacaagcttactgtcctcgccgagaacctttggctgcctgatatattcatcgtagagagcatggacgtggatcagaccccatcagggctgactgcatacatttccagcgagggccgaatcaagtacgataagccaatgagggtgaccagcatctgcaatctggacatcttctattttccttttgatcaacagaactgtacttttaccttctcctcattcttgtacaccgtagactccatgctgctgggtatggataaagaggtgtgggagattacagacacaagcagaaaagtgatacaaactcagggagaatgggagctgctgggaattaataaggctaccccgaaaatgagcatgggaaacaacctgtatgaccagattatgttctacgtggcgatcaggcggcgtccttctctctatattattaacctccttgtgccatcatcctttctcgtcgccatcgacgccttatcgttttacttacccgcggagtctgaaaatcgcgcacctttcaaaataacactgctgctaggatacaatgtgttcctgcttatgatgaacgacctcttgcccgcctctggtactccccttattagcgtctactttgccttatgcttgtccctgatggtggtgtctcttctggagacagtctttattacttacctcctgcacgtggctactacacagccacctccaatgccaaggtggcttcactccttactgctgcattgtacctccccggggcggtgttgtccaacggccccccaaaaaggtaataaaggcttgggcctcaccctcacccacttacccgggcctaaagagcccggagagttagcgggaaaaaagctggggcccagggagacggaacctgatggagggtccggatggacaaaaacacagctgatggagctatgggtgcagtttagtcatgctatggatacgctcctttttcgactgtacttactgtttatggctagctccatcctgaccgtgattgttctgtggaacacttag

SEQ ID NO: 177362 - DNA, 1416 bp, synthetic construct
  misc_feature 1..1416: note = Description of Artificial Sequence: Synthetic coding sequence
  source 1..1416: mol_type = other DNA
atgctggccttcatcctgagccgggccaccccccggcccgccctgggacccctgtcctacagggaacaccgggtggcgttgcttcacctgacccactccatgagtaccaccggaagaggcgtgacatttacaatcaattgcagtggcttcggtcagcacggggccgatcctacggcactcaacagcgtgtttaatcgcaaaccttttagacccgtgacaaatatttctgtacctacgcaagttaacatcagctttgcaatgtccgcgatactggatgtgaacgagcagctacacctgctgtcatccttcctgtggctcgaaatggtctgggacaatcccttcattagttggaaccccgaggagtgcgagggcatcacaaaaatgtccatggcagctaaaaacctctggctgccagatatattcatcatcgagctgatggatgttgacaaaacacccaagggattgactgcatacgtctcaaatgaaggccgcattagatacaagaaaccaatgaaagtggactcgatttgcaacctcgacatcttctactttccctttgaccagcagaattgtaccctaaccttttcctccttcctctatactgtggattctatgctgctggacatggaaaaggaagtatgggaaatcactgatgcatcaagaaatatcctacagacccacggcgagtgggaacttctggggctgagcaaggctactgcgaagctgtcccgagggggaaatctgtatgaccagattgtgttttacgtagcgattcgcagacgccccagcttgtatgttatcaatttattggtccctagcggttttctcgtggccatcgacgcactgtctttttacttgccagtgaaatccggtaacagagtcccttttaaaatcacactgctgctgggctataacgtgttccttctaatgatgtccgacttacttccaacttcaggcacccccctgattggcgtttacttcgcactgtgcctgtctctgatggtgggttctctcctggaaacaattttcatcacacatctgctccacgtagcgaccacacaacctcccccgctgcctcgctggctgcattccctgctcctgcactgcaattctccaggacggtgctgtccaacagccccacagaaggaaaataagggacccggcctcactccgactcatttgcccggggtgaaagaaccggaagtttctgctggacagatgcccgggccagcagaggctgaacttacgggaggcagtgaatggactcgggctcaaagagaacacgaggctcagaagcagcacagcgtggagctatggctgcagttttcacacgctatggatgctatgcttttcagactttatctgttgttcatggccagctctataattacagtaatttgcctctggaatacttag

SEQ ID NO: 177363 - DNA, 1371 bp, synthetic construct
  misc_feature 1..1371: note = Description of Artificial Sequence: Synthetic coding sequence
  source 1..1371: mol_type = other DNA
atggagggcagctggttccaccggaagcggttcagcttctacctgctgctggggtttctgctccagggccggggtgtgaccttcaccataaattgctccggattcggtcagcatggcgcagaccccaccgctctgaattctgtgtttaaccgcaaaccatttaggcccgtcacaaatatatcagtccccactcaagtcaacatttctttcgccatgtctgctattctcgacgtgaacgaacagcttcacctgctgagctcttttctttggctggagatggtgtgggacaatccctttatttcgtggaatcctgaggaatgtgagggaatcactaagatgtccatggcggccaagaacttatggctgcccgacatcttcatcatcgaactgatggatgtcgacaaaacccctaagggcctgacagcttatgtgagcaatgagggaaggattaggtataagaaaccgatgaaagtggactcaatttgtaacctagacattttttatttcccttttgaccaacaaaactgtacccttacgttcagttcctttttgtataccgtggacagcatgctgctggacatggagaaggaggtttgggaaattaccgacgccagccgcaacattctgcagactcacggcgagtgggagctacttgggttaagcaaggctacggctaaactatctcgaggagggaacctatacgatcagattgttttctacgtagctatacggcggaggccgtccctctacgtgattaatctacttgtgcctagcggattcctggttgctatcgatgccttgagtttctacctgcccgtgaagtccgggaaccgggttcccttcaagatcaccctccttctgggatacaacgtttttctccttatgatgtcagaccttctccctacttccggtacaccacttattggcgtgtactttgccctgtgcctaagcctgatggtaggttcactgctcgaaactatatttatcacccatctgctgcacgtggctactactcaaccacccccactgccccggtggctacactccttgctattgcattgtaattcccccggtcgctgctgtcccaccgcaccacagaaggagaataaaggccctggactcacacccacacatttacccggggtcaaagaacctgaggtttcggccgggcagatgcctggccccgctgaggccgaactgactggcggatccgagtggacaagagcacagcgtgagcacgaggcacaaaagcagcatagcgtcgagctgtggctgcagttctctcatgctatggatgctatgctgttccgactttacttactcttcatggcatcttctattattacagtgatctgcctttggaatacctag

SEQ ID NO: 177364 - DNA, 1326 bp, synthetic construct
  misc_feature 1..1326: note = Description of Artificial Sequence: Synthetic coding sequence
  source 1..1326: mol_type = other DNA
atggagggcagctggttccaccggaagcggttcagcttctacctgctgctggggtttctgctgcagggcaggggggttacatttaccattaactgctccggatttggtcaacacggggctgatcccactgctctgaatagtgtattcaacaggaaaccatttaggccagtgactaacatatctgttcccacccaggttaatattagtttcgcaatgtctgccatcttagacgtggtgtgggacaaccctttcattagttggaacccggaggagtgtgaaggtattaccaaaatgtctatggctgcaaagaacctttggctgccagatattttcattatagagctgatggatgtcgacaagactcccaaggggctaacggcttatgtgagcaacgaaggtcgcataagatataagaagcctatgaaggtggattccatttgcaacctcgacatcttctattttccttttgaccaacagaattgtacactgaccttctccagtttcctttacaccgtcgactctatgctgcttgacatggagaaggaggtgtgggaaatcacggatgcttcaagaaacatactgcagactcacggtgaatgggagttactggggttgtcaaaagcaaccgccaaactttctcgtggagggaacctgtatgatcagatagtgttctacgtagccatcaggaggaggccctctctgtatgtgatcaacctgctcgtgccctctggatttcttgttgcaattgacgccctgagtttttatcttcccgtcaagtccggcaacagagtcccgtttaagatcacccttctgcttgggtacaatgtattcttgctgatgatgtctgatctgctgcccacatctgggactccgctgattggagtttacttcgccctttgcttaagccttatggtcggaagtctcctggagacgatctttatcacacatttgttgcacgttgcaaccacacagcctccccctctgcctagatggctgcacagtttgttgctacactgcaatagcccgggaaggtgttgcccaaccgccccccaaaaggaaaataagggacccggactcacaccgacccatctcccaggggtgaaagaacctgaagtctcggccggacaaatgccaggccccgccgaggctgagttgactggaggctccgagtggacccgcgcacagagagagcatgaggcccagaaacagcattccgtggagttatggctccaatttagtcatgcaatggatgctatgctgtttcgtctctatcttctatttatggcgtcatcaattataacagtgatttgtctgtggaacacttag

SEQ ID NO: 177365 - DNA, 1371 bp, synthetic construct
  misc_feature 1..1371: note = Description of Artificial Sequence: Synthetic coding sequence
  source 1..1371: mol_type = other DNA
atgctggccttcatcctgagccgggccaccccccggcccgccctgggtcccctgagctatcgggagcacagggtggccctgttgcatttgactcacagcatgtcaaccaccggacgtggtgtgacctttacaataaactgttcggggttcgggcagcacggagcggatcctacagccttgaattctgtattcaataggaagccctttcggccggtgactaacatcagtgtgcccacgcaagtaaatattagctttgctatgtccgctattctggacgtcgtttgggataacccctttatctcctggaatccagaggagtgcgaaggtatcactaaaatgagtatggcagctaagaatctctggctgcccgatatctttatcatagagctcatggatgtcgacaagactccgaagggtctcaccgcatacgttagcaacgaagggcgtatccggtataaaaagccaatgaaggtcgacagcatatgcaatttagacatcttctacttcccctttgaccaacagaattgcacacttaccttttcttctttcctttatactgtggatagtatgctgttagacatggaaaaggaggtatgggaaataacagatgccagccgcaacatccttcaaactcacggagaatgggagttactgggactgtcgaaggccaccgccaaattatcgcgggggggcaatctttacgaccagatcgtgttctatgtggctatccgcagacgaccttcactgtacgtgattaatctacttgtgccatccggatttctcgtggctatcgacgccctatctttctacctgcccgttaaaagtggaaatcgcgtaccatttaagattaccttactgctgggttacaatgtgttccttctgatgatgagtgacctgctgccaacaagcgggaccccactgataggcgtatattttgccctgtgcttatccctaatggttggttccctcttagagacaatattcattacacacctactccatgtcgcaacaacccaacctccaccactgccaagatggctgcacagtctcctgttacattgtaatagccccgggagatgctgtccgaccgctcctcagaaggaaaataaaggtcctggtttgaccccaacccaccttcccggtgtgaaggagcccgaggtgtctgcaggacagatgcctgggcctgctgaggccgagctgacggggggttccgagtggactcgtgcacaacgcgaacatgaggcacaaaagcagcatagtgtggagctctggctgcagttttctcatgctatggacgccatgctgttcagattgtacctcctcttcatggcctcctctataattactgtgatatgtctctggaacacttag

SEQ ID NO: 177366 - DNA, 1326 bp, synthetic construct
  misc_feature 1..1326: note = Description of Artificial Sequence: Synthetic coding sequence
  source 1..1326: mol_type = other DNA
atgctgagcagcgtgatggcccccctgtgggcctgcatcctggtggccgccggcatcctggcgaccgacacacatcaccctcaggattcagccctttaccacttaagtaagcagctcctgcagaaataccataaagaagtgaggcccgtctataattggaccaaggccacaactgtgtacctcgacctgtttgtgcacgccatactggacgtcgacgccgagaaccagatcctcaagacaagcgtatggtaccaagaggtgtggaatgacgagtttctgagctggaatagctccatgttcgatgaaatccgtgaaatatccctccccttgtctgcgatttgggcccctgacataatcatcaatgagtttgtggatattgagaggtaccccgatctgccttacgtctacgtcaattcttcaggaaccatcgagaactataaacctatccaagtggtctccgcttgcagcctcgagacgtatgctttccctttcgacgtccagaactgtagtctgacctttaaatcaattctacacaccgtggaggatgttgatttggcattcctgcgatcgcctgaggatattcaacatgacaagaaggccttcctaaacgattctgaatgggaactgttaagtgtctcttctacgtactcaatcctgcagtccagtgctggaggcttcgctcagatccagtttaacgttgttatgcgcaggcatccactggtgtacgttgtgagcttgctgatcccaagcattttccttatgctggtggacctcggctcattctacttaccccctaactgcagggcccgtattgtcttcaaaacgtccgtgctggtggggtatacggttttcagggtgaacatgagtaaccaggttcccagatcagtcggttcgactcccctgattggtcatttcttcaccatttgtatggcatttcttgtgctgagcttggccaagagcatagtgctggtgaaatttctgcacgacgagcagcgggggggacaggagcagcctttcctttgtctccggggtgatacagatgctgataggcctcgggtagaacctagggcacagcgggcggtggtcacagagtcatcactgtatggcgagcatctggcccagccagggactcttaaagaggtctggtcccagttgcagtcaatttctaactatctccagacacaagaccagacagatcagcaggaagcggaatggctggttctgcttagccgcttcgataggctgctgttccagtcctacctcttcatgttgggaatttacaccatcactctttgttccctctgggctctgtgggggggggtttag

SEQ ID NO: 177367 - DNA, 1293 bp, synthetic construct
  misc_feature 1..1293: note = Description of Artificial Sequence: Synthetic coding sequence
  source 1..1293: mol_type = other DNA
atgatcgtgtacttccccggcatcctggccaccgacacccaccaccctcaggacagcgccctctaccatctatctaaacagcttctccagaaatatcacaaagaagtgcgccctgtttacaactggacaaaagctacaacagtttaccttgacttgtttgtacatgccattctagacgtggacgcagagaaccaaattctcaagacgagtgtctggtaccaggaagtttggaacgatgagttccttagttggaatagtagcatgtttgatgagatccgtgagatatctctgcctctctctgcaatttgggcccccgacattatcatcaacgagttcgtcgacatcgaaaggtatcctgacctgccctacgtgtatgttaactcatccgggacaattgaaaactataagcccatacaggttgttagtgcatgttcactggagacttatgcattcccctttgatgtacaaaactgcagtctcacattcaagagcattctccacacagtcgaagatgttgacttggcatttctgcgcagccccgaggatatccagcacgacaagaaggcctttctcaacgatagtgagtgggagctccttagcgtcagtagcacctactcaatcctgcagtcaagcgcaggggggttcgcccaaatccagttcaatgtggtgatgagacgacatccactcgtgtatgtggtgagcctgctgatcccatcaatctttctgatgctcgtggacctcgggtctttctatctgccgcccaattgtcgcgctcggatagtgtttaaaacttcagtactagttgggtacacagtttttcgggttaatatgtctaatcaagttccccgctcagtagggtccacgcctcttattgggcacttcttcaccatttgtatggcgtttctcgttttgagcctggccaagtccatcgtactggtaaagttccttcatgacgagcaaaggggcggacaggaacagccctttctctgcttaagaggggacactgacgccgatagaccaagggttgaaccaagagctcagagagccgtggtcactgagtcgtccctgtacggggaacacctggcccaacctggtactctgaaggaggtgtggagtcagcttcagtcaatctcaaattatttacaaacacaggaccagaccgaccagcaagaggccgaatggctggttctattgtctcgatttgaccgccttttattccaaagttacctgtttatgttgggaatttataccattactctgtgctccctctgggcactttggggcggagtgtag

SEQ ID NO: 177368 - DNA, 528 bp, synthetic construct
  misc_feature 1..528: note = Description of Artificial Sequence: Synthetic coding sequence
  source 1..528: mol_type = other DNA
tgagccgagaaccagatcctgaagaccagcgtgtggtaccaggaggtgtggaatgatgaattcctctcctggaatagttctatgttcgacgagatccgcgaaatctcattgcccctgtcagctatctgggctccagatattattataaatgaattcgtggatatcgaaagatatcccgaccttccctatgtgtacgttaattcttctggaacaatcgagaattataagcctatccaggtggtgtcagcttgttctctcgaaacctatgcatttccctttgatgttcagaattgcagcctgacgttcaagtccattttgcatactgtagaagacgtcgacttggccttccttcggtctccagaagatatccaacacgacaaaaaagcatttcttaatgatagcgagtgggagctgctctccgtgagcagtacatattccatactgcagagtagcgcgggaggctttgcccagatccagttcaatggcacatcaagcccatccgcctggccaagctggttttccgcctag

SEQ ID NO: 177369 - DNA, 1449 bp, synthetic construct
  misc_feature 1..1449: note = Description of Artificial Sequence: Synthetic coding sequence
  source 1..1449: mol_type = other DNA
atgctggccttcatcctgagccgggccaccccccggcccgccctgggccccctgtcctaccgcgaacaccgcgtggcattgctgcacctgactcatagtatgtcgacaacaggacgtggggtgactttcaccatcaattgttctggcttcggacaacacggggctgatccaactgctcttaatagcgtttttaaccgtaaacccttcaggccagtgaccaacattagcgttcccactcaggtcaacattagtttcgcaatgagtgccatactagacgtggtctgggataacccctttatttcttggaacccggaggaatgtgaagggataaccaaaatgagcatggccgcgaaaaatctttggttacctgatatctttattatcgagctgtgtgtgtcgagggccggacagcgggaggtacccagccccggcagccaccgtgaccactctctgcccctgggacccctgatggatgtggataagacccccaaaggcctgacagcctatgtgtctaacgaggggagaattcggtacaagaaaccaatgaaggtagactccatttgcaaccttgacattttttacttcccgttcgaccagcagaattgcactttgacgttctcctcgttcctgtacaccgttgactctatgttgttagatatggagaaagaagtgtgggaaattacggatgccagtaggaacatacttcagacccacggcgaatgggaactgcttggattgtctaaggccacagccaaactcagtagaggcggaaacttatatgaccagattgttttctacgtggcaattcggcggcgcccttccctgtacgtgatcaatctattggttcctagcgggttcctggtggcaattgatgcgttgtctttctaccttcccgttaaaagcggaaatcgcgttcccttcaaaattacactattgctcgggtacaatgtatttctgctgatgatgtctgatctcctgccaacatcaggaactccacttatcggagtttatttcgcactgtgtttgagtttgatggttggaagtctgttggaaaccattttcattacccatctgctgcatgttgccacaacacagccgccgccgttaccaaggtggctccactctctgctgctgcactgcaattcgccaggccgctgttgcccaacggctcctcaaaaggagaacaagggacccggattaacccctacccatctccctggggtgaaggaacctgaagtgtcagccggccaaatgccaggtcccgctgaggccgaattaactggcggcagcgagtggacgcgggcccagagggagcatgaggcacagaagcaacactctgtggaactctggctgcagttcagccatgcgatggatgcaatgctgttcagactgtacttattatttatggcctccagtataatcacagtgatctgcctctggaatacttag

SEQ ID NO: 177370 - DNA, 1137 bp, synthetic construct
  misc_feature 1..1137: note = Description of Artificial Sequence: Synthetic coding sequence
  source 1..1137: mol_type = other DNA
atggacaagctggacgccaacgtgagcagcgaggagggcttcggctctgtggaaaaggtggtgttgttgacgttcctatctaccgtaatcctgatggctatcctggggaatctgcttgtcatggtcgccgtctgttgggaccggcagcttcggaagattaagacgaactatttcatcgtgagtcttgcgtttgcggatctgttggtgagcgttctggtgatgcccttcggggcgatcgagttggtgcaagacatttggatctacggcgaggtgttttgtcttgtccgcacatccctcgatgtgctgctcaccacggcgtctattttccacctgtgctgtatcagcttagaccgctactacgcgatttgctgccagcctctcgtgtaccgtaataaaatgacccccctccgaattgccctcatgttaggcggatgctgggtgatacccacattcatatctttccttcctatcatgcagggatggaacaatattggcataattgacttgattgaaaagcggaagttcaatcagaattctaattctacgtattgtgtctttatggtgaataaaccctacgcgattacttgtagcgtcgtcgcattttacataccgttccttctaatggttctggcatattaccgcatttacgtgacagcgaaggagcacgcccaccagatacagatgctgcagcgagcgggggcctccagcgagagtagaccccagtccgccgaccaacattcaacccatcgcatgaggacggagaccaaagcagccaagactctgtgcattatcatgggatgcttctgcctctgttgggcgccatttttcgttacaaatatcgttgatccattcattgattataccgtgccggggcaggtatggacagcttttctgtggttaggctatatcaacagcggcctaaaccccttcttgtatgcctttttgaacaagtcctttagacgtgcgtttctgatcattctgtgctgtgatgacgagcgttatcgaagaccttctatactgggacagaccgttccatgctcaaccacaacgatcaacggatcgacgcacgtactttcgggctgctcccccgtctcttcatttctcctgttattttgcaaccgacctgttccggtgtag

SEQ ID NO: 177371 - DNA, 1164 bp, synthetic construct
  misc_feature 1..1164: note = Description of Artificial Sequence: Synthetic coding sequence
  source 1..1164: mol_type = other DNA
atggacaagctggacgccaacgtgagcagcgaggagggcttcggcagtgtggaaaaagtggttctgcttacgtttttgtccactgtgattttaatggccatccttggaaatttgctcgtaatggtggctgtgtgttgggaccgacagctgagaaagattaagactaattacttcattgtttctctggccttcgctgacttgcttgtgagtgtgctcgttatgcctttcggagctattgaattggtccaggatatatggatctacggtgaagtgttctgccttgtgagaacatctctcgacgtgctcttgacaaccgccagcatttttcacctgtgctgcatctctctcgatcggtactacgctatatgttgccagcctttagtctatcgcaataaaatgactcccctcagaatcgcccttatgctaggcggctgttgggtgatccctacctttatctcctttctccccataatgcaaggctggaacaacattgggattatcgatctgatcgaaaagcgcaagttcaaccagaactcaaatagcacatattgtgtatttatggttaacaaaccttatgccatcacctgcagcgtggtggcgttttatattccctttctcctcatggtcctggcttattaccgaatttacgttacggccaaagagcacgcccaccaaattcagatgttgcagcgggccggagcttctagtgaatctcgccctcagtctgccgaccagcactctactcatcggatgcggacagagaccaaggcggccaaaactctgtgcattatcatggggtgcttttgtttatgttgggcaccctttttcgttactaacattgttgatccttttattgactataccgtgccaggccaagtgtggacagcatttttgtggttaggctatatcaacagtggcttgaatccctttctgtatgccttcttgaataaatcattccgccgggccttcttaatcattttatgctgcgacgacgaaagatacagaagacctagcattcttggacagaccgtgccatgttccacaacaacaattaacggaagtactcatgtgctcaggtacaccgtgcttcacagaggacaccatcaagagctggagaagttgcctattcataacgacccggagtccctcgagtcctgtttttag

SEQ ID NO: 177372 - DNA, 1287 bp, synthetic construct
  misc_feature 1..1287: note = Description of Artificial Sequence: Synthetic coding sequence
  source 1..1287: mol_type = other DNA
atggacaagctggacgccaacgtgagcagcgaggagggcttcggctccgtggaaaaagtggtgctgctcaccttcctgagtaccgtgattcttatggcaattctgggcaatttactcgtaatggtagctgtgtgctgggatagacagctgaggaagataaagacaaactacttcatcgtcagcctggccttcgccgatttgcttgtgagcgtcctggtcatgccttttggggcaatcgagctcgtgcaggatatttggatttatggtgaggtgttttgcctggtgagaactagcctggacgtcctgctgacgacggcttcaatctttcatctgtgctgcatatctttggatcggtactatgccatctgttgccagccacttgtttaccgaaacaagatgacccccctccggatcgccctgatgctagggggatgttgggtgattccgacattcatcagcttcctgccaatcatgcagggctggaacaatatcggtatcatcgatttgatagaaaagaggaagtttaatcagaacagtaattctacctattgtgtcttcatggtgaataaaccttatgccatcacctgctccgtcgtggccttttacattccattccttttaatggtcctggcttactaccgtatctacgtaaccgcaaaagaacatgctcaccagattcaaatgctgcaacgtgcaggcgcatcctctgagagcagaccccaaagcgctgatcagcactcaacgcaccggatgaggaccgagaccaaagccgcaaagacactctgtattataatgggctgtttttgcctctgctgggcccctttcttcgtgactaacatcgttgacccatttatcgattatactgtacctggccaggtgtggacggcattcctgtggctgggctacatcaattcaggcctcaatcccttcctctacgcttttctgaacaaaagctttaggcgggcctttctaatcatactctgttgcgatgatgagcgctacaggaggccctccatccttgggcaaacagtgccttgtagcactaccaccatcaatggcagcacccatgtgctgcggacagattttcttttcgaccgcgatatactggcccgatattggaccaaaccggctagagcaggacccttttcaggtacactctctatccgctgtttgacagcacggaaacccgtgctgggggatgctgtcgagtgtggtggtcagtgggagagccagtgccatcctcctgccacatcacccctggttgcagctcagccaagtgatacttag

SEQ ID NO: 177373 - DNA, 1209 bp, synthetic construct
  misc_feature 1..1209: note = Description of Artificial Sequence: Synthetic coding sequence
  source 1..1209: mol_type = other DNA
atggacaagctggacgccaacgtgagcagcgaggagggcttcggcagcgtggagaaagttgttctgctaacatttctcagcaccgtaatccttatggccattttgggaaacctgctggtgatggtggccgtctgctgggaccgccagttgagaaagatcaaaaccaactattttatcgtcagcttggcattcgctgacctgctggtgtccgtgctggtcatgccgttcggggctatagagctggtccaggacatttggatctatggtgaggtgttctgtcttgttaggaccagtctggatgtgttactcactactgcctctattttccatctttgctgcatctccctagaccgatattatgccatttgctgccagcctcttgtctacagaaataaaatgactcctttaaggattgctctgatgctcggcggttgctgggtaatccctacctttatctcattcctgccaattatgcagggctggaacaacatcggtataatagacttggagcggagcctcaaccaaggcctgggacaggactttcatgctattgagaaaaggaagttcaaccagaacagcaattctacctattgcgtgttcatggtgaacaagccctacgccattacctgtagtgtggttgcattctatatccccttcctgttgatggtgctagcatactaccgcatatatgtgaccgcaaaggaacacgcccaccaaatacagatgttacagagagcaggcgcatcctccgagtcccgaccccagagtgccgaccagcacagcacacaccgcatgagaaccgaaaccaaagcagctaagacactctgcatcatcatgggttgtttctgcctgtgctgggcaccattctttgtaacaaacatcgtggatcccttcatcgattacacagtgcccgggcaggtttggactgcctttttatggttgggttacattaactcagggctaaacccttttctctatgcgttcctgaacaagtctttccgccgagcctttctgattatcctctgttgtgatgacgagaggtatcgacgaccatcaatcctggggcagaccgtgccttgctcaaccaccacgattaacggaagcactcatgtactacgtgatgctgtggagtgtgggggccagtgggagagtcagtgtcatccccccgccacaagtccattggtggccgcccagccatccgatacgtag

SEQ ID NO: 177374 - DNA, 1167 bp, synthetic construct
  misc_feature 1..1167: note = Description of Artificial Sequence: Synthetic coding sequence
  source 1..1167: mol_type = other DNA
atggacaagctggacgccaacgtgagcagcgaggagggcttcggctctgtggaaaaggtggttctgctgactttcctctccacagttatactgatggctattctgggtaacctgttagtgatggtcgctgtgtgctgggaccggcagctgaggaagattaagaccaactatttcattgtgtccctggctttcgctgacctgctcgtgagcgtcctggtcatgcccttcggcgccattgaattggtgcaggacatttggatttacggggaagtgttctgccttgtccgcactagcctggatgtgctactgacaactgctagtatcttccacctgtgctgcattagcctggacaggtattacgctatttgctgtcaaccccttgtatatcgtaataagatgactccattgagaatcgctctaatgctgggaggttgctgggtcattcctacgttcatttcatttctccctattatgcagggctggaataacatcggcattatcgatttgatcgagaagcgaaagttcaaccagaactcaaacagcacatactgtgtcttcatggttaataaaccatatgctattacttgcagtgtcgtggccttttatatcccatttctcctcatggtgctggcatactacaggatctacgtgacagccaaggagcatgcccatcagatccaaatgctgcagcgcgctggggccagctccgagtctaggccccagtccgcagatcaacacagcacccaccgaatgaggacagaaaccaaagccgccaagaccctgtgcattataatgggctgcttctgcctgtgttgggccccattcttcgtgaccaacatagtcgatccattcattgactatactgtgcctgggcaggtgtggactgctttcctgtggttgggatacatcaatagcgggttaaaccccttcctgtacgcctttttaaataagtcattccgacgagctttcctgatcatcctgtgttgcgacgatgagcgttatagacgtccatctattctggggcaaaccgttccatgcagcaccacgacaattaacggttcaacccatgtgctccgggacgccgtggaatgcgggggtcagtgggagtcccagtgccaccctcccgccacaagcccactggtcgcagcccaaccaagcgacacctag

SEQ ID NO: 177375 - DNA, 1083 bp, synthetic construct
  misc_feature 1..1083: note = Description of Artificial Sequence: Synthetic coding sequence
  source 1..1083: mol_type = other DNA
atggacaagctggacgccaacgtgagcagcgaggagggcttcggctccgtggaaaaggtggtgctgctgacttttctaagtactgtgatcctgatggccatactgggcaatctccttgtgatggttgcggtgtgttgggatcgacaattgcgaaagataaaaacgaactattttatcgtgtccctagcctttgccgacctgcttgttagcgtccttgtgatgccctttggggccatagagcttgtgcaggacatttggatctacggcgaggttttttgtttggtacgtaccagtcttgacgttttgctcactactgcctccatctttcacttgtgctgcatatccctggaccgctactatgccatttgttgtcagcccttagtgtatcggaacaaaatgactccgctgcgcattgccttaatgctggggggttgctgggttattccaacatttattagtttccttcctatcatgcagggctggaacaacatcggcattattgatttgatcgaaaagcgcaagtttaatcaaaattcaaacagtacttactgcgtgtttatggtgaacaagccctatgcgatcacctgtagtgtagttgcattctatattccattcctccttatggtcctcgcatattatagaatatatgtgaccgcaaaggaacacgcccaccaaatacagatgctgcagcgcgcaggggcctcctctgaatcaagaccacagagcgctgaccagcacagcacccaccgaatgcgtactgagaccaaagctgcaaaaactttatgcattataatgggctgcttctgtctgtgctgggcgccgtttttcgtaacgaatatagtagaccctttcattgactacacagttccgggccaggtgtggacagcgttcctgtggctcggctatattaacagcggactgaatccgtttctctacgcctttctgaacaaaagctttaggcgcgcgtttttgatcattctgtgctgcgacgacgaacgctatagacgcccttcaatcctgggtcagacagtcccctgctccaccaccacaatcaatggcagtacacacgtcctaagattttag

SEQ ID NO: 177376 - DNA, 1236 bp, synthetic construct
  misc_feature 1..1236: note = Description of Artificial Sequence: Synthetic coding sequence
  source 1..1236: mol_type = other DNA
atggacaagctggacgccaacgtgagcagcgaggagggcttcggcagcgtagaaaaggtcgtgctactgactttcttaagtactgtaattctgatggctattctgggcaacctgttagtaatggtggctgtttgctgggacaggcagctgcgcaaaatcaaaaccaactatttcattgtcagtctcgcgtttgccgacctcctggtcagcgtgctcgtcatgccatttggcgccatcgaacttgtgcaggacatctggatttacggagaggtgttctgccttgtgagaacctctttggatgtgttattgactacggcctctatcttccatctttgctgtatcagtttggaccgctattatgcgatttgttgccagcctttggtgtaccggaacaaaatgactcccctgcgcatagcccttatgctcggcggctgctgggtgatccctacttttatctccttcctgcccattatgcaagggtggaataatatcggtatcatagatttaattgaaaagaggaaatttaatcagaattctaacagcacatactgtgtgttcatggtcaataagccttacgcgattacctgttctgtagtggcgttttacatccccttcctacttatggtcctcgcttattatcgcatctatgtgacagccaaggagcacgcccatcagatccagatgctacaacgagctggggcatcctcggagtcccgcccacagagcgccgaccagcactcaacacataggatgcgcacagaaaccaaagcggctaaaacactatgtatcattatgggctgtttctgcttgtgctgggcacctttcttcgtgactaatatagtagatccttttatagactacacagtgccaggccaggtgtggacagcttttctatggctgggatacatcaattctgggctgaatccattcttatatgctttcttgaacaagtcttttcgacgggcctttttgattattctgtgctgcgatgacgagcgataccggcggcctagcatcctcggccagacagtcccctgcagcaccactaccattaatggatccacacacgttctctcctcagggaccgagaccgaccgcaaaaaattatggaacaaggaggaaaagattgaccaaactatccaaatgccaaaacgaaagcgtaagaagaaggcctcactatcctacgaagacctgattctcctgggcaggaaatcatgtttccgggaggggaagtag

SEQ ID NO: 177377 - DNA, 1164 bp, synthetic construct
  misc_feature 1..1164: note = Description of Artificial Sequence: Synthetic coding sequence
  source 1..1164: mol_type = other DNA
atggacaagctggacgccaacgtgagcagcgaggagggcttcggctccgtggagaaagtggtgcttctcacctttctgtctaccgtgatcctaatggctatcttgggtaacctattggtcatggtcgcagtgtgttgggatcggcagctgcgaaagatcaagaccaattacttcatagtttccctcgcctttgccgatctactggtgagcgtccttgtgatgccgtttggtgctatcgagctcgtacaggacatttggatttacggtgaagtgttctgcctggttagaacaagcctggatgtactgctgacaacagcctccatcttccacctgtgctgtatcagcctggaccggtactatgcaatttgctgtcaaccactggtttaccgcaacaaaatgacccccctccgaatagctctgatgctcggtgggtgctgggtaatcccaacgtttatatcttttctacccataatgcaaggatggaacaatataggaatcatcgatctaattgaaaagaggaagttcaatcagaactccaactctacttactgtgtgttcatggtcaacaagccctacgccatcacatgtagtgtcgttgctttttacataccctttctactgatggtcctcgcctactacagaatctacgttacagccaaggaacacgctcaccaaatccaaatgctccaaagggccggagcctcctccgagtcccggcctcaaagcgccgatcaacacagcacccataggatgcgcaccgaaaccaaggcagccaaaacactttgcattattatgggctgcttttgcctctgctgggccccgtttttcgtaaccaacatcgttgatccatttattgactatacagtgcctggccaggtctggacagcttttctttggctaggttacatcaactccggactgaatcctttcctctacgcatttctgaacaaatccttccgcagagcctttttgattatcctgtgctgtgatgatgagcgctatcgaagaccatctatcctcgggcaaaccgtaccatgttcgacaacgaccattaatggttccacgcatgtgcttcgatacacagtgctgcacagagggcaccatcaggagctggagaaactgccaatccacaacgaccctgagtccttagaaagttgcttctag

SEQ ID NO: 177378 - DNA, 1137 bp, synthetic construct
  misc_feature 1..1137: note = Description of Artificial Sequence: Synthetic coding sequence
  source 1..1137: mol_type = other DNA
atggacaagctggacgccaacgtgagcagcgaggagggcttcggctccgttgagaaagtagtgttgttgaccttcctgagcacagtgattctgatggctatcctgggaaatctgctcgtaatggttgcggtctgctgggatcggcagctgcgcaagattaagaccaactacttcatcgtctctctggccttcgccgatctcttagtgtccgttttagtcatgccctttggtgccattgagctcgtccaagatatttggatttatggggaggtgttttgtttggtgagaacctctttggacgtgttgctgacaacagcctcgatttttcacctctgttgcatttctttggatagatactacgctatctgttgtcagcccctggtatacaggaataaaatgacccccttgcgcattgcgttgatgctgggtgggtgttgggtgatacccaccttcatttcttttcttcccatcatgcaggggtggaacaatatcggcattatcgacctgattgaaaaacgcaaattcaaccagaattcaaactccacctactgtgtcttcatggtaaacaagccttatgccatcacttgttctgtggtcgctttctatatccctttccttctcatggtgctggcttattatcggatatatgtgactgctaaagagcatgcgcatcagatccagatgctacagagagccggcgcctcttcggagagccgaccgcagtctgctgaccaacactctactcaccgcatgagaaccgagaccaaggccgccaagaccctctgtattatcatgggctgcttttgtctgtgctgggcaccattttttgttaccaatatcgtcgatcccttcattgactatacagtacctggccaggtctggacggccttcctctggctgggatacattaattccggcttaaacccctttttgtacgcattcctgaataagtccttccgcagagcttttctgatcattttgtgttgtgacgatgagcgctaccggaggcctagcatcctgggccagaccgtgccttgctccacaacaaccatcaacgggagcacgcatgtccttagtggctgcagccctgttagctctttcttgctgcttttctgtaacagacccgtgcctgtatag

SEQ ID NO: 177379 - DNA, 1137 bp, synthetic construct
  misc_feature 1..1137: note = Description of Artificial Sequence: Synthetic coding sequence
  source 1..1137: mol_type = other DNA
atggacaagctggacgccaacgtgagcagcgaggagggcttcggctccgtggagaaagtggtgttactgaccttcctttctacggtcatccttatggcaattctcggcaatctgctggttatggtggccgtatgctgggatagacagctaagaaagatcaagacaaactatttcattgtgtcactcgccttcgctgatttgttggtgagcgtactggtgatgccttttggtgcaatcgaactcgtccaggacatttggatatacggcgaggtcttctgtcttgtgagaacatctctggacgtcctacttactacagcttccatctttcacctctgctgtatcagcctggacagatactatgctatctgttgccagcccttagtgtacaggaataagatgaccccccttcggatcgctctgatgctgggtggctgctgggtaatcccaacattcattagctttctacccataatgcagggctggaacaacatcggcattattgacctgatagagaagcgcaagtttaaccagaacagcaactctacatactgtgtattcatggtcaacaaaccgtacgctataacctgcagtgtcgttgcgttctatattcccttcctgctgatggtcctggcctactaccgaatatatgtgacagctaaggagcacgcccatcaaatccaaatgcttcagcgcgccggcgcgtcttcagaatcacgaccccagtctgccgaccagcattcaacccatcgcatgcgcaccgagacaaaggccgctaagactctgtgcattatcatgggatgtttctgcctttgttgggcacctttctttgtgaccaacatcgttgatccatttatcgattacaccgtgcctggtcaggtctggaccgccttcctgtggctgggatatattaactctggcctaaatccctttttgtacgcctttctgaacaaaagtttccggcgggccttcctcattatactctgctgcgacgacgagcggtataggcgaccatcaatcctagggcagaccgtgccctgtagcaccaccacgatcaatggttccactcacgttctctccgggtgctcacccgtttcctcctttttgctgttgttctgcaatcgacctgtgcctgtttag

SEQ ID NO: 177380 - DNA, 1074 bp, synthetic construct
  misc_feature 1..1074: note = Description of Artificial Sequence: Synthetic coding sequence
  source 1..1074: mol_type = other DNA
atggacctgcccgtgaacctgaccagcttcagcctgagcaccccctccccacttgagaccaaccactccctcggaaaggacgatctgcggccaagttccccacttctgtccgtgttcggcgtactaatactcaccctacttgggttcttggtcgcggccacattcgcctggaatctgctggtattagcaaccatcctgcgagttaggacattccatagagtcccacataacctcgtagcctccatggccgtctctgacgtcctcgttgccgctctggtcatgcccctgtcccttgttcatgagctttccgggcggaggtggcagctaggtaggagactctgccaattatggatagcttgcgacgtactgtgctgcacagcctccatctggaacgtgactgccatcgcactggacaggtactggtctatcacccgccacatggaatatactttaagaacgcgcaaatgtgtgtccaacgtcatgatcgcccttacctgggcattgtccgccgttatctcactggctccgctccttttcggctggggggagacatattcagagggaagcgaggaatgccaggtgagtagggaaccaagctacgctgtgtttagcacagtaggtgcattctatcttcctctgtgcgtggttctctttgtgtactggaaaatctacaaagctgctaagtttcgcgtcggtagccgtaagactaattctgtctccccaataagcgaggccgtggaggttaaggactctgcaaaacagcctcagatggtctttacagtgagacatgctaccgtgacatttcagcccgaaggtgacacttggcgtgaacaaaaagaacaacgggcagctttgatggtcgggatacttataggggtgtttgtcctgtgctggattccattcttcctgaccgagctgattagtcctctctgcagctgcgacatccccgcaatctggaagtcaatcttcctctggcttggctacagcaatagcttcttcaatccgttaatatatacagcattcaataagaactacaattcagcctttaaaaacttcttctcacggcagcactag

SEQ ID NO: 177381 - DNA, 1323 bp, synthetic construct
  misc_feature 1..1323: note = Description of Artificial Sequence: Synthetic coding sequence
  source 1..1323: mol_type = other DNA
atggtgcccgagcccggccccaccgccaacagcacccccgcctggggtgcaggcccccccagtgcccctggaggaagtggatgggtggctgccgcactctgcgtggtgatagctctgaccgcagccgccaacagcctgcttattgccctgatttgcacccagccagccctgaggaatacatcaaatttcttcttggtttccctgttcacttccgatctgatggtgggtctcgtcgttatgccacctgcgatgctgaatgcactgtacggcaggtgggttcttgcccggggactctgcctcttatggacagcgttcgacgtgatgtgctgcagcgcttctattctcaacctgtgcctcatcagcctagatcgctacttgctgattctgagtccactgcgctacaaattgcgtatgaccccacttagggccctcgcactggttttaggcgcatggtctctggctgcccttgcttcattcttaccgctgttgctcgggtggcacgaacttgggcatgcccgaccacccgtgccgggacagtgtagattacttgcgtcccttccattcgttctcgtggctagtggcctaacttttttccttccctctggtgctatctgctttacctactgtcggattctgctcgcagcccgtaagcaggcagtccaggtcgcctcactgaccacaggcatggcttcacaggcttccgaaacattgcaggtgccccggacacccagaccgggcgtcgaaagtgcagactctcggcgtctggccacaaaacattctcggaaagcactcaaggcgagcttgaccttggggatcctgctggggatgtttttcgttacgtggcttccattttttgtggctaacattgtgcaggcagtctgcgactgcatcagtcctggactcttcgatgtcttaacatggttgggctactgcaactctaccatgaaccccataatctacccccttttcatgagagacttcaagagagccctcggccgatttttgccttgcccccgctgtcctcgggaacggcaagcgtcgttggcatcacctagcctgcgaacatcccactcaggacccaggccgggactgtcattacagcaagtactacctttacctttgcctcctgacagcgatagtgactcagacgccggctctggtggatcaagtggcctccgtttgacagcccagttactgctgccaggggaggctactcaggatccccccctgcccacaagggccgcagcggccgtgaactttttcaatatcgacccagccgagccggagctgcgcccccatcctcttggaatcccgactaactag

SEQ ID NO: 177382 - DNA, 1338 bp, synthetic construct
  misc_feature 1..1338: note = Description of Artificial Sequence: Synthetic coding sequence
  source 1..1338: mol_type = other DNA
atgatggacgtgaacagcagcggccggcccgacctgtacggccacctgaggtctttcctgctgcccgaagttggtcgcggtcttccagatctgtctccagacggtggggctgaccctgttgctggaagctgggcacctcacctcctgagcgaagtgactgcatcgcccgccccaacgtgggatgcgccgcctgacaacgcctccggctgcggcgagcagataaactacggtcgcgtggagaaggttgtgatcggttctatcttgacactgatcaccctcctcacaattgccggcaattgcttagtcgttataagcgtgtgcttcgtgaaaaaacttagacaacctagtaactatctgatcgtgagcctggcgctggccgatctttccgttgctgtggccgtgatgccttttgtgtccgtcaccgatttgataggggggaagtggatatttggacactttttttgtaacgtttttattgctatggatgtgatgtgctgtaccgcatccattatgacgctgtgcgttatttcaattgaccgttacctcgggatcacccgcccgctcacctatccagtccgtcagaacgggaagtgtatggccaagatgatcctctccgtgtggctcctgagtgccagcataactctaccacccctgtttggctgggcccagaatgtgaatgatgacaaagtttgccttatctctcaggattttgggtacactatctatagtactgccgtggctttctatatccctatgtctgtgatgctcttcatgtattaccagatttacaaggccgccagaaaatctgcggccaaacacaagtttccaggattcccaagggtggagccagatagcgtgattgcgcttaatggcatagttaagctgcagaaagaagtggaggaatgtgctaacctctctcgtctactgaagcacgagcgcaagaacatctccatctttaagcgggaacagaaggctgcaaccactctcggaataattgttggggctttcaccgtgtgttggctgccattttttctgctgtccactgccaggcctttcatatgcggcacttcttgtagctgtatccccctgtgggtggaaaggactttcttgtggctgggttacgcgaatagcttgataaaccctttcatttacgccttttttaacagggatttgcgcacgacttaccggagcctacttcaatgtcagtacaggaacatcaatcggaagctcagcgccgccggcatgcatgaagccctgaagctggcagagcgtcctgaacggcccgaatttgttctgcagaacgctgattactgccggaaaaagggtcacgattcctag

SEQ ID NO: 177383 - DNA, 1440 bp, synthetic construct
  misc_feature 1..1440: note = Description of Artificial Sequence: Synthetic coding sequence
  source 1..1440: mol_type = other DNA
atgatggacgtgaacagcagcggccggcccgacctgtacggccaccttagatcgtttttgctcccagaggtgggtcgtggattgccagatctatctccagatgggggagctgacccagtggccgggtcttgggcaccccacctgttgagcgaggtgacagcttcccctgcacccacgtgggatgctccaccagataacgcatccggctgcggtgagcagatcaactacggcagggtggagaaagtggtgatcgggtcaatcttgactttaattacactgctcacaatcgcaggtaactgtctggtagtgataagcgtgtgctttgtaaagaagctgcgccagccaagcaattacctgatcgtcagcttggccctcgcagacctttcagtcgcggtcgctgtcatgcctttcgtgtccgttacagacctaataggcgggaagtggattttcgggcactttttttgtaacgtctttatcgctatggacgtgatgtgctgtaccgcctctatcatgaccctctgcgtgatttccattgacagatacctcggtatcactaggccactcacatatccagtgcgccaaaatgggaagtgtatggccaagatgatactctcggtttggctgctttcggcgagtatcacacttccgcccttattcgggtgggctcagaacgtgaacgacgacaaggtttgtctcattagccaggattttggatataccatctattctaccgcagttgcattctatatccctatgtctgtgatgctttttatgtattaccaaatttacaaagccgcgagaaagagcgcagcaaaacacaaattccctggtttcccgcgcgtggaaccagattccgtaatcgcgcttaatggcattgtcaagctgcagaaggaagtggaggagtgcgccaatctatcacgactgctgaagcatgaacgcaaaaatatttcgattttcaaacgtgaacagaaagctgctactaccttaggaattattgtgggcgccttcactgtgtgctggttgccattctttttactgtctacagcccggcctttcatctgcggtacctcttgtagctgtataccgctgtgggtcgagcgcactttcttatggcttggctatgcgaattctctcattaatcctttcatctatgccttctttaaccgggatctgaggaccacttatcgatctcttctccagtgccagtatcggaacataaatcgaaagctgtcagctgctggcatgcatgaggccctcaagctggcggagcgtcccgagagaccagagttcgtcttgcgagcatgtactagacgagtgctgctgagacctgagaaacgcccaccagtctcggtttgggtcctgcagtcacccgaccatcataattggctggccgataaaatgctcaccaccgtcgaaaaaaaggtcatgatccacgactag

SEQ ID NO: 177384 - DNA, 1299 bp, synthetic construct
  misc_feature 1..1299: note = Description of Artificial Sequence: Synthetic coding sequence
  source 1..1299: mol_type = other DNA
atgatggacgtgaacagcagcggccggcccgacctgtacggccacctgaggtccttccttctacccgaggtaggccgcggactccctgatctaagtccagatgggggcgctgaccctgtggccgggagctgggcccctcatttgctgagcgaggtcactgcttcccccgctcctacttgggatgcaccaccagataatgcttctgggtgtggcgaacagatcaattatggccgcgtggagaaagtggtcatagggtccatcctcacccttattaccctcctcaccattgccggcaactgtctagtggtgatctcggtctgctttgtaaaaaagctgagacaaccctccaattacctgatcgtgagcctggcccttgcagacttatccgtggccgttgcagtgatgcctttcgtctcggtcacggacctcatcggcggcaagtggatcttcggtcacttcttttgcaacgtgtttatcgccatggacgtcatgtgttgtaccgcatccatcatgactctgtgcgtaatctcaatcgatcggtatttgggcattacccgaccacttacctaccccgtcagacagaatggcaagtgcatggccaaaatgatcctttcggtgtggctgctctcagcctcaattactctgcccccattgttcgggtgggcccagaacgtgaacgacgacaaggtctgtctaatcagccaggattttgggtatacaatttattcaaccgcagtcgcgttttacattccaatgtccgtgatgctctttatgtactaccagatctataaagctgcacgaaaaagcgcagccaagcataaatttccaggattccccagggtggagcccgactccgtgattgcccttaacggaattgttaaacttcagaaggaggtggaggagtgtgctaatctgtctcgccttctgaaacatgagagaaaaaacatttctatcttcaaacgggaacagaaagccgccacaaccctggggatcatagtgggcgcgtttactgtatgctggctgcctttcttccttttgtctactgcccgcccttttatatgtggcacctcctgcagctgcattccactgtgggttgagcggacttttttatggctcggctatgctaacagcctgattaatccttttatctatgccttcttcaacagggatctgcgcaccacttaccggagccttctgcagtgccagtaccggaatatcaaccgcaagctctctgccgccggaatgcatgaggcactcaagctggcggagcggcccgagagacctgaatttgtgctgtag

SEQ ID NO: 177385 - DNA, 1440 bp, synthetic construct
  misc_feature 1..1440: note = Description of Artificial Sequence: Synthetic coding sequence
  source 1..1440: mol_type = other DNA
atgatggacgtgaacagcagcggccggcccgacctgtacggccacttgcgctctttcctgctaccagaggtggggcgtgggctgcctgacttgtctccagacgggggcgctgatccagtggcgggaagctgggccccacacctgctgtccgaagtaactgcatcccctgcccccacctgggacgccccaccagacaacgcctccggctgtggagagcagatcaattatgggcgtgtggaaaaggtcgtgatcgggtccatcctgacactgatcacccttctgaccattgccggcaactgccttgtggtgatctctgtgtgttttgtcaaaaagttaaggcagccaagcaattaccttatcgtgtctctcgccttagcagacctttccgttgcagttgccgtgatgccttttgtcagcgttaccgacctgatcggaggaaagtggatctttgggcactttttttgcaatgtgtttattgcgatggatgtgatgtgttgtaccgcctccattatgacactgtgcgtgatttccattgaccggtacttaggtattactaggcccctaacttacccggttcgtcaaaatggcaagtgcatggccaaaatgatcctgtcggtctggctgcttagtgcgtcaataacgctgcccccactgttcgggtgggcccagaatgtgaacgacgataaggtttgtcttatctctcaggattttggttataccatctacagtaccgccgtggccttttacatccctatgtcagtaatgctattcatgtactaccagatttacaaggctgccaggaaatctgcagcaaaacataagtttcccggattccctcgagtcgagccagatagcgtgattgcattgaatggcatcgttaagttgcagaaggaagtggaagagtgtgccaatctgtcacgcctattgaaacacgagcgcaaaaatataagtatattcaagcgcgagcaaaaggccgccacaacgttggggattattgtgggcgcttttacggtgtgctggctccccttctttctattgagcaccgcccgcccattcatatgtggtactagttgttcgtgtatacctctctgggtagaaagaacctttctttggctcgggtatgctaacagtctcatcaatcctttcatatacgctttcttcaaccgcgacctgcgaaccacatatcggtccctcttgcaatgccagtacaggaacataaatcggaagctgagcgctgctggcatgcacgaggccctgaagctggccgaacgacctgagcgaccagagtttgtgctgattaccagaacttctggcgtccatcaggcattagagaatttcccatggggcaacgaggtaaatcggtggcgcaaatcatgcgagtatttctgtactgataaaatgctcaccaccgtggagaaaaaggtgatgatacatgattag

SEQ ID NO: 177386 - DNA, 2460 bp, synthetic construct
  misc_feature 1..2460: note = Description of Artificial Sequence: Synthetic coding sequence
  source 1..2460: mol_type = other DNA
ggcatgctggacggccccagcgccatgacccggttctgcaacctgatcgctagtgagccagatattgccaaagttcccctgtgcatcgattctagcaatttcgccgttattgaggcggggctaaagtgctgccagggtaagtgcatcgtgaactccattagccttaaagagggtgaggcgactgagactgatactaaaataagagtctgcacaagagcctatcatttattggtaaagaaattggggtttaacccaaacgacatcatattcgacccaaacatactcaccatcggcaccgggatggaggaacacaacctgtatgccattaactttattcacgccaccaaagtgatcaaggagactttgcctggagctcggatctccggcgggttgtctaacctgtcctttagttttaggggcatggaggcaattcgggaagccatgcacggcgtttttttgtatcacgctatcaaaagtgggatggatatggggattgtcaatgcaggcaacctgccagtgtacgacgatattcacaaggagctactacagttatgcgaggatctgatctggaataaggatcccgaggcgacagagaagcttctgaggtacgctcagacccagggaacgggtgggaaaaaggtaatccagactgacgaatggcgcaatggcccagttgaggaacggttagagtacgccctggtgaaaggcatcgaaaaacacataatcgaggataccgaggaagcacgactgaatcagaaaaagtacccaaggcccctgaacatcattgagggtccgcttatgaacggtatgaagattgtcggtgacctctttggggctgggaagatgttcctgccccaggtaatcaaatcagccagagtcatgaagaaggccgtagggcatctgataccttttatggagaaagagcgagaggaaacgcgggtgctaaacgggaccgtggaggaggaagacccatatcaggggacaattgttttggccaccgtaaagggcgatgttcacgatatcggtaaaaatatcgttggcgtggtacttgggtgcaataactttcgagtcattgacctcggagtcatgacaccatgtgacaagattctgaaggctgccttagatcacaaggctgatattatcggcttatcagggctcatcaccccttccctcgatgaaatgatattcgtggccaaagagatggagcgccttgctattagaatcccactgctcattggcggggcaactacttccaagactcacactgccgtgaagattgctccccgctactcagcacctgtgattcatgtcctagacgccagcaaatctgtggtggtgtgtagccagctcctggacgaaaatctcaaggatgagtattttgaggagattatggaggagtatgaggacatccgccaggaccactatgagtcattgaaggagcgaaggtacttgcccctgtctcaagcacgcaagtcaggcttccaaatggactggttgagcgagccccatccggtgaagcccaccttcatcggaacgcaagtattcgaggattatgacctccaaaaacttgtcgactacatcgactggaagccattcttcgacgtgtggcagctgcgcgggaagtatcctaaccgggggttcccaaagatctttaacgacaaaacggtcggcggggaagctcggaaggtgtacgatgatgcacataacatgttgaataccctgattagtcaaaaaaagctgagagcccgtggggtcgtggggttttggcccgctcagtctattcaggacgacattcatctctatgcagaggccgcagttccccaggccgcagagcctattgctactttctacggcctgagacagcaagccgagaaagactccgctagtacagagccctattactgcttaagcgattttatagcacctcttcactctggcatccgagactatctcggactctttgccgtggcctgcttcggcgtcgaggagttgagcaaagcctacgaggacgacggcgacgactacagctctatcatggttaaagccctaggcgatagactagccgaggcattcgcagaagagcttcatgaacgtgtccggcgcgaattatgggcctattgtggaagtgaacagcttgacgtggcagacctccgcaggctcagatacaaagggatcagaccagctcctggatacccatcacaacccgatcatacagaaaaattaactatgtggcggttggccgatatcgaacagagcaccggaatccggcttaccgaaagtctcgcgatggcccctgctagcgctgtaagcggtctgtacttctccaatctcaagtcgaaatactttgccgttgggaagatttctaaagaccaggttgaagactatgccctacgaaaaaatatctcggtcgctgaggtggagaagtggcttgggccgattcttggttacgataccgattag

SEQ ID NO: 177387 - DNA, 3798 bp, synthetic construct
  misc_feature 1..3798: note = Description of Artificial Sequence: Synthetic coding sequence
  source 1..3798: mol_type = other DNA
atgagccccgccctgcaggacctgagccagcccgagggcctgaagaagactctgagggatgagataaacgccatcctccagaagaggatcatggttcttgacgggggcatggggactatgatccagagagagaagctaaacgaggagcatttcagaggccaagaattcaaggatcatgccagaccactaaagggaaacaatgacattttgtccattacacagcctgacgtgatttatcagattcacaaagaatatttactggccggtgctgatatcattgagacgaacacttttagctcaacctccattgcccaagccgactatgggttagagcacctcgcctatcgcatgaacatgtgctccgcgggagtggccaggaaggcagctgaagaggtgacactgcagaccggcatcaagcggtttgtggctggagcgctaggccccacaaacaagaccctgtccgtctcgccctcagtcgagcggcccgattacaggaacatcactttcgacgaactagtcgaagcctaccaagaacaggcaaaggggcttctggatgggggcgtcgacatcctccttattgagacaattttcgacaccgctaacgccaaagccgccctgtttgcgttgcagaacctgtttgaggaaaagtacgcacctagaccaatattcatttctggcaccatcgtggacaagtccggtcggacactgagcgggcaaactggggaaggctttgtgatctcagtcagccatggggagccgttatgcattggccttaactgtgctctgggtgctgccgagatgaggccattcatagaaatcattggcaagtgcacaactgcatacgtgctttgctaccccaacgccggtctgccaaacacttttggcgactacgatgaaactccaagcatgatggccaagcatctgaaagattttgcgatggatgggctggtcaatatcgtgggcgggtgctgcgggtctactccagatcacatacgagaaattgccgaggcagtgaaaaactgcaaaccaagggttccccccgccacagctttcgaaggacatatgctcctctctggcctggaaccgttccgaatcggcccttacacaaactttgtcaatattggcgaacggtgtaatgtcgccggaagtagaaagtttgcaaagctcatcatggctggaaactacgaagaggccctctgcgtggccaaggtgcaggtggagatgggagctcaagttttggacgtgaacatggacgatggaatgctggatggccctagcgccatgacaagattctgtaatctgatagccagcgagccagatatagctaaagtgcctctctgcattgatagctctaacttcgctgtgattgaagctggattgaagtgttgccaggggaagtgtattgttaattcaatttccttgaaggagggcgaggacgacttcctggaaaaagctagaaagatcaagaagtatggagcggcaatggtggtgatggcttttgacgaagaggggcaagccacagaaacagacaccaaaatccgtgtgtgtacccgggcataccatctcctagttaagaaactcgggttcaaccccaacgatatcatatttgatcccaacatcctgaccattggcaccggcatggaagagcataacctttacgctatcaactttatccatgccaccaaagtcataaaggagactttacccggtgcacgtattagcggcgggctgtctaacctgtcttttagctttagaggcatggaggcgatccgcgaggccatgcatggcgttttcctatatcatgcaattaagtctggcatggacatgggtatcgtcaatgccggcaatctcccagtgtatgacgacatacataaagagctacttcagctgtgcgaggacctaatctggaataaggatcctgaggcaacagagaaactgctccggtacgcccagacccagggtaccggcgggaaaaaagttatacagactgacgaatggagaaatggaccagtagaggagcggctcgagtacgcgctggttaaaggaatcgagaaacacattatcgaggatacggaggaggctaggttgaatcagaagaagtatccacggcccctcaacataatcgaggggccactcatgaacggaatgaagatcgtcggggacctcttcggcgctggcaagatgttcttgcctcaggtaatcaaatcagctagagtgatgaagaaagccgtcggtcacttaataccttttatggaaaaagagcgagaagaaactcgggtcctgaatggaactgtcgaggaggaggacccctatcagggcacaattgtgctcgcgactgtgaaaggcgatgttcatgatattggtaaaaacatcgtgggagtggtacttggctgtaataactttagagtgatcgacctgggggtcatgacaccttgcgacaagatattaaaggcagccttggaccacaaggcagatatcattggactaagcggattaatcactccttctctggatgaaatgatcttcgtagcgaaagaaatggaacgcctggcaattagaatccctctgctgatagggggggctactacatcaaagactcatacagcagtcaagattgcgcccaggtacagtgcaccagtgatacatgttctcgacgcatcgaagtctgtggtggtctgcagccaacttctggatgagaacctgaaagacgagtactttgaggagatcatggaagagtatgaagacattagacaggatcactatgaatcactgaaggaaagaaggtacctccccctgagccaagcgagaaaaagcggcttccagatggattggctgagcgagccgcacccagtgaaacctacattcatcggtacccaagtgttcgaggattatgatttgcaaaaattggtggactatattgattggaagcccttttttgatgtttggcagttgcgcggaaagtaccccaatcgcggctttccaaagatcttcaatgacaagacggttggcggggaggcacgcaaagtttacgatgatgcgcataacatgctgaacacattgatttctcagaagaagcttagagcaagaggggtggtggggttctggcctgctcagtccatccaggacgatatccacctttacgctgaggctgcagtcccgcaggctgcagagcccatcgccacgttctacgggctacgacagcaggccgaaaaagattctgcttctactgagccatactactgcctgagcgattttatcgcaccacttcacagcggcattagggattatctcgggctgtttgcagtggcctgcttcggagttgaggaactgtccaaggcatacgaggacgatggtgacgattatagctcaatcatggtgaaggccttaggggatcggctagcagaagccttcgccgaagagctgcatgaacgtgtgcgccgagagttatgggcgtactgcggaagtgagcagctagatgtggccgaccttagacggttgcgatacaagggtatacgtcccgctccaggataccccagccagcctgaccacactgaaaaactgaccatgtggagactcgccgacatcgagcagtcaaccgggatacgcctcacagaatccctggccatggctccagctagcgccgtgtccggtctgtacttctctaatcttaaaagtaagtattttgctgttggcaagatatcaaaggatcaagtggaggactacgctcttagaaaaaacatcagcgtcgctgaagtggagaaatggttggggcccatcctggggtatgacacggactag

SEQ ID NO: 177388 - DNA, 3357 bp, synthetic construct
  misc_feature 1..3357: note = Description of Artificial Sequence: Synthetic coding sequence
  source 1..3357: mol_type = other DNA
atgagccccgccctgcaggacctgagccagcccgagggcctgaagaagacgctccgtgatgaaattaacgcgatcctccagaagcggataatggtgctggacggcgggatggggactatgatccagcgcgaaaaactcaacgaggagcacttccgggggcaggagttcaaggatcacgcacgccctctcaagggcaacaatgacatcctcagtattacccagcccgacgtgatctatcagattcataaagagtatctgctcgctggggcagacattatcgaaaccaacaccttctcaagcacttctatcgctcaggcagactacgggcttgaacatctggcgtatcgcatgaatatgtgcagtgctggcgttgctcgaaaagcggctgaagaggttacactccagactggcattaaaaggttcgttgctggtgcccttggtcccacaaacaaaacactgagtgtgtctccctcggtcgagcggccagattaccgaaatattacttttgacgagcttgtggaagcttatcaggaacaagcgaagggcttgttggacggcggagtcgacatcttactgattgagaccattttcgacactgccaacgccaaggccgcactgtttgcgctgcagaacttattcgaagagaaatacgccccccgcccaattttcataagcgggaccatcgtagacaaatcgggaaggaccctgtctggccagaccggggaaggattcgtgatctccgtaagccacggagagccactctgcatcgggctgaactgcgctctgggtgcggccgagatgagaccattcatcgaaatcatcggaaaatgtaccacggcatacgtgttgtgctaccccaacgcgggcctgcctaataccttcggcgactacgacgaaactccttccatgatggcaaagcacctgaaggacttcgcaatggacgggttggtgaacatcgtcggcggatgctgcggatccactcccgatcacatacgcgagatagcagaagctgtgaagaactgcaagccccgtgtgcctcctgccacagctttcgagggtcatatgcttctatcaggattggagcccttcaggataggcccatacaccaatttcgtgaatattggagagaggtgcaatgtggccgggagcaggaaattcgccaagctgatcatggccggaaactacgaggaagcactttgcgtggccaaggtgcaggttgagatgggcgcccaggtactggatgtgaatatggacgatggcatgctggatggcccctccgccatgacccgattttgtaacttaattgcttcggaacctgacatcgctaaagtgccactttgcattgactcctccaatttcgcagtgattgaggctggcctcaaatgttgtcagggtaagtgcatcgtcaactcaattagtctgaaagaaggggaagatgatttcctggagaaagctcgcaaaataaaaaaatacggagctgccatggttgtaatggccttcgatgaggagggtcagacccaggggacaggcggcaaaaaggttatccagacagacgagtggaggaacggcccggtggaagaaagacttgagtatgccctggtaaagggcattgagaagcacataatcgaggacaccgaggaagcccggctgaatcagaagaaatatcctcgacctctgaatatcattgaaggacccttgatgaatggaatgaagatcgttggggatttattcggagcagggaaaatgttcttgccccaggtaataaaaagcgcaagggttatgaagaaggcagtaggtcatttaattccatttatggagaaagagagagaggagacaagggtgttgaacggtaccgtcgaggaagaggatccataccaggggacaatcgtgctggcaacagtgaaaggagacgtccatgatataggcaaaaatatagtcggggtagtgctgggctgcaacaattttcgagtgatcgatctgggtgttatgacaccatgcgataagatcctgaaggcagctctggatcataaggccgacatcattgggctgtcaggcctgataactccaagcctcgatgagatgatcttcgtcgccaaggaaatggagcggctggcaatccgtatccctctgcttataggaggggcaaccacctctaagacccacacagccgtgaaaatcgcaccgcgatatagcgcccccgtgatccatgttttggatgcttcaaaaagcgtcgtggtgtgttcgcagttgttagacgagaatctgaaggacgagtatttcgaagagattatggaagagtatgaggatatcaggcaggatcactatgagagtctgaaggagaggcggtatctacctctttctcaggcacgaaagagtgggttccaaatggactggctctctgagccccaccctgtgaaaccaaccttcattgggacccaggtgtttgaagattacgatctgcaaaagctggtggactatatcgattggaagcctttcttcgacgtgtggcaactgagagggaaatatcccaatcgtggctttccaaaaatctttaacgacaagacagtgggcggcgaggctaggaaagtgtacgatgatgctcataacatgctaaacaccttaattagccaaaagaaattgcgcgctagaggcgtggttgggttttggcccgcacagagtatacaggatgacattcacctatacgctgaggctgctgtgccacaggccgccgagccaatcgccacgttttacgggttgcggcagcaggccgaaaaagatagcgccagcactgagccttactactgcctgagcgacttcattgcacctttgcattctgggatccgagactacctgggcctgttcgccgtggcttgttttggtgtcgaagagctgtctaaggcctatgaagacgacggcgatgactactcctctatcatggtcaaggccctgggagacagactcgccgaagccttcgctgaagagctgcatgagagagttcgaagagagctgtgggcctactgcggcagtgaacagctggacgttgcagacctgcggcgtctccggtacaagggcatacgccctgcacctggctacccaagccaacccgatcacacggagaagttaactatgtggcgtctcgccgatattgaacagtcaaccgggatcaggttaactgaatcactcgcaatggctccagcttccgcagttagcggattatattttagcaacctcaaaagtaagtactttgcagtggggaagattagcaaagaccaggttgaggactatgccctgagaaaaaacatttctgtggcagaggtagaaaagtgtatgtctgtttaccgaaagatcggcgagtag

SEQ ID NO: 177389 - DNA, 690 bp, synthetic construct
  misc_feature 1..690: note = Description of Artificial Sequence: Synthetic coding sequence
  source 1..690: mol_type = other DNA
atgagcgccggcctgcgggccggctgccacgtggtgctgctgtgccggttttccttggggagcttctcagtacccagccgcgactccgcgagcgggcgtgcctgtctcgccgctcgacccaccccaaggactggaagggtacccgggaaaaaggctagggccccagcagttgctgccccttctcctgaacggggaccacgtgcccttcgagcattcggggtgagaagtccccctgccacacgggccaacggcagaaggcagaaaacgagagctctgtgcggcagactggcgtggagatggctagcctggcccctggccgtcgtcacatgcggagagcacgtattctcagctgcacctagcgcccagggaggtgattctactacctgtcatccccgttcgaaaacctgtcggaaccccgagtatcttcttgcaggcgcagatattattgaaactaatacttttagttcgacctcaattgcccaggccgactatggtctggaacacctcgcttacagaatgaatatgtgctctgcaggcgtggcacgcaaggccgcggaggaggtgaccctacagactgggattaagcgattcgtagcaggtgccctgggcccaaccaataagaccctaagtgtgagtccttccgtggagagacccgattatcgcaacattaatctaccggtcgggtcgtag

SEQ ID NO: 177390 - DNA, 3645 bp, synthetic construct
  misc_feature 1..3645: note = Description of Artificial Sequence: Synthetic coding sequence
  source 1..3645: mol_type = other DNA
atgagccccgccctgcaggacctgagccagcccgagggcctgaagaaaacccttagggacgagattaacgctatcctgcagaaaagaatcatggttctggatggtggtatgggcactatgatccaacgcgagaaactgaacgaagagcacttccgcggccaggagttcaaagaccacgctcggcccttgaagggtaacaacgatatcctgtcgatcacacagccagatgtgatataccagatccacaaggaatatttgcttgctggggccgatattatcgagacaaatactttttctagtacatccattgcccaggccgattacggcctggagcatctagcatacagaatgaacatgtgttccgcaggagtcgccaggaaggcagccgaggaggtgacactgcaaaccggaattaaaaggtttgtcgcaggtgccctcgggcctacaaataagacactgtccgtctcaccctcagtcgagagacctgactatcggaacatcactttcgacgagctcgtagaggcatatcaagaacaggcgaagggcctcttggacgggggagtcgacattttgcttattgagactatattcgacacagccaacgcaaaggctgctctattcgcattgcaaaacctgttcgaagaaaagtatgctccccgtcctatttttatctcaggtaccattgtcgacaaatctggcaggactctttcggggcagacgggcgagggtttcgttatctcagtcagccatggtgagcctttgtgtatcggcctgaattgcgcattgggcgcagccgagatgcgcccatttatcgagataatcggcaagtgtactacggcctacgtactgtgctacccgaacgctgggctcccaaacacatttggagactatgacgagacccctagcatgatggcaaaacacctgaaagactttgccatggacgggctcgtgaacattgtcgggggatgctgcgggagcacaccggaccacatccgtgagatcgcagaggcagtaaaaaattgtaagccacgcgtgcccccggcaaccgcattcgaaggtcacatgcttctgagcgggctagaacctttcaggatcggcccctatacgaacttcgtgaacataggcgagcgatgcaatgtggccggatcacgcaaattcgctaagctcattatggccgggaactatgaggaggcattatgcgtagctaaagtgcaagtggagatgggcgctcaggtactggacgtgaacatggacgacgggatgctggatggaccttcggccatgacgcgcttctgtaatttgatcgcttcggagcctgatatcgccaaagtccctctatgtattgactcctctaactttgcagtgatcgaggccggtctgaagtgctgccagggcaaatgcatcgtcaattctatttcattgaaagaaggcgaagacgactttctcgaaaaggcaagaaagatcaagaaatatggggcagccatggtcgtaatggcctttgacgaagagggccaggctacagagacagataccaagatccgggtttgcaccagggcataccacctgctcgtcaaaaagctggggtttaaccccaatgacatcatatttgatccaaatatcctcactatcggaactgggatggaggagcataacctgtatgcaattaactttatacacgccacgaaggtaataaaggagaccctccccggcgcccgtatctcggggggactgtccaatctctccttcagtttcagggggatggaggctatccgcgaagctatgcacggggtctttctgtaccatgccatcaagagtggtatggatatgggaattgtcaacgctggcaatttacctgtttatgatgatatccacaaagagctcctccagctgtgtgaggatctcatttggaataaggaccccgaggccactgaaaagctactacgctacgcacagacgcagggtacggggggtaagaaagttatccagacagacgagtggcggaacggaccagtggaagagcggctcgaatacgccttagtgaaagtgatcaagtcagctcgggtgatgaaaaaggcagtgggacatctcattccgttcatggagaaggagagagaggaaaccagggtccttaacggcaccgtagaagaggaagacccgtaccaaggtaccattgtccttgccaccgtaaagggtgacgtgcatgacataggcaaaaacattgttggcgtagtgctcggctgtaataactttagggtcatcgacttgggggtgatgacaccctgtgataaaatcctgaaggctgctttagatcacaaagccgacatcatcggcctgagcggcttgatcacaccaagcctggacgaaatgatatttgtagcgaaggagatggagcgcctggctattagaattcctctgctaattggaggggcgaccacgtcgaagacccacacggctgttaagattgccccaagatatagtgcccccgtcattcacgtactagacgcatctaagagcgtcgtggtatgttcacagctcctcgatgagaatctgaaggacgagtactttgaggagatcatggaggaatacgaggatattaggcaggaccactacgagtctctgaaggaacgccgatatttgcccctgagtcaagcccgcaagtcagggtttcaaatggattggctgtcagagcctcaccccgtgaaacccacgttcatcgggactcaagtctttgaagactacgatctccagaagctcgtggactacatcgactggaagcccttctttgacgtgtggcaactgcgggggaaatacccgaacagggggtttccgaaaatattcaatgacaaaactgtagggggtgaagccagaaaagtctatgatgatgcccataacatgctgaacactctgattagccaaaagaagctgcgggccagaggagttgtgggcttttggccggcgcagagcatccaggatgatatacatctgtacgcagaggccgcagttcctcaagcggccgagcccattgcaacattctatggacttaggcaacaggcagaaaaggactcagcttccactgaaccttactactgtctctccgactttatcgcccccctgcacagcgggatccgggactatcttgggctcttcgccgtggcctgcttcggcgtcgaagaactgagtaaagcttacgaggacgatggggatgattactcttccatcatggtgaaggccctgggcgatcggctggctgaggcatttgctgaggaattgcatgagcgagtgaggagagagctatgggcttactgtggatctgaacagctggacgtggccgacctgagacggctgagatataagggaataagaccagccccagggtacccatctcagcctgaccacaccgagaaactcacaatgtggcggcttgccgacatcgaacagtccacgggaatccggttaaccgagagtctcgcaatggcccccgcttctgctgtcagcgggctctacttttccaacctcaagagcaagtatttcgccgtcgggaagatcagcaaggatcaggtggaggactatgcactgagaaaaaatataagtgtcgccgaggtcgagaagtggcttgggcccattcttggatacgatacagactag

SEQ ID NO: 177391 - DNA, 2178 bp, synthetic construct
  misc_feature 1..2178: note = Description of Artificial Sequence: Synthetic coding sequence
  source 1..2178: mol_type = other DNA
atgggcgccgccagcgtgcgggccggcgcccggctggtggaggtggcattatgttcctttacagtgacttgcctggaagtgatgaggcgctttttattgctttacgccacccagcaagggcaggccaaagccatcgccgaagagatctgcgagcaggccgtcgttcacggcttctccgcagacttacactgcatttccgaaagcgacaagtatgacctgaaaacagagacagccccccttgtggtggtcgtatccacaacaggaaccggcgaccctccagataccgcccggaagtttgttaaggagatccagaaccagacgctccccgttgactttttcgcacatctcagatacggactgctcggccttggtgacagcgaatacacatacttctgtaacggtggcaaaatcatcgacaagcgtttgcaggagctgggggcaagacatttttatgatacagggcatgcagatgattgtgtggggctggaattggtggtggagccgtggattgcaggcctctggcccgcgttgcggaagcattttaggtcgtccagaggacaggaggagataagcggcgccctgcctgtagcttctccagcctcttctagaacagacttagtgaagagcgaactccttcacatagaatcccaagtggaactcctgaggttcgatgactcagggcgcaaggattccgaagtgctcaagcagaacgcagtgaatagtaatcagagtaacgttgtaattgaagacttcgagagttctctgactcgcagcgttccgcctttgtcccaagcaagtctgaacataccgggcctccctcctgagtatcttcaggtgcatcttcaggagagcctaggtcaagaagaatcccaggtctccgtcacatctgctgatccggtgttccaggttccaatatccaaagctgtccaactgaccacaaatgatgctatcaagaccactctgctggtggagctagacatcagtaatacggatttttcttaccaaccgggcgacgcattttcagtcatttgtcccaattccgactccgaagtgcagtcactgctgcagcgtctgcagcttgaggacaaaagggagcactgcgtgctgctgaaaattaaggccgataccaagaaaaagggcgctacgttaccccaacatatacccgcaggttgctcattgcaatttatttttacctggtgtctggaaattagggcaatccccaagaaggcatttctgagagcccttgtggactatacctccgatagtgcggagaagcggagactgcaggagctgtgctcgaagcaaggcgcagctgattacagcagattcgttcgggacgcctgtgcttgtctgcttgacctgctcctagcatttccttcttgtcaaccgcccctgagtctcctgctagaacaccttcctaagctgcagccccggccatattcctgtgccagcagcagcttattccaccccggtaagctccactttgtttttaacatcgttgagtttctgtccacagctacaaccgaagtcctgcggaagggggtgtgtacggggtggcttgccttacttgttgcatctgttctccagcctaatatccatgcctcacacgaagattctggaaaagcgctagccccgaaaatctccatcagtccaaggactaccaattcatttcacttacctgatgacccctctattccgatcatcatggtgggccctgggaccggaatcgccccattcatcggattcctgcagcacagagaaaagctccaggaacagcaccccgacggcaactttggggcaatgtggctttttttcggatgtagacataaagatcgagattacctgttcaggaaggaattgagacactttttgaagcatgggatattgacccatctgaaagtctcattctccagagatgcacccgtgggagaggaggaagcaccagcaaagtatgttcaggataacatccaattgcatggccagcaggtcgctcgaattctgttgcaggagaacggccatatctatgtctgcggagacgctaagaacatggcaaaggatgtccacgatgccctcgtgcagatcatcagtaaggaggtgggggtggagaagctggaggcgatgaaaaccttagccacgctgaaggaagagaaacgctacctgcaggacatttggtcctag

SEQ ID NO: 177392 - DNA, 177 bp, synthetic construct
  misc_feature 1..177: note = Description of Artificial Sequence: Synthetic coding sequence
  source 1..177: mol_type = other DNA
atgcggcggttcctgctgctgtacgccacccagcagggccaggccaaggctatcgctgaggaaatctgcgagcaggcagtcgtccacggattttccgctgatctgcattgcattagcgaatccgacaaggtgtctgttatccaaaacacacccacctttgcaatgggggggcgatag

SEQ ID NO: 177393 - DNA, 2097 bp, synthetic construct
  misc_feature 1..2097: note = Description of Artificial Sequence: Synthetic coding sequence
  source 1..2097: mol_type = other DNA
atgcggcggttcctgctgctgtacgccacccagcagggccaggccaaagccatcgccgaagagatttgcgaacaggccgtggtgcatggattcagcgctgatctgcactgcatctcagagtccgataagtacgatctgaagacagaaaccgctcccttagtggtcgtagtctctaccaccggtaccggagaccccccagacacggcgcggaagttcgtaaaggaaattcagaatcaaaccctacccgttgacttcttcgcgcacttgagatacggcctgctggggctcggcgactcagaatacacctatttctgtaatggtggcaagattatagataaacgcctgcaagaattgggcgcaagacatttctatgatacaggccacgccgatgattgcgtcgggctcgagctagtggtcgagccatggattgcaggactatggccagcattgaggaaacattttcggtctagtcgcgggcaggaggagatcagtggcgccctccctgtggcctccccagcctcctcccgtactgacctggtcaaatccgagctgttacacatcgaatcccaggttgaactcttacgctttgacgatagcggtcgcaaagatagtgaagtcctcaaacagaatgcggtgaacagcaaccagtccaacgtggtgattgaggatttcgaatcctccctgaccaggtcagtgccgccactgtcccaggcatccctgaatattcccggacttcctccggaatatctgcaggtgcacctccaggagtccctcggacaggaagaatcccaggtgtccgtgacttctgcagatccggtgtttcaggtccccatctcgaaagctgtgcagttgactacaaacgacgctataaaaactactttactggttgagctcgacatatccaacaccgatttcagttaccaaccaggtgacgcattctctgtcatctgcccgaactcagattctgaggtgcagagcctgctgcagcgactccagctagaggacaagcgtgagcattgtgtgttgctcaagatcaaggccgatacgaagaagaaaggcgctactctgccacagcacatccctgccgggtgtagcctccagttcatctttacgtggtgcctggaaattcgagctattccgaagaaggcattcctgcgggcactcgtagactacacatcagattcggcagaaaagaggcggctacaggaactttgctcaaagcaaggagccgcagattacagccggttcgttagagacgcctgtgcctgtctgctggacctgctccttgcgtttccatcctgccagccccctttgtcgctgttattagaacacttgcctaaactgcaaccccgcccctactcctgcgcatcctccagcctctttcatcccggcaaactgcactttgtgttcaacattgtcgaattcctgagtacagcaacaactgaagtgctgcgaaaaggggtgtgcacaggatggctggctctgcttgttgccagcgtgctgcagcctaacatccacgcttcgcacgaggactctggaaaagctctggcccccaagatctcaatttccccccgcaccacgaattccttccacctccctgatgaccccagcatccctataatcatggtgggccctggaacggggattgctcccttcattgggtttctgcagcaccgtgagaaacttcaggagcaacacccggacggaaacttcggggctatgtggctgttcttcggttgccgtcacaaggatagagattacctgttccggaaagagctgaggcactttctgaagcacggcatcttaacacacctgaaagtgagtttttctagagatgctccagtgggagaagaggaagcccccgcaaagtacgtgcaggataacattcagttgcatggacagcaggtggcccgcatactgctccaagagaacggccacatttacgtgtgtggagatgccaagaatatggccaaagatgttcacgacgcccttgtgcagataatttcaaaagaagtcggagtggaaaagctagaagcgatgaaaaccctggccaccctcaaggaagagaaaaggtatctgcaggacatatggtcttag

SEQ ID NO: 177394 - DNA, 471 bp, synthetic construct
  misc_feature 1..471: note = Description of Artificial Sequence: Synthetic coding sequence
  source 1..471: mol_type = other DNA
atgcggcggttcctgctgctgtacgccacccagcagggccaggccaaggccattgccgaggagatttgcgagcaggcagtcgtgcacggcttttccgctgatcttcactgtattagcgaatccgacaaatatgatctcaaaaccgaaacagctccactcgtagttgtggtctcaaccaccggtacgggcgacccccctgacacagctagaaagtttgtcaaggagatacagaaccaaacactccctgtggacttttttgctcatctaagatatggcctgctggggcttggcgacagcgagtatacttatttttgtaatgggggaaaaatcattgataagagattgcaggaactcggcgctcgacacttctacgacacaggacacgctgacgactgcgtgggactcgaactcgtcgtcgaaccctggattgccggtctctggccagccctgaggaagcatttccgctcttag

SEQ ID NO: 177395 - DNA, 126 bp, synthetic construct
  misc_feature 1..126: note = Description of Artificial Sequence: Synthetic coding sequence
  source 1..126: mol_type = other DNA
atgcggcggttcctgctgctgtacgccacccagcagggccaggccaaggcaatcgccgaagaaatttgcgagcaggccgttgtccatggctttagtgccgatttacactgtatcagtgagagctag

SEQ ID NO: 177396 - DNA, 339 bp, synthetic construct
  misc_feature 1..339: note = Description of Artificial Sequence: Synthetic coding sequence
  source 1..339: mol_type = other DNA
atgcggcggttcctgctgctgtacgccacccagcagggccaggccaaggctattgctgaggagatttgcgagcaagctgtagtccatggcttttcagccgacttgcactgtatctctgaatccgacaagtatgacctgaaaactgaaacagccccccttgtggtggtcgtatccacgacaggcacaggggatccccccgatacggccaggaagttcgtaaaggaaatccagaatcagaccctcccagtggattttttcgcccatcttcgatacggactgcttggtctcggtgattcagaatacacttacttttgtaatggtggaaaaatcatcgattag

SEQ ID NO: 177397 - DNA, 249 bp, synthetic construct
  misc_feature 1..249: note = Description of Artificial Sequence: Synthetic coding sequence
  source 1..249: mol_type = other DNA
atgctgtgggaccccgccctgccccggctggccgtgtacgccagctgcttattcttttcatgcttggatgcccatgagggtcccgttcacggaccgcgcggacgaggggagggaggtcggggcagcgaacgacagagggtgcgtcctggggggggtggtggggccggctcggtgcacatccatctggaggaagaagacggcgccgaggaccaggatcatcgagacgaggactggataaccaaaaaatag

SEQ ID NO: 177398 - DNA, 1647 bp, synthetic construct
  misc_feature 1..1647: note = Description of Artificial Sequence: Synthetic coding sequence
  source 1..1647: mol_type = other DNA
atgaccatggccgccgccgccgtggtggcccggggcgccggcgcccgtgctgccacggccgctgctctcagagggggctgtggcaccgccgcacgagggaggccatgcgcgggacctgctcggcccttatgtactgcacccggtaccgcgcccgacatgaagcggtatctgtgggagaggtatcgcgaggccaagagatccacggaggagctcgtcccttctattatgagtaatttactcaacccagatgcaatcttttctaacaatgaaatgagtttatcggacattgagatatacggattcgactacgactacacgctggtcttctactctaaacatctgcacactttgatcttcaatgccgctcgggatcttcttattaatgagcacaggtacccagctgagataaggaagtacgagtatgatcccaattttgcaatccgggggcttcactatgatgtccagagggcagttctgatgaagatcgacgcttttcattatattcaattgggcaccgtgtatcgcggtctgagcgtggtgcctgacgaagaggttattgaaatgtatgaagggtcccacgtgccactcgagcagatgtctgatttttatgggaagagttctcacggcaatactatgaaacagttcatggacatcttcagcctgcccgaaatgaccttgctgagctgcgtaaatgagtactttctgaagaacaacatcgattacgagcccgttcacctgtacaaggatgtgaaggatagtatccgggatgtccatatcaaaggcatcatgtacagagcaatcgaggcggatatcgaaaagtacatatgctatgcggaacagaccagagctgtgttggctaaattggctgaccacggaaaaaagatgttccttatcaccaactcccccagcagcttcgtggacaaggggatgagctatatcgttggcaaggactggcgcgatctctttgatgtggtgatcgtgcaggcagaaaagcctaattttttcaatgataaacgtaggcctttcaggaagatgaacgagaagggagtgctactctgggacaagattcacaagctacagaaaggtcagatatacaaacaagggaacctttacgagttcctaaaactcactggatggcgaggttcccgagtgctgtactttggcgaccatatttactccgacctcgcggacctcaccctgaagcacggatggcggacaggcgccatcatccccgagctgcggagtgagttgaagatcatgaacactgaacaatatatccagaccatgacctggctacagactctgacgggtctactcgaacagatgcaggtacacagggatgctgaatcgcagctagtccttcaagagtggaagaaggagcgcaaggaaatgcgcgagatgactaagtcattcttcaacgcacagttcgggagcctattcaggacagaccagaatcctacctattttctaaggcggttaagccgattcgccgatatctacatggcctcgctttcctgtctgctgaactatgacgtcagtcacaccttttacccgcggcgcacgcccttacagcacgaattgcctgcatggtccgaacgtccacccacgttcggcacaccactcttacaggaggcgcaggctaagtag

SEQ ID NO: 177399 - DNA, 1686 bp, synthetic construct
  misc_feature 1..1686: note = Description of Artificial Sequence: Synthetic coding sequence
  source 1..1686: mol_type = other DNA
atgagcaccagctggagcgaccggctgcagaacgccgccgacatgcccgcaaatatggataagcatgcattgaagaagtataggagggaggcctaccacagagtatttgtgaatcgttctctagcaatggagaaaatcaaatgtttcgggttcgacatggactatacattagctgtatacaaatcccctgagtacgagagcctgggatttgaactgacagtcgagagactagtttctattggctatccccaagagcttctttctttcgcctatgactccaccttccccacacgcggactcgttttcgatactctgtacggtaacctgttgaaagtcgatgcgtacggcaacctgttggtttgtgcacatggcttcaacttcattcgtggtccagagactcgcgagcagtatcccaacaagttcatacaaagggatgacaccgagagattttacatcctgaatacgctgttcaacctacccgagacctatttgctggcctgccttgtcgattttttcactaactgccccagatatacaagctgtgagaccggattcaaggatggggatctgttcatgtcttatagaagtatgtttcaggatgtcagggatgcagtggactgggtccactacaaaggcagccttaaggaaaagaccgtggaaaatcttgagaaatatgttgttaaggacgggaagctccccctcctgctgagtcgcatgaaggaggtcgggaaggtctttctggccacaaactcggactataaatataccgataaaatcatgacttacctcttcgactttccgcacgggccgaagcccggctcaagccacaggccttggcagagctacttcgacctgatcttagtggatgctaggaagcctctgttcttcggtgaggggacagtcctgcgccaggtagataccaagaccggaaaattgaagatcggcacctatacaggcccccttcagcatggcatcgtgtactccggaggcagttccgacactatttgcgatctccttggagcaaaaggcaaagatattctgtacataggcgatcatatattcggagatatactgaaatctaagaagcgccaggggtggagaacgttcctggtgatccctgagctcgcgcaggagctgcatgtgtggaccgataagtccagcctttttgaggagcttcagtccctggatatattcctggctgagctctacaagcatctggactcttcatctaacgaacggcctgacatttctagcatccaacgacgaattaagaaggtgacccatgatatggacatgtgctatgggatgatggggtcactgttccgatcagggtcccgccaaacactgtttgcgagccaagttatgcggtatgccgatctgtacgcagcttcctttatcaatctcctttactatccctttagctacctattcagagcggcacacgtccttatgcctcatgagtccaccgtggaacacacccatgtggacatcaatgagatggaatctccgctggctaccagaaataggacgtcagtcgatttcaaagacacagactacaaacggcatcaacttacacgctcgatatcagaaattaaacctcctaacctattcccgctcgctccacaagagatcactcactgtcacgatgaagatgacgatgaggaggaggaggaggaggaggaatag

SEQ ID NO: 177400 - DNA, 600 bp, synthetic construct
  misc_feature 1..600: note = Description of Artificial Sequence: Synthetic coding sequence
  source 1..600: mol_type = other DNA
atggactacaccctggccgtgtacaagagccccgagtacgagagcctaggatttgagttgactgtcgagcgacttgtttcaattggctacccgcaggaactgttgtcattcgcctatgactctactttccccactagaggacttgtgtttgacaccttgtatggcaacttactaaaagttgacgcatacggaaacctattggtgtgtgctcacggattcaacttcattagagggtcccaagtagccgtgcagaagaggcccgagacccgggagcagtaccctaacaaattcatccagagagatgacacggaacgtttctatattctgaatacgctgtttaatttgcccgaaacgtacctcttagcttgtctcgttgatttttttacaaactgtccaagatacaccagttgtgaaacaggcttcaaggatggcgacctctttatgtcctataggtctatgttccaagacgttagggacgctgtagactgggttcactacaaaggctcactgaaagaaaaaacggttgagaacctggagaaatacgtggtgaaagattccaagtcgtctcgcattcaatacttcctcaaggtcctgtggtag

SEQ ID NO: 177401 - DNA, 1686 bp, synthetic construct
  misc_feature 1..1686: note = Description of Artificial Sequence: Synthetic coding sequence
  source 1..1686: mol_type = other DNA
atgagcaccagctggagcgaccggctgcagaacgccgccgacatgcctgccaatatggataagcacgcactcaagaagtatcgacgagaagcctatcatagagtctttgtgaacaggagccttgctatggaaaaaattaagtgtttcggtttcgatatggactacacgctggccgtatataaatcaccagagtatgagagcctggggttcgaactgacagtagagcggctcgtcagcatcggttatccacaggaactcctcagtttcgcatatgactcaacgtttccaacacgaggattagtgttcgacacactgtatggcaaccttctaaaggttgacgcgtatgggaatctgttggtctgcgctcacggattcaattttatccggggtcccgagacgagggagcagtaccctaacaagttcatacagagggacgatactgaacggttctatattctcaatacattgtttaacctccccgagacttacttgctcgcatgcttggtagatttcttcaccaactgcccacgctatacatcttgcgagaccggcttcaaggatggtgatctgttcatgtcctatcgtagtatgttccaggatgtcagagatgctgtcgattgggtgcactataaggggtctctgaaggagaaaaccgtggaaaatcttgagaagtatgtggtgaaggacggaaagcttcccttgctcctgtccaggatgaaggaagttgggaaggtgttcctcgcaacaaactccgactacaagtacaccgacaagataatgacatatctgttcgacttccctcacgggcccaagcccggctccagccacaggccctggcagtcctactttgatctgattctggtggatgctagaaagcccctgttttttggagagggtacggtactcaggcaggtggacacgaagaccggtaaactaaagattggaacctatactggaccccttcagcatggaatagtgtactcgggcggaagcagcgataccatttgtgatctccttggcgccaaagggaaggacatcttgtacattggagatcacatttttggggacattctcaaaagcaaaaagcgtcagggttggagaacctttctcgtaattccagagctggcacaagagctgcatgtctggaccgacaagtcaagcctgtttgaagaactacagagtctcgacatctttctggccgagctgtataagcacctcgacagcagttccaatgagagacctgatatatcgtccatccagaggcgtatcaagaaagtcacccacgacatggacatgtgctacggcatgatggggagcctgtttaggagcgggtcccgacagaccctcttcgctagtcaggtgatgcgctacgctgacctatatgctgccagctttataaacctactgtactacccattcagttacctctttcgagctgcacatgtactgatgccccacgagtctacagttgaacacacccatgtcgatattaatgaaatggagtcacccctcgccacaaggaaccgcaccagtgtagacttcaaagatacagattataaacgtcatcaactcacaagatcaatcagtgagattaagcccccaaacttgtttcctctagccccccaggaaattacacattgtcacgacgaggatgacgacgaggaagaggaggaagaggaagagtag

SEQ ID NO: 177402 - DNA, 444 bp, synthetic construct
  misc_feature 1..444: note = Description of Artificial Sequence: Synthetic coding sequence
  source 1..444: mol_type = other DNA
gtgctgcggcaggtggacaccaagaccggcaagctgaagatcggcacctacaccggcccacttcagcacggcattgtctactctggagggtcctcagacacgatttgtgatttactgggcgcgaagggaaaggacattctatacatcggcgatcacatctttggtgatatcctgaagagcaaaaagcgccaggggtggcgaacattccttgtcattcctgagcttgcgcaagaattgcacgtgtggaccgataagagcagtctgtttgaggagctgcagagtctcgacatcttcctggctgagttgtataaacatctcgactccagttcaaacgaaaggccagacataagtagtatccaaaggcgtataaagatgcctcatgagtccaccgtggagcacactcacgttgacattaatgaaatggagagtccactcgctacctag

SEQ ID NO: 177403 - DNA, 1599 bp, synthetic construct
  misc_feature 1..1599: note = Description of Artificial Sequence: Synthetic coding sequence
  source 1..1599: mol_type = other DNA
atgagcaaggagggcgtgttcgtgaaccggagcctggccatggagaagatcaaatgttttggattcgacatggactacaccttagccgtgtacaaaagtcccgagtacgagagtctgggattcgaattaactgtggaacggctggtaagtattggttacccccaggaacttctgagcttcgcctacgactccacgttccccacgcgtgggttggtgttcgatacactgtatggaaatcttttaaaggtggacgcttatggcaatctcctggtttgcgcccacggatttaacttcatccgcggccctgagaccagagaacagtatccaaataagttcatccaacgtgatgacaccgaacgattctacatcctgaatacgctctttaatctaccagagacctacctcttagcctgcctagtcgacttttttactaattgcccgagatacacttcttgcgagaccggtttcaaagacggcgacctttttatgtcgtataggagcatgttccaggatgtgcgcgatgccgtcgactgggtccactacaaaggctcgctgaaagagaagacggttgagaacctggaaaagtatgtggtgaaggacggaaagctccctttgctgctgagtaggatgaaggaagtgggcaaggtctttctggcgacaaattcggattacaaatacacagataaaatcatgacttacctgttcgactttccacatggacctaagccaggttcatctcatcggccctggcaatcctacttcgacctgatcctggtggacgcacggaaacctctgtttttcggggagggaaccgtactgcgacaggtggataccaagacaggaaagcttaaaattggcacatacacgggccctctgcagcatggaattgtttattcaggaggatcctctgacactatctgtgatctgcttggggccaaaggaaaggatatcctctatatcggggatcatatttttggagacatcctgaaatcaaaaaagaggcagggttggaggacgttcctggttataccggaactagcgcaggagttgcatgtctggactgataagtcctcattattcgaggagctccaatccctggatatctttcttgcggagctgtacaagcacttggacagcagctcaaatgaacggccagacatttcctccattcagcgaagaatcaagaaggtgacacatgacatggatatgtgttatgggatgatgggaagcttatttcggtcaggcagccgacagaccctattcgcaagtcaagtgatgcgttacgcagatctgtacgccgcgtctttcattaacctgctatactatcccttcagctacttgttcagggctgcacacgttttgatgccacacgagagtactgtggaacacactcacgttgacattaatgaaatggaaagtccacttgccacaaggaatagaacatcagtggattttaaagatacagattataaaaggcaccagctaacacgctcaatttccgagattaagccaccaaatttgtttccactggctccccaggaaatcacccactgtcacgacgaggatgacgatgaggaagaggaggaggaggaggagtag

SEQ ID NO: 177404 - DNA, 798 bp, synthetic construct
  misc_feature 1..798: note = Description of Artificial Sequence: Synthetic coding sequence
  source 1..798: mol_type = other DNA
atgagcaccagctggagcgaccggctgcagaacgccgccgacatgcccgctaatatggacaagcatgcgctgaagaaatataggagggaggcgtatcaccgcgtgttcgttaatcggtcgctggccatggagaaaattaaatgttttgggtttgacatggattacaccctggcggtgtataagagtcctgagtacgaatccctggggtttgagctcactgttgaaaggctcgtcagcattggctatcctcaggagttgctcagctttgcgtatgactctactttcccaactcgcggacttgtctttgacacgctctatggaaatcttctgaaggtggatgcctacggaaatcttctggtctgtgcccacggctttaatttcatcaggggtagccaggtggctgtgcagaaacgtccagaaacccgggagcagtaccccaataaatttatacagcgcgatgatacggaacgattttacatcctgaacaccctattcaatctgcctgagacatatctgcttgcatgcttggtggatttttttacgaattgccctagatataccagctgcgagaccggtttcaaagacggggatctttttatgagctacagatcaatgtttcaagacgtgagagacgctgttgattgggtccactataaggggtccttaaaggaaaaaaccgtggagaacctggagaaatatgtggttaaggatggcaagctccccctgttgctgtcgcgtatgaaggaagtaggcaaggttttcctcgccacaaatagcgactacaaatacacagattag

SEQ ID NO: 177405 - DNA, 525 bp, synthetic construct
  misc_feature 1..525: note = Description of Artificial Sequence: Synthetic coding sequence
  source 1..525: mol_type = other DNA
gtgagcatcggctacccccaggagctgctgagcttcgcctacgacagtaccttcccgacacgcggcctcgtattcgataccctttacgggaatttacttaaggtcgacgcctacgggaatttgttggtgtgcgcccatgggttcaatttcatccggggttctcaagtggccgtgcagaaacggccggagactcgagagcagtaccctaacaaatttatacaaagagacgatactgagagattttacatcctgaataccctgttcaacctgccggaaacctaccttctggcatgccttgtggacttctttaccaattgcccgagatacacttcatgcgagaccggttttaaagatggagacctgttcatgtcataccgctctatgttccaggacgtacgggacgcagttgactgggtgcattacaaggggtccctgaaggagaaaactgtggagaatttagagaaatacgtggtcaaagattccaaaagtagtcgcattcagtatttccttaaggttctctggtag

SEQ ID NO: 177406 - DNA, 1011 bp, synthetic construct
  misc_feature 1..1011: note = Description of Artificial Sequence: Synthetic coding sequence
  source 1..1011: mol_type = other DNA
atgcgggcccccagcatggaccgggccgccgtggcccgggtgggcgccgtcgccagcgccagtgtgtgtgcactggtagccggagtcgtgctggctcagtacatatttactttaaaaaggaaaacaggccggaagacaaagatcatcgaaatgatgccagaattccaaaagagctccgttcggattaagaatcctacccgggtggaggagattatctgcggactcatcaagggcggcgctgcgaagctgcaaattataactgattttgatatgactctgtcgagattctcctataagggtaaacgctgcccaacttgccacaatatcatcgataactgtaagctcgtcactgacgaatgcaggaaaaaactcttgcagttaaaagaaaagtattatgctattgaggtggatcccgtcctgacagtcgaggagaagtacccatacatggtggagtggtataccaagtctcacggcctcctcgtacagcaagcgcttccgaaagcaaaattgaaagagatagtcgctgaatcggacgttatgctgaaggagggatatgagaatttcttcgacaaactccaacagcactcaattcctgtgttcatattctcggctggcatcggagacgtgcttgaggaagtgataagacaagctggggtgtaccaccccaatgttaaagttgtttccaactttatggattttgacgagactggcgtgttaaaaggattcaagggagagttgatccatgtgtttaataaacatgacggagccctgaggaacaccgaatactttaaccagctcaaagataattctaatatcatcctattaggggattctcagggagatctgagaatggccgacggcgtcgccaacgtggaacatattttgaagattggctacctcaatgatcgtgttgacgagcttcttgagaaatacatggacagttatgatatcgtactggttcaagacgagagcttggaggttgcgaatagcatcctccaaaaaatcctctag

SEQ ID NO: 177407 - DNA, 858 bp, synthetic construct
  misc_feature 1..858: note = Description of Artificial Sequence: Synthetic coding sequence
  source 1..858: mol_type = other DNA
atgcccgagttccagaagagcagcgtgcggatcaagaaccccaccagggtggaggaaatcatttgcgggcttattaagggcggggcagcaaagttacagatcatcactgacttcgacatgaccctcagtagatttagctacaagggcaagcgctgtcccacttgccataatatcatcgataattgtaagttagtgacggatgagtgtagaaagaagctgttacagttaaaagaaaaatattatgccattgaggtcgatccagtgctgaccgtcgaagagaaatatccatatatggtcgagtggtatacaaaaagtcacggcctcctggttcagcaggcactgccaaaagctaagctcaaagaaatcgtggcagaaagtgatgttatgctaaaagagggatatgagaacttctttgacaagctgcagcagcattcaatccccgtctttattttcagcgctggcattggtgacgtgctggaagaagtaatcaggcaggccggggtctatcatcccaacgtgaaagtcgtgtctaacttcatggatttcgacgaaaccggggtgctgaaaggctttaaaggtgagctcatccacgtgtttaacaaacatgatggggcgctgagaaatactgagtacttcaatcaattgaaagataacagtaatatcatcctgctgggggactcgcagggagacctgaggatggccgacggggttgccaatgtggaacacatcctcaagattggttatctgaatgaccgggtggatgagctgttagagaaatacatggatagttacgacatcgttctagtacaggacgaatctctcgaagtggccaatagtatcctccagaagatcctttag

SEQ ID NO: 177408 - DNA, 894 bp, synthetic construct
  misc_feature 1..894: note = Description of Artificial Sequence: Synthetic coding sequence
  source 1..894: mol_type = other DNA
atgaccaaccaggagagcgccgtgcacgtgaagatgatgcccgagttccagaaaagttccgtcaggattaaaaacccaactcgggtggaggagatcatatgcggtctgattaaaggtggcgctgctaaattgcagatcataactgatttcgatatgaccctcagccgatttagttacaaagggaagagatgtcccacctgccacaacatcatagataactgtaaactggtgactgacgaatgccggaaaaaactgctgcagttgaaagagaagtactatgcaattgaggtggatccggtgctgactgtcgaggagaaatatccctacatggtggagtggtacaccaagagccacggacttctggttcaacaggcacttccaaaagccaagcttaaggagattgtggcggaatcagacgtaatgctaaaggaggggtacgaaaacttcttcgacaaactgcagcagcactctattcctgtttttatctttagcgccggaatcggagacgtcctggaggaagtgattagacaggccggcgtgtatcatccgaatgtgaaagttgtctctaattttatggatttcgatgagacaggcgtcctgaagggtttcaagggagaattgatccatgtgttcaacaagcacgatggggccctcaggaataccgagtacttcaaccagctgaaagataactctaacatcatcctgctgggggattcccaaggcgacctgagaatggctgatggggtcgctaacgtagaacatatactgaagattggatacctgaatgacagagttgatgaactgcttgagaagtatatggactcctacgacatcgtgttagtccaggatgaaagtctcgaagtcgcaaacagtatcctacagaaaattctctag

SEQ ID NO: 177409 - DNA, 894 bp, synthetic construct
  misc_feature 1..894: note = Description of Artificial Sequence: Synthetic coding sequence
  source 1..894: mol_type = other DNA
atgaccaaccaggagagcgccgtgcacgtgaagatgatgcccgagttccaaaagagttccgtgagaattaaaaatcctaccagagttgaggaaataatttgtggactaatcaaggggggagctgccaagctgcagatcattacggattttgatatgaccctcagtcgattctcctacaaggggaaacgctgccctacatgccataacattatagacaattgcaaactggtcactgacgagtgtagaaagaaactgttacaactaaaagagaagtattatgccattgaggtggacccagtgttgacagtcgaggagaagtatccatatatggtagagtggtacaccaagagccacggacttttggtacagcaagcactgccaaaagcaaagctgaaagagattgttgccgagtcggacgtgatgttgaaagaaggatatgaaaacttcttcgacaagttacagcaacattcaattcccgtgtttattttctccgcggggatcggcgacgttctggaggaagtgatccggcaagctggagtataccacccgaacgtaaaagtggtatcaaatttcatggacttcgatgaaacaggtgtgctgaagggattcaaaggggagttaattcacgtcttcaataaacacgatggggcattgagaaacaccgagtatttcaatcagctgaaggacaacagcaatattatcttactcggagactctcaaggagaccttagaatggcagacggagttgcaaatgtggaacacatcctcaaaattgggtatctgaacgatcgcgtggatgagcttctggagaagtatatggacagctacgatatcgtgctcgtgcaagacgaatccttggaggtggccaattccattttgcagaagattttatag

SEQ ID NO: 177410 - DNA, 858 bp, synthetic construct
  misc_feature 1..858: note = Description of Artificial Sequence: Synthetic coding sequence
  source 1..858: mol_type = other DNA
atgcccgagttccagaagagcagcgtgcggatcaagaaccccacccgcgtcgaggagatcatctgcggactgatcaaagggggagctgccaagctgcagattattactgactttgacatgacactctcgcgcttcagttataaaggaaaacggtgccccacttgccataacattattgataattgtaaactggttacagatgagtgccggaagaagctgctgcagctgaaagagaagtattatgccattgaagtggaccctgtgcttactgtggaagagaagtacccgtatatggtcgagtggtacacaaagtcgcacggactcctggtgcagcaggccctgcccaaggctaagctaaaagagatagtggctgaatcagacgtcatgctcaaagaaggctacgagaatttcttcgataagctccagcaacattcgataccagtgtttattttctccgctggaattggggacgtgctcgaggaagtaattaggcaggccggcgtctaccaccctaatgtgaaggtggtaagtaacttcatggactttgatgagaccggggtgttgaagggcttcaagggggagttgattcacgtattcaataagcatgatggcgcactgcggaatacggaatattttaatcagctcaaagataacagcaacattatcttgctgggagacagccaaggtgacttgagaatggctgacggcgtggcaaacgtggaacatatcctgaagatcggatacctgaacgatagggtggatgaactattggaaaaatacatggattcttatgatatcgtgctggtccaggacgagtcattagaagtcgccaactccatcctacaaaagatcctatag

SEQ ID NO: 177411 - DNA, 129 bp, synthetic construct
  misc_feature 1..129: note = Description of Artificial Sequence: Synthetic coding sequence
  source 1..129: mol_type = other DNA
atgcccgagttccagaagagcagcgtgcggatcaagaaccccacccgggtggaagaaatcatatgcgggttgatcaagggaggagcagccaagctccagattattaccgactttgacatgactttatag

SEQ ID NO: 177412 - DNA, 1725 bp, synthetic construct
  misc_feature 1..1725: note = Description of Artificial Sequence: Synthetic coding sequence
  source 1..1725: mol_type = other DNA
atgtgcccccgggccgcccgggcccccgccaccctgctgctggccctgggggcggttctgtggccggctgcgggcgcatgggaactgactatacttcacaccaacgacgtccattcccgcttggagcaaacttcagaagactccagtaagtgtgtcaatgcgtccaggtgtatgggcggcgttgcgagactttttactaaagtgcagcagatacgaagggcggaacctaatgttctgcttctcgacgccggggaccagtaccaagggactatttggtttacagtgtataagggggccgaagtggcccactttatgaacgcattacgctacgacgctatggccctgggaaatcacgagtttgacaacggcgtcgaagggctaatcgaaccattgcttaaagaggccaaattcccaattctttctgcaaacatcaaggcaaagggcccgctggccagccagataagcggactctatcttccatacaaggtgctcccggtgggggatgaggttgttgggatcgtgggctatacttccaaagaaacgccgttcctaagtaatccggggaccaacctggtatttgaagacgagataacggctctgcagccagaggtcgataaattgaaaactttgaatgtaaacaagattattgctctcgggcattctggttttgagatggacaaactgatagcacaaaaggtgcggggcgtggacgttgttgtgggaggacactcgaacacattcctgtatacaggaaaccccccctcgaaagaagtgccagctgggaagtatccctttatagtcacctcagatgacgggcggaaagtgccagtggtgcaggcctacgcatttggaaaatacctaggatacctgaaaatcgaattcgatgagagaggaaatgttatctcctcgcacgggaatccgattctgctcaactcctcaatacccgaggacccctcgatcaaagcagatattaataagtggcggataaaactggacaactactcaacacaggaactcggcaagactatcgtgtatttagacggtagttcccaaagctgcaggttcagagaatgtaatatgggcaacctcatctgcgatgccatgatcaataacaatttgaggcacacagacgagatgttctggaatcacgtcagcatgtgtatcttgaacggaggtggaatccggtctcccatcgacgagcgaaataacgggactataacctgggagaacctggcagcagtgttgccgtttgggggtaccttcgacctggttcaactgaaaggctctacactcaaaaaagccttcgaacactcggtgcaccggtatggtcagagtacgggggaattccttcaagttggtggcattcatgtcgtctacgacctctccaggaagcctggtgaccgtgtagttaaactcgatgtgctgtgcactaagtgtcgcgtgcctagctacgatccattaaaaatggatgaggtttataaagttatcttaccgaattttctggcgaacggcggcgacggttttcagatgatcaaagacgagctcctcaggcatgattcaggggaccaggatattaacgtcgtgagcacttatatatctaaaatgaaggtgatttacccagctgttgagggtcggatcaaattctccacgggatcacattgccatgggtctttctccctgattttccttagcctgtgggccgtaatctttgtgctttatcagtag

SEQ ID NO: 177413 - DNA, 795 bp, synthetic construct
  misc_feature 1..795: note = Description of Artificial Sequence: Synthetic coding sequence
  source 1..795: mol_type = other DNA
atgtgcccccgggccgcccgggcccccgccaccctgctgctggccctaggggccgtcctctggccagcagccggagcatgggaactcaccattctccacactaatgatgttcattctagactggagcaaacgtccgaagatagctcaaaatgtgtaaacgcttcgaggtgtatgggtggagtggcacgactgttcactaaggttcagcagatcagacgcgccgagcccaacgtccttctgctggacgccggggatcagtaccaggggacgatttggttcacagtgtacaagggagccgaggtcgctcattttatgaacgcactgagatatgatgccatggccctcggaaatcacgagtttgacaatggggtcgagggattgatcgagcccttgctgaaagaggccaaatttccaatcttgtctgctaatatcaaggccaagggccctctggcatctcaaatctccggcctgtatctcccatataaggtgctgccagtcggcgatgaggtggttggtatcgtgggctacaccagtaaagaaacccccttcctctctaacccagggactaatctggtgttcgaggatgagattaccgccttgcaaccagaggtagataagctgaagactcttaacgtgaataagatcattgcgcttggacatagcggctttgagatggacaagctgatagcacagaaggttaggggagtagatgtagtggtgggaggacactccaacactttcctgtacaccggtaattgcttcaaacgcattgcgtgggcccggatgtctaggtag

SEQ ID NO: 177414 - DNA, 780 bp, synthetic construct
  misc_feature 1..780: note = Description of Artificial Sequence: Synthetic coding sequence
  source 1..780: mol_type = other DNA
atggacaagctgatcgcccagaaggtgcggggcgtggacgtggtggttgggggccactccaacaccttcctttacacgggcaatcctcctagtaaggaggtgccagctggaaagtacccatttatagttactagcgatgatggaaggaaagtgccggtcgtgcaagcttacgcctttggaaaatacttgggctatcttaagatcgagttcgacgagcgtgggaatgtgataagttctcatggcaatccaattctcctcaattccagtataccggaggatcccagcatcaaggcagacattaacaagtggcgcataaaactcgacaattactctacgcaggagcttggtaaaactatcgtgtatctcgacggctcgtcgcagagctgccgatttagggagtgcaacatgggcaacctgatttgtgatgccatgatcaacaataatctgagacataccgatgaaatgttttggaaccatgtgtccatgtgtatcctgaacggcggcggaattagaagcccaattgacgaaaggaacaatggcacaattacatgggaaaacttggcagctgttcttccatttggcggaactttcgacctggtgcagctgaagggctccactctgaagaaagccttcgagcattcagtccaccgttatggacaatcgacaggggagttcttgcaagtgggggatctcaaggagtgctgtcctatatgtatcaatcaagatgatagttggaaagagcagcctacggcccaaacctatctgaacacttggttttag

SEQ ID NO: 177415 - DNA, 1575 bp, synthetic construct
  misc_feature 1..1575: note = Description of Artificial Sequence: Synthetic coding sequence
  source 1..1575: mol_type = other DNA
atgtgcccccgggccgcccgggcccccgccaccctgctgctggcccttggtgccgttctatggcctgcggctggagcatgggaactgactatcctccacaccaacgacgttcattccagactggaacagacttcggaggacagttcgaaatgtgtcaatgcttcgcggtgtatggggggcgtcgcgcgtttatttacaaaagttcagcagattaggcgggctgaaccaaatgtgctgcttttagacgctggcgaccagtatcaggggactatctggttcactgtctataaaggcgcggaggtcgcacactttatgaacgcactccgttacgatgctatggcgctaggcaaccatgaattcgataacggcgtagaggggctcatcgaaccattattgaaagaagccaagtttcctattctgtctgcaaatataaaggccaaagggccgttggcaagtcaaatcagcgggctgtatctaccatacaaagtcctgccagtaggggacgaggtagttgggattgtcggctatacaagcaaggagaccccctttctgtccaaccctgggaccaacttggtgttcgaggatgagataacggctctacagccagaagttgacaagcttaaaactctgaacgttaataagatcattgcgttggggcactctggtttcgaaatggacaagctgattgctcagaaggtcaggggcgtggatgttgttgtcggaggacacagcaacaccttcttatatacaggcaaccctcccagtaaagaagtgcctgccgggaagtatccattcatcgtgaccagcgatgatggaagaaaagtacccgtggtccaggcctacgcatttggaaagtacctgggctacctcaaaatcgaatttgacgagcgcggtaatgtgatcagttctcatggcaatcccatactgttaaacagcagcattcctgaagaccccagtattaaagcggatatcaacaaatggcgaataaagctggataattatagcacgcaggagctgggaaaaaccattgtgtacctggatgggtcgtcacaatcatgcagattcagggagtgcaacatgggcaacctgatctgtgatgccatgataaacaataacctgaggcatactgatgaaatgttctggaatcacgtgtcaatgtgtattctaaatggaggagggattaggtctcccatcgatgagaggaataatggaatacatgtcgtgtatgatttgagccggaagcccggtgatagggtggtgaagctagacgtgctctgtacaaagtgtcgtgtcccctcatacgacccattgaagatggacgaagtgtacaaagtaatcttgccaaacttcctcgccaacggcggcgacggttttcaaatgataaaagacgagctgctgagacatgactcaggcgatcaggacataaacgttgtctcgacttacatcagcaagatgaaggtaatttacccagcagtggagggaagaatcaaattctcaaccgggagccactgtcatggaagcttctccctaatctttctgtccctctgggctgtaatatttgtgctctaccagtag

SEQ ID NO: 177416 - DNA, 693 bp, synthetic construct
  misc_feature 1..693: note = Description of Artificial Sequence: Synthetic coding sequence
  source 1..693: mol_type = other DNA
tgagacgtggtggtgggcggccacagcaacaccttcctgtacaccggaaatccaccctctaaggaagttccagccggaaagtacccattcatcgtaacttccgatgacggtcgtaaagtgccagtggtgcaggcgtacgcatttggaaagtacttaggctatctgaaaattgaattcgacgagagaggtaatgtgatctcttcccatgggaatcccattctcctcaacagctcgatccccgaggatccatctattaaagccgacattaacaagtggcgcattaagctcgacaactattccacacaggagctgggaaagacgattgtctaccttgacggttcaagtcagagttgccggtttcgcgagtgcaacatgggcaacctcatttgcgatgccatgatcaacaataacctgaggcacacggacgagatgttttggaatcacgtgtctatgtgtattcttaacggtggtggcatacggagccctatcgacgagaggaacaacggaatccacgtcgtgtacgatctcagtcgtaaaccgggggacagggtcgttaaacttgatgtgctatgcaccaaatgcagagtgcctagttatgaccccctgaagatggacgaagtctacaaggttattctccctaattttctggctaacggaggagacggattccaaatgattaaggacgaattgtag

SEQ ID NO: 177417 - DNA, 540 bp, synthetic construct
  misc_feature 1..540: note = Description of Artificial Sequence: Synthetic coding sequence
  source 1..540: mol_type = other DNA
tgaaaccccatcctgctgaacagcagcatccccgaggaccccagcatcaaggcggacattaacaaatggcgcattaaattagataactactccacccaagagctgggtaagacaatcgtttatctggacggtagcagccagtcctgcagatttcgagaatgtaatatgggcaacctgatctgcgatgcgatgatcaataataacctgcggcataccgacgaaatgttctggaaccatgtcagtatgtgtatactgaacggtggcggcatccggagtccgattgacgaacggaacaatggtaccatcacttgggagaaccttgctgccgtgcttccgttcggaggcaccttcgatttggtgcagttaaaaggtagcacactgaaaaaggcctttgagcatagcgtacacaggtacggtcagagtaccggggagttcctccaggttggagatcttaaggaatgctgtccaatctgtatcaatcaagatgattcgtggaaggagcagccaactgcacaaacatacctcaatacatggttctag

SEQ ID NO: 177418 - DNA, 687 bp, synthetic construct
  misc_feature 1..687: note = Description of Artificial Sequence: Synthetic coding sequence
  source 1..687: mol_type = other DNA
atggtgcggtacagcctggaccccgagaaccccaccaagagctgcaaaagccgcggctccaaccttagggtccactttaaaaacacccgggaaaccgcgcaggctatcaaaggcatgcacattagaaaggccacaaagtacttgaaggatgtaactctccagaagcagtgcgtgccatttaggagatacaatggtggcgtcggaagatgtgctcaggctaagcaatgggggtggactcagggcagatggcctaaaaaatcagccgaattcctgctgcatatgctcaagaacgcagagtctaatgcagagttaaaaggtctggatgtcgatagccttgttatcgagcacatacaggtgaataaggcaccgaagatgcggcgtagaacctatcgggcccacggccgcatcaacccctacatgtcctctccgtgccacattgagatgatcctaaccgaaaaggaacaaatcgttcctaaaccggaagaggaagtggctcaaaagaaaaaactgcgaagcagttccttgggcaaatggtgtgcattcctcgtgtctagttttcagttttgtagcgggagcaccaagaactcatggtctcacatttataccttatggtttcccccaagcctggtcgtgtatggactgcgaaaacagtataaaaatccaatgattcagaccaaggcgaagtag

SEQ ID NO: 177419 - DNA, 816 bp, synthetic construct
  misc_feature 1..816: note = Description of Artificial Sequence: Synthetic coding sequence
  source 1..816: mol_type = other DNA
atgagccccgagatgggcgagctgacccagacccggctgcagaagatatggattccacacagttcaggctcctcacgcctacaaaggagacgcggcagtagtattccgcaatttacgaatagtccaactatggtgattatggtgggactgcctgctcgggggaaaacctatatctcaaccaagctgacgaggtacctgaactggattggcacgccaacaaaagacaacatggaagctctgcaaatccgcaaacagtgcgcgcttgcagcactgaaggacgttcataattatttgagccatgaggaagggcacgttgcagtgttcgacgcgacaaacacgacgcgggagcggcgaagtctgatcttacagtttgccaaggagcatggctacaagggagtgtgcgaggaaatgacctacgaagaaatccaggaacactaccccgaggagttcgcactacgcgaccaggacaaatatcgataccgataccccaaaggagagagctacgaggatttggttcagaggctggaacctgtgatcatggaactggagaggcaagagaacgtcctagtgatttgtcaccaagccgtcatgagatgtcttcttgcctactttttggacaaatcctccgatgaactgccatacttgaaatgtccactccacacagtcctcaagcttacacctgttgcttatggctgcaaggtggagtccatttacctgaatgtggaagcagtaaacactcacagagaaaagcctgaaaacgtagacatcacacgggagcccgaggaagctctggacacagtgccggcgcactactag

SEQ ID NO: 177420 - DNA, 1416 bp, synthetic construct
  misc_feature 1..1416: note = Description of Artificial Sequence: Synthetic coding sequence
  source 1..1416: mol_type = other DNA
atgagccccgagatgggcgagctgacccagacccggctgcagaagatctggatcccccactcaagcggctctagccggctccagagaaggcgcggcagtagcattccacagtttactaacagccccaccatggttatcatggtcggtcttccggcgcgcgggaagacctacatatctaccaagctcacgagatatctcaattggatcggcactcccacaaaggtgtttaaccttggccagtatcggagggaggccgtatcctacaaaaactacgagttttttctccccgataacatggaggctctgcagattagaaagcaatgtgcattggctgctcttaaggatgtgcataactacctgtctcacgaagaaggccacgtagcagtcttcgatgctacaaatacgaccagagagaggaggtccctaatactgcaattcgctaaggagcacggatataaagtgttctttatcgagtctatatgtaatgatccaggtatcattgctgagaacattagacaagtcaaattgggcagtcctgactacatcgactgtgaccgggaaaaagtcttagaggacttcttgaagcgcattgagtgctacgaggtgaactaccagccactagatgaggagctggactcacatctttcttatatcaagatcttcgatgtgggtacccggtatatggtcaaccgggtgcaggatcatattcagagccgaaccgtttattacctgatgaatattcacgttacgccccgctccatctacttatgcagacatggagagtcagagctcaatatccgtgggaggataggtggcgactccggcttaagcgttaggggcaagcaatacgcttacgcactcgctaattttattcagagccagggcatcagcagtctgaaagtctggacgtcccacatgaagcgtacgatacagaccgcagaggcactgggcgtgccctacgagcagtggaaggctttaaacgagatagacgcgggggtgtgcgaggagatgacatatgaggagattcaggagcactaccctgaggagttcgctctccgagatcaggataagtaccgctataggtaccccaaaggggagtcatatgaggatctcgttcagaggttggagcctgttattatggagcttgagagacaggaaaatgtgctggtcatttgccaccaggctgtgatgcgttgtcttctcgcatatttcctggacaagtcaagcgacgaactcccgtatctgaagtgtccacttcatacggttttgaaacttacgccagttgcttatggctgcaaagttgagagtatttacttgaatgtggaagctgtgaatactcatcgagagaagcctgagaacgtcgacatcaccagagagcccgaggaggccctggacaccgtccccgcccactattag

SEQ ID NO: 177421 - DNA, 1221 bp, synthetic construct
  misc_feature 1..1221: note = Description of Artificial Sequence: Synthetic coding sequence
  source 1..1221: mol_type = other DNA
atggaggagaagaccagccggatcaaggtgttcaacctgggccagtacagaagggaagccgtatcatataagaattatgaattctttttgcctgataatatggaagctttacagattaggaagcagtgcgcacttgcagcactgaaagacgtgcacaattacctctctcacgaagaaggtcatgtcgccgtttttgacgcgacgaataccaccagagagaggcgctcactgatcttacaatttgcaaaggagcatgggtataaagtgttctttatcgagtcgatatgcaatgaccctggaattatcgccgaaaatatacggcaggttaagcttggctctcccgattacattgactgcgacagggaaaaagtcttagaggatttcttgaagaggattgaatgttacgaagtcaattaccagccgctagatgaagaattggacagccacctatcctatattaagatttttgatgtaggaacaagatatatggttaacagggtgcaggatcacatccagtctagaactgtatactacctgatgaatatacacgtcacccccaggagcatttatttgtgccgccacggtgaatccgaactaaacattcgaggacgaattggcggggacagtggactatcagtgaggggtaagcagtatgcatatgcattggctaatttcatccagagtcagggcatctcttctctcaaagtctggactagccatatgaaacggacaatccagactgccgaagccctaggagtgccatatgagcaatggaaagcattgaacgaaatcgatgccggagtatgcgaagaaatgacttatgaggaaattcaagaacactaccctgaagagttcgccttaagagaccaggataagtacaggtaccggtaccccaagggggagtcatatgaagatctggtgcaaaggttggagcctgttataatggagcttgagcggcaagagaatgtcctggtgatctgtcaccaggcagtgatgcgatgtctgcttgcctacttcctggacaagtcatctgatgaattgccatacctgaagtgtcccctgcacactgtgttgaagctcacccctgttgcttacggatgcaaagtcgagagtatttaccttaacgtcgaagccgtgaacacacatagggaaaagcctgagaacgtcgatataaccagagagccggaggaggcccttgatacggtgccagcccactactag

SEQ ID NO: 177422 - DNA, 1416 bp, synthetic construct
  misc_feature 1..1416: note = Description of Artificial Sequence: Synthetic coding sequence
  source 1..1416: mol_type = other DNA
atgagcggcgccagcagcagcgagcagaacaacaacagctacgagactaagaccccaaacctgaggatgagtgagaagaaatgtagctgggcaagctacatgacgaactctcccactctcatagtgatgatcgggctacctgctagaggtaaaacatacgtcagtaaaaagctgacaagatacctgaattggattggagtgcctacaaaggtttttaaccttggtgtttaccgacgggaggctgtcaaatcgtacaaatcttacgacttctttagacatgataatgaagaggctatgaagatccgcaagcaatgcgcgctggttgcactggaagacgtcaaggcctacttgaccgaggaaaatggtcagattgcagtttttgatgccactaacacaacaagggaaagaagggacatgatcctgaattttgcggaacagaatagctttaaagtcttctttgtggaaagtgtctgtgatgaccctgatgtgattgctgccaacatactcgaggtaaaagtgagtagccccgattacccagaacggaacagggagaacgtaatggaggactttctgaaacggatcgaatgctacaaggtgacatacaggcctctggatcccgataactatgacaaggatctcagtttcataaaagtcatcaatgtggggcagcggtttctagtgaacagagtgcaggattacatccaatcgaagattgtatactacttgatgaacattcacgtgcagcccaggaccatttacctgtgtcgacacggcgaaagcgaatttaatttgctcggaaagataggaggcgactcaggtttaagcgtgcgcgggaaacagttcgcccaggctcttcgaaaattcctggaggagcaggaaatcacagatctgaaggtttggactagtcaactgaaaaggacaattcaaacagccgagagtcttggagtcccgtacgagcaatggaaaatcctaaacgaaatcgatgctggggtctgcgaggagatgacatatgccgaaattgagaaacgttaccccgaggagttcgcgttacgcgaccaggagaagtatctgtataggtaccctggtggcgaatcgtaccaggatctcgtacagcgtctggagcccgtgattatggagttggagcgacaagggaatgtgctcgtgatttctcaccaggctgtgatgcgatgcttgctggcgtactttcttgataagggagcggatgaattgccctacctcagatgcccacttcacacaattttcaaactgacccctgtcgcctacggctgcaaggttgaaaccattaagctgaatgtcgaggctgttaacacccaccgggacaaacccaccgcggctgaaaccactctggcagtgaggaggagaccatccgcagcgagtctgatgttaccctgctag

SEQ ID NO: 177423 - DNA, 1518 bp, synthetic construct
  misc_feature 1..1518: note = Description of Artificial Sequence: Synthetic coding sequence
  source 1..1518: mol_type = other DNA
atgagcggcgccagcagcagcgagcagaacaacaacagctacgagacaaagaccccgaacttgcggatgagcgaaaagaaatgcagttgggcgagctacatgacaaacagccctacgctcatcgttatgatcggactcccagcccgcggcaaaacttatgtgtctaaaaaacttactcgctacctgaattggatcggggtcccgactaaagtctttaacttgggggtgtatcgacgggaggccgtgaagtcttataagtcctatgatttttttaggcatgataatgaggaggccatgaaaattagaaagcagtgtgccctcgtggcgctagaggacgtgaaagcctacctgactgaggagaacgggcagatcgccgtctttgacgctaccaacactaccagagagaggcgggacatgatacttaacttcgcagaacagaactcctttaaagtttttttcgtggagtccgtttgtgacgaccctgatgttatagcagctaatattctggaggtcaaggtgtcatcccccgactatcccgaaaggaacagagagaatgtgatggaggatttcttgaagagaatcgaatgctataaggtaacctacaggccgcttgatcccgataactacgacaaggacctgtcatttatcaaagtgattaatgtggggcaaagattcctggtcaacagagtgcaagactacatccagtcgaaaatagtgtattatctcatgaatatccatgtgcaaccccgtacgatttatctgtgtaggcatggcgaatctgagttcaacctgttgggcaaaattggcggggatagcggactgtcagttagagggaaacagttcgcgcaggccctgaggaaattcctggaagaacaagagattaccgacctgaaggtgtggacaagtcagttaaaacgaacgattcaaaccgcagagagtctgggcgtcccctacgaacagtggaagattctcaatgaaatagacgctggtgtatgtgaagagatgacctacgccgaaattgagaagcgctaccctgaggaatttgcacttcgggatcaggaaaaatatttgtacagatacccgggtggggagtcctatcaggacctagtgcagcgcctggaacctgtgatcatggaactggagcggcaggggaatgtgctcgtcatttcccatcaggccgttatgcggtgcctgcttgcatacttcctggacaaaggagccgacgagttaccgtaccttagatgccctctccataccatttttaaactcactcccgttgcctacggatgcaaggtggaaacaataaagttaaacgttgaggcggtgaatacgcacagggacaagcccactaataattttccaaagaatcaaacccccgtaaggatgaggcgaaatagttttacgcccctgtcttccagcaataccatcagaaggcctaggaactattccgttggcagtcgtcctttgaagcctctctcccctctgagagcgcaggatatgcaggagggggccgattag

SEQ ID NO: 177424 - DNA, 1122 bp, synthetic construct
  misc_feature 1..1122: note = Description of Artificial Sequence: Synthetic coding sequence
  source 1..1122: mol_type = other DNA
atgaagatccggaagcagtgcgccctggtggccctggaggacgtgaaagcctacttaacagaagagaatggtcagattgccgttttcgacgccaccaatacgactcgagaacgtagggacatgatcctcaacttcgccgagcagaacagctttaaggtgttttttgtcgagtctgtctgcgatgacccagacgttattgccgccaatatactggaggtcaaagtgagttcccccgactacccagaaaggaacagagagaacgtaatggaggactttcttaaacgcatcgagtgctataaggtgacctatagaccgctggatccagacaattacgataaagacctgtccttcattaaagtgatcaacgtgggacagaggtttctggtgaaccgagtccaagattatatacagagtaagattgtgtattacctgatgaacatccacgtgcagcctagaaccatatatttatgtaggcacggcgagtccgagttcaatctgctgggcaagatcggaggcgactctggtctatctgtgcgcggaaagcagttcgcacaggccctgagaaagttccttgaggaacaggaaataactgacctgaaggtctggacgagccagctgaagaggactattcagactgctgagtcgcttggcgtgccctacgagcagtggaagatcctgaatgaaattgacgcaggagtgtgcgaggagatgacctacgcggagattgagaagcgttatcccgaagagtttgcccttcgcgaccaagagaaatacctgtacaggtaccctggcggcgagtcctatcaagatcttgttcagcggctggagcccgtcattatggagctggagaggcaagggaacgtgctggttattagccaccaagcagtgatgcggtgcctgttggcatattttcttgacaaaggcgcagacgaactgccctatttgcgctgccctctgcataccatctttaaactcaccccagtggcctatggatgtaaggtggagacaattaagctcaatgtggaggcagtcaacacacatcgtgacaagccaaccgccgctgaaaccacactcgctgtccgaaggcgtcccagcgcagcttccctgatgctgccctgttag

SEQ ID NO: 177425 - DNA, 795 bp, synthetic construct
  misc_feature 1..795: note = Description of Artificial Sequence: Synthetic coding sequence
  source 1..795: mol_type = other DNA
atggaggacttcctgaagcggatcgagtgctacaaggtgacctaccgaccattggatcctgacaattatgacaaggacctgagcttcataaaagtcatcaacgtggggcagcgcttcctggttaaccgcgtgcaggattacattcaaagcaaaatagtctattacctcatgaacattcatgtgcaacctcgaacaatctacctgtgcaggcatggagagtccgagttcaaccttctgggtaaaattgggggtgattctggcctatccgtcagggggaagcagttcgcacaggcattgcgcaagtttctcgaggagcaggagatcacagacctgaaagtgtggacaagccagcttaaacgtactatccaaactgccgagagcctgggtgtcccttacgaacaatggaagatcctcaatgaaatagacgctggcgtgtgcgaggagatgacttatgccgagattgagaaaagatacccagaggagtttgcacttagggaccaggaaaaatacctctatagatatcctggtggcgagagttatcaggaccttgtgcaaagactggaacctgtaataatggagttggaacgtcagggcaatgtccttgtcattagccaccaagcagttatgagatgtctgctggcgtacttcttagataagggggcgggttgcaaagttgaaaccatcaaactgaacgtagaggccgtgaacactcacagggataagcccacagctgccgagacaacgttagccgtgagacgccgtccaagcgccgcgtctttaatgctgccttgttag

SEQ ID NO: 177426 - DNA, 1419 bp, synthetic construct
  misc_feature 1..1419: note = Description of Artificial Sequence: Synthetic coding sequence
  source 1..1419: mol_type = other DNA
atgaccaacagccccaccctgatcgtgatgatcggcctgcccgccaggggcaaaacatacgtgagcaaaaaactgaccaggtatctgaactggatcggcgttccaaccaaggtgttcaacctcggcgtataccgcagggaggccgtcaagagctacaaatcttacgactttttcagacatgataacgaggaggcaatgaaaatccgaaagcagtgcgccctggtagccctagaagatgtaaaagcatatttgactgaggaaaatggccaaatcgcagtttttgatgccactaacacaacacgcgagcggcgtgatatgatcctgaattttgccgaacaaaactcttttaaggttttctttgtggagtcggtatgtgatgacccggacgttatcgcagctaatatcttggaggtgaaggtctccagtcctgactaccccgaaaggaatcgagagaatgttatggaagatttcttaaagcgaattgaatgctacaaagttacataccgacccttggaccccgacaactacgataaggatcttagcttcatcaaggtcatcaacgtgggccaacggttcttggttaaccgggtgcaggattatatccagagtaagatcgtttattacctgatgaatatccacgtccagccacgcacaatttacctatgcagacacggtgagtcagaattcaatcttctgggaaagatcggaggcgatagtggcctgagtgtcaggggtaaacagtttgcccaggcgctgagaaaattcctcgaggaacaggagataacagacctcaaggtctggacttcacaactcaagcggactatccagaccgccgagtctttgggagttccatatgagcagtggaagatactcaacgagatcgatgccggcgtctgtgaggaaatgacctacgctgaaattgagaaacgatatccagaggagtttgcactgcgcgatcaggagaaatacctatacagatatccaggcggagagagctatcaagacctggtacagcggctggaacctgtaatcatggagctggagcggcagggcaatgtgttagtcattagtcaccaggccgtcatgagatgtctgctggcctattttctggacaagggtgccgatgaactgccatacttgcggtgccccctgcataccatcttcaaactcacacccgtggcctatggctgcaaggtagagacaatcaaactgaacgttgaagcagtgaatacgcacagagacaagccgactaacaattttcccaagaaccaaacgcccgttcggatgaggaggaattcgtttactcctctgtcttcctcaaatacgataagaagaccgcgcaactattcagtgggatcccgtcctctgaagccactgagccctctgcgggctcaggacatgcaggagggagccgactag

SEQ ID NO: 177427 - DNA, 1542 bp, synthetic construct
  misc_feature 1..1542: note = Description of Artificial Sequence: Synthetic coding sequence
  source 1..1542: mol_type = other DNA
atgcccctggagctgacccagagccgggtgcagaagatctgggtgccggtggaccatcgtcccagtcttcctcgtagctgcggccctaaacttaccaattcacctacggtgatcgtgatggtgggcttgcctgcaagaggtaagacctatattagcaagaaacttacgaggtacctgaattggatcggtgtgcccactaaggtgtttaatgtgggggaataccggagagaagccgttaaacagtactccagttataattttttcaggccagataatgaggaggcaatgaaggtgcgcaagcagtgcgctctagcagctttacgcgacgtgaaatcatatctggcaaaagaagggggccagatcgccgtcttcgacgctacgaacaccacccgggaacggcgccatatgattctccatttcgctaaagagaatgactttaaggcattcttcatcgaaagcgtgtgtgatgaccctacagtggtggcatccaacataatggaggtgaaaatttcttcgccggactataaagattgtaacagcgctgaagctatggacgatttcatgaagcgcatcagctgctatgaggcctcgtaccaacctcttgatcccgataagtgcgatcgtgacctctctttgattaaagtgatcgacgttgggcgcaggtttctcgtaaaccgcgtacaagatcatatccagagccggattgtttattatctcatgaacattcatgtgcagccaagaacgatctatctgtgtcgccatggggaaaacgagcacaacctgcagggccggattggcggcgacagtggactctcatccagggggaagaagttcgccagcgccctatctaagtttgtggaagagcagaaccttaaggacctaagggtttggacttctcagctcaaaagcacaattcaaaccgctgaagccttgcggctgccatacgagcagtggaaagccctgaacgagatcgatgctggtgtttgtgaggaacttacctacgaggagatccgtgatacttaccccgaggagtatgcactccgagagcaggacaagtactattaccgctatcctacgggcgaatcctatcaggatctagtccagagactggagcccgtgatcatggaactagagcgtcaggagaatgtgctggtcatttgtcaccaggctgtgctgcggtgcctactggcctacttcctcgacaaaagcgccgaggagatgccctatcttaagtgcccgctgcacacagtccttaagctcacgcccgtggcatatggatgccgcgttgaatctatctatctgaacgttgagtctgtgtgcacgcaccgcgagcgctctgaagatgctaagaaggggcctaatccactcatgcggcgcaatagcgtgacacccctggcatcacccgagcctacaaaaaaaccacgcatcaactctttcgaagaacacgtcgcgtcaacaagtgccgccttgccctcctgtctgcctcccgaggtcccaacacagttgccaggccaaccactgctcggacaggcttgtctgtag

SEQ ID NO: 177428 - DNA, 1545 bp, synthetic construct
  misc_feature 1..1545: note = Description of Artificial Sequence: Synthetic coding sequence
  source 1..1545: mol_type = other DNA
atgcccctggagctgacccagagccgggtgcagaagatctgggtgccagtcgatcatagacctagtttgcccaggtcttgtgggcctaaattgaccaacagccccactgtcattgtgatggtgggccttccagcacggggtaagacctacatcagtaagaaactcactaggtatcttaactggattggtgtccctaccaaggtgtttaatgtgggagagtaccgcagagaggcggtcaagcaatactcttcttataacttcttcagacctgacaacgaagaagcgatgaaagtgaggaagcagtgcgcgttagccgcactaagggatgtgaaaagctatctggccaaggagggtggccagatcgctgtcttcgacgcgaccaatacaacaagagagagacggcacatgatcctgcacttcgccaaagaaaacgattttaaggcttttttcattgagagcgtgtgtgacgacccaacagttgtcgcaagcaacatcatggaagtgaaaatcagctcacccgactacaaggattgcaactcggctgaggcaatggacgactttatgaagaggatcagctgttatgaagcatcctatcagcctttggatcccgacaagtgtgaccgggatttgagcttgatcaaagttatcgacgtgggacgaagatttctcgtgaatagggtgcaggatcatattcagtcacggatagtttactatctcatgaacattcacgtgcaaccacggaccatctacctctgtagacacggcgaaaatgagcacaatctgcaaggtagaattgggggagacagtggactgagttcacgcggaaagaaattcgccagcgctctgtcaaagttcgtggaggagcagaacttaaaggatctgcgcgtgtggacctctcagctgaagagcaccatacagacggcggaggcgcttcggctgccatatgagcaatggaaggcattgaacgaaattgatgctggggtctgtgaggaacttacctatgaggaaattagagatacatacccagaggaatacgccttacgggagcaggacaagtattactacaggtatcctacgggtgagtcctatcaggatctggtgcaaagactggaacccgtgattatggagctagaacgccaggagaatgtactggtaatctgtcatcaggcagttctgcgatgtctgctggcatacttcctcgataaatctgcggaggagatgccctatttgaaatgccccctgcacacggtactgaaactcacccccgtagcgtacggttgtagagtggagtctatatacctaaacgtcgagagcgtctgcacacaccgagaacggagtgaagacgctaaaaagggcccaaaccctctgatgcggcggaactcagttactcccctagccagcccggaacctaccaagaagccacggatcaatagttttgaggaacatgtagcttcaaccagcgccgctctacccagttgtcttccccctgaggtgccaacacagcttcccggtcagcctctccttggtcaagcatgcttgacttag

SEQ ID NO: 177429 - DNA, 1545 bp, synthetic construct
  misc_feature 1..1545: note = Description of Artificial Sequence: Synthetic coding sequence
  source 1..1545: mol_type = other DNA
atgcccctggagctgacccagagccgggtgcagaagatctgggtgcccgtggatcacaggcccagcctgccccgaagctgcggtcccaaattgacgaactccccaacagtgatcgtcatggtgggcctgcccgcccgggggaaaacctacatatcgaagaagctgaccaggtacctcaactggatcggagttcccaccaaggtattcaatgtcggcgagtatcggcgtgaggcagttaagcagtactcatcttacaatttttttcggccagacaatgaagaggctatgaaggttaggaagcagtgtgctcttgctgctcttagagacgtgaaaagctatttggctaaggagggagggcagatcgctgtgttcgacgccactaacacaactcgagagcgtcgccatatgatcctgcatttcgctaaagagaacgacttcaaggccttctttatcgagagcgtctgtgatgacccaacggttgtagcatctaacatcatggaagtgaaaatcagcagtccagattacaaggactgcaattcagcagaggcaatggatgatttcatgaaaaggatctcttgttatgaggcgtcctaccagccactagaccctgacaagtgcgatcgagatctgagtcttatcaaagttattgacgtggggcgcagattcctggttaatagggtccaggaccacattcaatctagaatcgtgtactatctgatgaatatccacgtgcaaccccgcaccatctatctgtgtcgacatggcgaaaacgagcataacctgcagggcagaattgggggtgacagcggcctatcaagtcgcggaaagaaatttgccagcgccctgagcaaatttgtcgaagaacagaaccttaaagaccttcgtgtgtggactagccagctcaagagcacaatccaaacagcagaggcattgagactgccatatgagcagtggaaggcactgaatgagatcgatgcgggggtgtgtgaggagcttacttatgaagaaatccgagatacctaccctgaggaatatgccctccgcgagcaggataagtactactatagataccctactggtgagtcttatcaggatcttgtgcagcgtctggagcctgtgatcatggagctggagcgccaggaaaatgtcttggtgatttgccaccaagcggtgctgaggtgtcttctggcctactttctggataaatccgcggaagagatgccatatctaaagtgtcctctccacaccgtgttgaagttaacgccagtcgcttacggctgtcgggtggagtctatatatctgaacgtcgagtccgtttgcacgcacagggagcggagcgaggatgccaaaaagggccctaaccctttgatgagaagaaacagcgttacaccactcgcctcacccgaaccaacaaaaaagccccgtattaactccttcgaggagcatgtagcatcaacatccgcagcactccccagttgcttgccccccgaggttccaactcagttgccaggacagccactgcttggacaggcctgtctgacatag

SEQ ID NO: 177430 - DNA, 1563 bp, synthetic construct
  misc_feature 1..1563: note = Description of Artificial Sequence: Synthetic coding sequence
  source 1..1563: mol_type = other DNA
atgcccctggagctgacccagagccgggtgcagaagatctgggtgcctgtggatcaccgcccttctctgccaaggagctgcgggcccaagctgaccaacagccctacggtgatcgtgatggtaggactgcctgctagaggaaaaacatatattagcaagaaactgaccagatatttgaattggataggggtgcccactaaagtgttcaacgtgggggaatatcgacgcgaagcagtgaagcagtatagctcttataacttctttcgaccagacaatgaagaagcaatgaaggtgaggaaacaatgtgccctcgctgctctgcgtgatgtgaagtcatacctggccaaggaaggaggccagatcgccgtgttcgacgcaacaaatactacccgagagcgaagacatatgattctgcattttgctaaggagaacgacttcaaggcctttttcattgaatccgtgtgcgacgaccccactgtggtcgcaagtaatatcatggaagttaagatcagttcacccgactacaaagactgtaactctgcagaggcgatggatgactttatgaagcgaatcagttgctacgaggctagttaccagccactggaccccgataagtgtgatcgagatctcagccttatcaaggtcattgatgtgggtcggcgattccttgtgaacagagttcaggatcacattcagtcccgcatcgtgtactacctcatgaatatacacgtgcagccaagaacaatctatctctgccggcatggagaaaacgaacataacttgcagggtcgcatcggaggggacagcggactgtccagcagagggaagaagttcgctagcgcactgagcaagttcgtggaggagcagaatctgaaagatttgcgggtgtggacctcccagctgaagagtaccatccagacagccgaggcactcagactgccatacgaacagtggaaggctctgaacgagatagacgccggggtgtgcgaggagctgacatacgaggaaattagagacacctatcccgaagagtacgcactgcgcgaacaagataaatactactatcggtaccccactggagagtcctaccaggatctggttcagcggttggaaccagttatcatggagctggagcgccaagagaatgtcctcgtgatttgtcatcaggcggtcctcagatgcctgctggcgtatttcctagacaagagcgccgaggaaatgccatacctgaaatgtccactgcacacagtgctgaagcttacgcctgttgcttacggatgcagagttgagtctatctacttaaacgttgagagcgtgtgtacgcatagagagcgaagtgaggacgcaaagaagggtccaaacccattaatgcgacgaaactccgtgacaccccttgcctctccagaaccaacaaaaaaacccaggattaatagttttgaagaacatgtagctagcaccagcgccgccctacctagttgtctacccccagaagttcctactcagcttccaggacaaaacatgaaaggcagtaggtccagcgccgatagcagccggaagcactag

SEQ ID NO: 177431 - DNA, 354 bp, synthetic construct
  misc_feature 1..354: note = Description of Artificial Sequence: Synthetic coding sequence
  source 1..354: mol_type = other DNA
atgccctacctgaagtgccccctgcacaccgtgctgaagctgacccctgtagcttacggctgcagagtggaaagcatttacctcaacgttgaatctgtttgtactcaccgtgaaagaagcgaagatgctaagaaagggcccaatcccctgatgcgcagaaatagtgtgacgcctctagctagccctgaaccaactaaaaaaccacgcatcaattccttcgaggaacatgtggcgtccacgagcgctgccctcccaagttgcctcccacccgaggtgcctacacagctgcccggccaaccactgctaggacaggcatgcttgaattggaagggggttatgcgcaatgccgcatag

SEQ ID NO: 177432 - DNA, 1581 bp, synthetic construct
  misc_feature 1..1581: note = Description of Artificial Sequence: Synthetic coding sequence
  source 1..1581: mol_type = other DNA
atgcccctggagctgacccagagccgggtgcagaagatctgggtgcccgtcgatcacaggccatcactgccaaggtcttgtggcccaaaattaaccaactctccaaccgtgattgtgatggtgggtctgcctgctagaggaaagacatacatcagcaaaaaacttaccagataccttaactggataggggtgccaacaaaggtcttcaatgtgggcgaatataggcgggaggctgtgaaacaatacagctcttataatttctttcggcccgataacgaggaggccatgaaagtccgcaaacagtgcgccttggcggccctgcgagacgtgaagagctacctggcaaaagagggcggccagatagctgtgttcgatgcgacaaacaccacgcgggagcgccggcatatgattttgcatttcgccaaagaaaatgatttcaaagcattttttatcgagtccgtctgcgatgaccccaccgtcgtggcctccaacattatggaagtgaaaatttctagtcctgactataaggattgcaactcagcggaagccatggatgatttcatgaaaaggatttcttgttacgaggcatcgtatcagccgctcgacccagataagtgcgaccgggatctttcccttattaaggtaatagatgttggccggcggtttctcgtcaacagagtccaggaccatatacaaagtcgaatcgtgtactatctcatgaatatccacgtacagcctagaacgatctatctctgccggcatggagagaacgagcacaacctccagggcaggattggcggcgacagcggcctgtcctcaaggggaaagaaattcgcgtccgctcttagcaagtttgtggaagaacaaaacctcaaagacttgagagtgtggacctctcaattaaagtccaccatccagactgctgaagcactgcgactgccatacgagcaatggaaggccctgaatgagatcgatgccggggtttgcgaggaattgacatacgaggaaatcagggacacttacccggaggaatatgctctaagagaacaggacaagtattattaccgttatcccacaggtgagagttaccaggatctggtccagagacttgagcccgttatcatggaactggaaaggcaggagaatgtgttggttatctgtcatcaggctgtgttaagatgtctgttggcctatttcctcgacaagagtgctgaagagatgccatatctaaagtgccctctacacacagtgcttaaactgacacccgttgcctacggttgccgagtagaatcaatatacctcaatgtcgaaagcgtgtgcacacacagggagagaagtgaggatgctaagaaaggcccgaatccattgatgaggcgaaactctgtgacaccactggccagccccgagccaacgaagaagcccaggatcaactccttcgaagagcacgtcgcatctaccagcgccgccttgccctcttgtcttccccccgaagtcccgacccaactcccagggcaacccttactgggacaggcgtgtttgcgcaccgtttgtcacatttttagtaagttcagcccctactag

SEQ ID NO: 177433 - DNA, 567 bp, synthetic construct
  misc_feature 1..567: note = Description of Artificial Sequence: Synthetic coding sequence
  source 1..567: mol_type = other DNA
atgaacatccacgtgcagccccggaccatctacctgtgccggcacggcgaaaacgaacacaatctgcaagggagaattggcggcgattcgggcctttcttcacgtggcaagaaatttgccagcgctttgtctaaattcgtggaggaacagaacctgaaagacttacgtgtctggacttcacagcttaagtcaaccatccagactgcagaggcactccggttgccatacgaacaatggaaggctctgaatgagatcgacgcaagctatcaggatctggtgcaacggttggagccagtgatcatggaactggagaggcaggaaaacgtgctggttatttgccatcaggcagtgttaagatgcttactcgcgtattttctggacaagagcgccgaagagatgccatacctgaagtgtccgctgcataccgtgctgaaactgactcctgtggcatacggatgccgggtggagtctatatacctgaacgtggagtctgtgtgcacccaccgcgaaagatctgagaacatgaaggggagcaggtccagcgccgatagttctcgcaagcactag

SEQ ID NO: 177434 - DNA, 1581 bp, synthetic construct
  misc_feature 1..1581: note = Description of Artificial Sequence: Synthetic coding sequence
  source 1..1581: mol_type = other DNA
atgcccctggagctgacccagagccgggtgcagaagatctgggtgcctgtcgatcacagaccatccttaccacgctcgtgcgggccgaagctgactaattcccctaccgtcattgtgatggtcggcctgccggcaaggggaaagacatatatttcaaaaaagctgacgcgttacctgaactggattggcgtgccaacaaaagttttcaatgttggtgagtatcgaagagaggccgttaaacagtatagttcatataattttttcagaccagataatgaggaggctatgaaagtgcgcaaacagtgcgcacttgccgcgctgagggatgtgaagtcttatcttgccaaggaaggtggacaaattgccgtgttcgatgcgaccaacacaacacgtgagagaagacatatgattctccatttcgccaaagaaaatgatttcaaggcattttttattgaatcagtctgcgacgatcctactgtcgtagcaagtaacataatggaggtaaaaataagctcccctgactataaggactgtaacagtgctgaagcaatggacgatttcatgaagaggatttcttgctacgaagccagttatcagcccttagaccccgacaaatgcgatagagacctctctctcattaaggtgatagatgtcggacgccgcttcttagtcaaccgcgtgcaggaccacattcagagtagaatcgtgtactacctcatgaatatccacgtgcagccacggacaatctacctttgcaggcatggcgaaaatgagcataatcttcaggggaggataggaggtgacagtggactgagctcgagaggtaagaaatttgcatccgccctttccaagtttgttgaagaacagaatcttaaggaccttagggtgtggacctcacagctgaagtctaccatacagactgccgaagctctgcgcctgccctacgagcagtggaaagcccttaatgaaatcgacgccggagtatgtgaagaattgacttatgaagaaatacgtgatacttatcctgaggaatatgctctccgcgagcaggacaaatactactatcgttaccccaccggcgaaagctatcaggatctggtgcaaaggttggagccagtaattatggagctagaacggcaggagaacgtgctggtgatctgccaccaggctgtgcttcgttgtctcctggcctactttctagataaatctgctgaggagatgccatacctgaagtgccccctgcataccgtgcttaagctgacccctgttgcatacggatgtcgggtcgagtcgatctacctaaatgtggagtccgtgtgtacgcaccgcgaacggtccgaggacgctaagaaaggcccaaatccattaatgcgccgcaattctgttacgccgttagcttctccggaacccacaaagaagcctcgcattaatagcttcgaagaacacgtggcttcaacctctgcagcattgccctcctgcttgccacctgaggtgcccacacaactgcctgggcagcctctgctcggccaagcttgccttcgtacagtttgccatatattctcaaaattctctccatattag

SEQ ID NO: 177435 - DNA, 1503 bp, synthetic construct
  misc_feature 1..1503: note = Description of Artificial Sequence: Synthetic coding sequence
  source 1..1503: mol_type = other DNA
atgcccttccggaaggcctgcggccccaagctgaccaacagccccaccgtgatcgtgatggttggtctcccggcccgagggaagacttatatctcaaagaagctcactcgctaccttaactggatcggtgtgcctaccaaggtgttcaatgttggagagtatagaagagaggccgttaagcaatattccagctacaacttctttcggccggataacgaagaagcgatgaaggtcagaaaacagtgcgccctcgctgccctacgtgacgtaaaatcgtacctggcgaaagagggcgggcagatcgccgtctttgatgctacaaacacgacaagggaacggagacatatgattctgcattttgctaaagagaacgatttcaaggcatttttcatagagtccgtatgcgatgaccccacagtagtggcctccaatattatggaggttaagataagtagtccggactataaggactgtaactcagctgaggcgatggacgatttcatgaagcgcatttcgtgttatgaggcctcttaccagcctctggatcccgacaagtgcgacagggatctatccctaataaaagttattgacgtgggtagaaggttcttggtcaatagagtgcaagaccatatccagagccgaatcgtatactatctgatgaacatccacgtacagcctcgcactatctatctctgtagacacggggaaaatgagcacaatctgcagggacgaatcggaggggattccgggctgtcttccaggggaaagaaattcgctagtgccctgtcaaaattcgtggaagagcaaaaccttaaggacctgcgagtatggacatctcagctgaaatccacaattcagaccgctgaggcactgcggctgccctacgaacagtggaaggctctgaatgagatcgatgccggcgtctgcgaagaactgacatatgaagagattcgcgacacttatccggaagagtacgccttgagagagcaggacaagtactattatcgctaccccacaggggagtcatatcaagacctcgttcagcgcctagaacctgtcatcatggagctggaacgccaggagaacgtgttagtaatatgccatcaagccgtgttgcgatgtctgcttgcctatttcttggacaagtctgccgaggagatgccatacctgaaatgccctcttcacactgtcctgaaacttaccccagtggcgtatggatgccgggttgagagcatctacctgaacgtcgagtcagtgtgtacgcatagggagcgctccgaagatgctaagaaaggccccaaccccctcatgcgccgcaattcagttacacccctggcttcccccgaaccaactaagaagccccgcatcaattcttttgaggaacacgttgcctcaacctccgccgccctcccgtcctgtctgccgccggaagtgcctacccagctgccagggcagaatatgaaaggctccaggtctagtgccgactcttcacgcaaacactag

SEQ ID NO: 177436 - DNA, 279 bp, synthetic construct
  misc_feature 1..279: note = Description of Artificial Sequence: Synthetic coding sequence
  source 1..279: mol_type = other DNA
atctacctgaacgtggagagcgtgtgcacccaccgggagcggagcgaggatgccaaaaagggtcccaatccgctgatgcggaggaactctgtgacgccgttggccagtccagagcctaccaagaagccccggatcaatagcttcgaagagcacgtcgctagcacctcagccgcactgccaagctgcctgccccctgaggtccccacgcagctgcctggccagccgctcctagggcaagcctgtcttaattggaagggtgtgatgcggaatgcagcatag

SEQ ID NO: 177437 - DNA, 96 bp, synthetic construct
  misc_feature 1..96: note = Description of Artificial Sequence: Synthetic coding sequence
  source 1..96: mol_type = other DNA
atctacctgaacgtggagagcgtgtgcacccaccgggagcggagcgagaacatgaagggaagcagatctagtgcagattccagccggaagcactag

SEQ ID NO: 177438 - DNA, 261 bp, synthetic construct
  misc_feature 1..261: note = Description of Artificial Sequence: Synthetic coding sequence
  source 1..261: mol_type = other DNA
atgccctacctgaagtgccccctgcacaccgtgctgaagctgaccccagttgcatacgggtgtagggtcgagtctatctacctgaacgttgaatccgtttgtactcacagagagagatcagagggcttgagcttgttccctcggctcgaatgcggtggggctgtgaccgcccattgcagcctgaacctcttaggctccagcgatcctcccgcaagcgcgtcaagagttgctgaaaccaccggttgcaaggaaggcacctag

SEQ ID NO: 177439 - DNA, 432 bp, synthetic construct
  misc_feature 1..432: note = Description of Artificial Sequence: Synthetic coding sequence
  source 1..432: mol_type = other DNA
tgagtggaggagcagaacctgaaggacctgcgggtgtggaccagccagctgaaaagtactattcagaccgccgaggccttgcgactgccctatgagcagtggaaagcgctcaacgagatcgacgcttcctaccaggacttggtgcaaagactggaacccgtgataatggaactggagcggcaagaaaacgttctggtcatttgccatcaggccgtgctgagatgcttgctagcttacttccttgacaaatccgccgaagagatgccctatctgaaatgccccctgcacactgtgttaaagctcacacccgtcgcatatggctgccgtgtggaatctatctacttgaatgtggagtcagtgtgtactcatcgcgagcggtcggaaaatatgaaggggtcaagaagctctgctgatagttcacggaagcactag

SEQ ID NO: 177440 - DNA, 555 bp, synthetic construct
  misc_feature 1..555: note = Description of Artificial Sequence: Synthetic coding sequence
  source 1..555: mol_type = other DNA
atgcccttccggaaggcctgcggccccaagctgaccaacagccccactgtgatagtcatggtgggactccctgctcgcggaaaaacttacatctcaaaaaaactgacgcgatatctcaactggatcggggtccctactaaagtgtttaatgtaggagaatatcggagggaggctgttaaacagtacagttcttacaatttcttcaggcccgataacgaagaagccatgaaggtgagaaagcagtgtgcacttgccgctctgagagacgtcaagtcttacctagctaaagagggtgggcagatagccgtcttcgacgccaccaacaccaccagggaaaggaggcacatgattctgcatttcgcgaaggaaaatgactttaaggcattctttattgagtccgtatgcgatgatcctaccgtggtcgcctcaaatatcatgcagaaagccttccagagggatttgtctgcaaccccgctatggtgctgcagaaagttgaagtctcctgcacggattaccaaaacagccaccagacagaagccgtggacgaccagctag

SEQ ID NO: 177441 - DNA, 1605 bp, synthetic construct
  misc_feature 1..1605: note = Description of Artificial Sequence: Synthetic coding sequence
  source 1..1605: mol_type = other DNA
atgggcgagggcggccagaaggagggcgacagccagcaggccggcgctctcccactgttgtgccaactagataccttcagcccaaaagccacagtgttcggcgtatccatcaatcctgcctgtgggcccaagttgaccaactcccccacggtgatcgtaatggtggggctccctgcgaggggaaaaacgtacatctctaaaaaactcacgagatacctcaactggatcggcgttcctacaaaagttttcaatgtaggagagtatcgccgggaggccgtgaagcagtatagtagttataactttttccgcccggacaacgaggaggcaatgaaagtgagaaagcagtgtgcccttgcagccttgcgcgatgtcaagtcttacctcgctaaagaaggaggacagattgccgtattcgacgcaaccaacacaactcgggaacgcagacacatgattctgcactttgcaaaggaaaacgattttaaggccttcttcatcgaatctgtttgcgacgatcctacagtcgtcgcctctaacataatggaagtgaaaattagttcccctgattacaaggactgtaactctgctgaagcaatggatgactttatgaaaaggatcagctgctatgaagcgtcctaccagcccctcgatcccgataagtgtgacagggacctgtccttgattaaggtgattgacgtcggtagaaggtttctcgtcaaccgcgtccaggatcatatccaatctcgaatcgtatactacctcatgaacattcatgtgcagcctagaaccatttacctgtgtagacatggagagaatgagcacaatctgcagggccggattggaggcgattccggactgagctccaggggaaaaaaatttgccagcgcactgagcaagttcgtggaagaacaaaacttgaaggaccttcgggtttggaccagccagcttaaatccactatccaaacagccgaggcactccgcttgccatatgaacagtggaaggccctgaacgaaattgatgccggggtttgcgaggagcttacatacgaggagattagggatacctacccagaggaatacgcattgcgcgagcaggataaatactactaccggtaccctaccggggagtcctaccaggacctcgttcagcgtcttgagccagttatcatggaacttgaacgccaagagaacgtgctggtaatttgccaccaggccgtgcttcggtgtctgctcgcttatttcctcgataagtcggccgaagaaatgccctacctgaaatgcccacttcataccgtccttaaattaactccggtcgcttatggttgtcgggtggaaagtatctatctcaatgtcgaatccgtctgtactcatagggagcgtagcgaagatgccaagaaaggcccgaatcctctgatgcggcggaactccgtgactccactggcctcaccggagcccactaaaaagcccaggatcaactcttttgaagaacacgtcgctagcacctcggccgcgcttccaagttgtctgcctcccgaagtgcccacccaattgcctggccaaaacatgaaggggagccggtcctctgcagatagttcacggaagcattag

SEQ ID NO: 177442 - DNA, 594 bp, synthetic construct
  misc_feature 1..594: note = Description of Artificial Sequence: Synthetic coding sequence
  source 1..594: mol_type = other DNA
atggacccccccgccggcttcgtgcgggccggcaaccccgccgtggccgcacctcagtcacctcttagtcccgagggcgcacatttccgggcagcacatcacccccgttccactggatctcgctgtcctgggtccctccagccctcccggccattagtagcaaattggttgcagtcactccccgaaatgcctgtcgactttacaggctattggaaaatgttggtgaatgaaaatttcgaggagtacttgcgggctcttgacgtgaatgttgccctgcgcaagattgcgaatctgctgaaaccggataaagagatcgtgcaggatggggaccacatgatcatcaggacactgtcgacattccgtaactacatcatggactttcaagtggggaaagagtttgaggaggacctgacggggatagacgacaggaagtgtatgactacagttagctgggatggcgacaaactacagtgcgtgcaaaaaggggagaaggagggacgcggctggacgcagtggatagaaggagatgaattgcatttggagatgagagtggaaggtgtcgtgtgcaaacaggtgttcaagaaggtgcagtag

SEQ ID NO: 177443 - DNA, 528 bp, synthetic construct
  misc_feature 1..528: note = Description of Artificial Sequence: Synthetic coding sequence
  source 1..528: mol_type = other DNA
atgaccaactgccccaccctgatcgtgatggtgggcctgcccgcccgggggaagacatacatatctaagaagctgactagatatctgaactggattggagtgcctaccagagaattcaatgtcgggcaataccgccgcgatgtggtcaaaacatataagagttttgagttttttctgcctgataacgaggaaggactgaaaattaggaagcagtgtgcactggcagcgttaagggacgttagacgtttcttgtcagaggagggaggacacgttgccgtgttcgatgccacaaacaccacgagagaacggcgggccactattttcaatttcggggaacaaaatggctataagacctttttcgtggaatctatatgcgttgaccccgaagtgattgcggcaaacatcgtgcaggttaaactcggctctccggattacgtgaaccgcgactcagacgaagccaccgaggactttatgagaagaattgagtgttacgaaaatagttacgagtcacttgatgaggatttgtag

SEQ ID NO: 177444 - DNA, 1377 bp, synthetic construct
  misc_feature 1..1377: note = Description of Artificial Sequence: Synthetic coding sequence
  source 1..1377: mol_type = other DNA
atggaccggggcagcctgggcggcagcagcctgaccgacctgggccctggaagctcaaggcgagtgtgcatgactaattgcccaacactgattgttatggtgggtctgccagctcggggaaagacatatatcagcaagaagttgaccagatacctcaactggattggggtccccaccagggagtttaatgtcggccaatatcgacgtgacgtggtgaagacctacaaatcattcgagtttttcttacctgacaacgaggaaggactaaaaatcagaaaacagtgcgccctggccgctctgcgggatgtgcgtaggtttcttagcgaagagggggggcacgtagccgttttcgatgctaccaacactacacgggagagacgggccaccattttcaactttggggagcagaatggctacaagacgtttttcgtcgagtctatctgtgtggacccagaggtaatcgcagcaaacatcgtgcaagtgaaattgggatcacctgattatgtaaatcgggactccgacgaggcaactgaagactttatgcggaggatagagtgttacgagaatagctacgaatccttagacgaagatttggaccgagatctgtcatacatcaaaattatggacgtgggccaaagctatgtcgtcaacagggtggctgaccatatccagtcacgaatcgtgtattacctaatgaatattcacgttaccccgcgttctatatatctgtgccggcatggtgagagcgaacttaacttgaaaggccgaatcgggggcgatccaggcctgagcccacggggaagagagttcgccaagtctctggcccagtttattagtgatcagaacattaaagacttgaaggtctggacctctcagatgaaacgtaccatacaaactgccgaagccctgggcgtgccctatgagcaatggaaagtcctcaatgagattgacgctggagtctgcgaggaaatgacatacgaagagatacaggataactatccgttggagtttgctctgagagaccaagacaagtacagataccgctacccaaaaggtgagtcatacgaggacctcgttcaacgccttgagccagtgattatggagctggagcgccaggagaatgtcctggtcatctgccatcaggcggtcatgcgctgtttgcttgcctattttcttgataaagcggccgagcagctgccctacctcaaatgcccgttacacacagtgctcaagctcaccccagtggcctatgggtgtaaggtggaaagcatattcttaaatgtggcagctgtgaatacgcaccgagaccggccacagaacgtcgatattagtaggcctcctgaagaagcccttgttaccgtgccagcacaccaatag

SEQ ID NO: 177445 - DNA, 1308 bp, synthetic construct
  misc_feature 1..1308: note = Description of Artificial Sequence: Synthetic coding sequence
  source 1..1308: mol_type = other DNA
atgaccaactgccccaccctgatcgtgatggtgggcctgcccgcccgcggaaagacctacattagcaaaaaacttaccaggtatttgaactggattggcgttcccacccgcgaatttaacgtgggacagtaccgaagagacgtcgtgaaaacatataagagctttgagttttttctccctgataatgaagaggggcttaagatcagaaaacagtgtgcactcgccgcactcagggacgtgaggaggttcctgagcgaggaagggggccatgtcgctgtgttcgacgccacgaatactaccagagagaggagagccaccatttttaacttcggcgagcagaatggctataaaacattcttcgtggagtcaatctgcgtggatccagaggtgattgctgccaatatcgttcaggtgaaactcggcagccccgattacgtgaatcgcgatagcgacgaagccacggaggatttcatgcgcagaatcgaatgctacgaaaacagctacgagtcgcttgacgaggacctggacagggatctctcttacatcaagatcatggatgtgggccaaagttacgtcgtgaaccgcgtcgcagatcatattcagtcacgtattgtgtactacctgatgaacatccacgtgacgcccagatccatttatctctgtaggcacggtgaaagtgaactaaacctgaaaggaagaatcggaggggaccccggcctatcacccagaggtcgagaatttgctaagtcactggctcagtttatctccgaccagaacataaaagatctgaaggtgtggacgtctcaaatgaagcgaaccatccaaacagcggaggctctgggggtgccttatgaacagtggaaagtgctaaacgaaattgacgccggagtctgtgaagagatgacctacgaagaaattcaggacaattacccacttgagttcgccctccgcgatcaagataagtatagatatcgataccccaagggagaatcatatgaagaccttgttcaacgtctcgagccagtgataatggaattagagagacaggagaacgttctcgtaatttgtcatcaggctgttatgcgctgcttactcgcttactttctcgataaagcagccgagcagctaccataccttaagtgccctctccacacagtactgaaactgacacccgtggcctatgggtgtaaagtggagagtatcttcctcaatgtggcagcagttaacacccaccgagatcgacctcaaaacgttgatatctcaagacctccggaagaggcattggtcaccgtgccagcacatcagtag

SEQ ID NO: 177446 - DNA, 429 bp, synthetic construct
  misc_feature 1..429: note = Description of Artificial Sequence: Synthetic coding sequence
  source 1..429: mol_type = other DNA
atggccagcccccgggagctgacccagaaccccctgaagaagatctggatgccttactcaaatggacggccggctctgcacgcatgtcaaagaggggtgtgtatgactaattgcccgactttgattgttatggttgggctgccagcccggggcaagacctacatatccaagaagctgactcgttacctaaattggataggggttccgacccgggagttcaacgttggccagtatagaagggatgttgtgaagacgtataagagttttgaattcttcctcccggataatgaggaggggctgaaaattaggaaattcttgatgccccagaccccgcctgagaatggcgagagacctagccttattctcgagaatagaatggctacaaggccattccttagctcccccagtgtatggatactcagaagctag

SEQ ID NO: 177447 - DNA, 777 bp, synthetic construct
  misc_feature 1..777: note = Description of Artificial Sequence: Synthetic coding sequence
  source 1..777: mol_type = other DNA
atggccgcccccgcccccggcctgatcagcgtgttcagcagcagccaggagctgggtgccgcattggcgcagctcgtcgcccagagagctgcgtgctgtttagccggggcacgcgcccgtttcgccctaggtttatccggcggatctctggtctccatgctggcgcgagaactgcctgcagccgtagccccagcaggaccagcatcccttgcgaggtggaccctaggtttttgcgacgaacgcttagtgccattcgaccacgcagagagcacatacggactgtatcgcacgcaccttctctcccggctgcccattcctgaatcgcaagtaattacaatcaaccctgaattgcccgtagaggaggcagctgaggattatgccaaaaagcttcgccaggctttccagggtgacagtatacccgtgttcgatctgcttattctcggtgtgggtcccgatggacatacatgttccttattccctgaccaccccttgctacaggagagagaaaaaatcgttgctccgatcagtgattcccccaagccacctccacagagagtcaccttgacgttgccagttcttaatgctgctcggaccgtgatctttgtcgctactggagaagggaaagctgctgtgctgaagagaatcctggaagaccaggaagaaaaccctctgccagcggcattagtgcagccacacacaggaaagttgtgttggtttctggacgaggccgccgcgcggctcttgaccgtgccattcgagaaacacagcaccctgtag

SEQ ID NO: 177448 - DNA, 1428 bp, synthetic construct
  misc_feature 1..1428: note = Description of Artificial Sequence: Synthetic coding sequence
  source 1..1428: mol_type = other DNA
atggccgccaagagccagcccaacatccccaaggccaagagcctggacggggtgactaacgaccggactgcgtcgcaggggcagtggggccgcgcttgggaggttgactggttctcgctggcttcagtgatcttcctgctgctcttcgcacccttcatcgtttattacttcatcatggcatgcgatcagtatagttgtgctctgaccggaccagtcgtagatatagtgacgggccatgcaaggctgtcagacatctgggccaaaacaccacccataaccagaaaagcagctcagctctatactctgtgggtgacctttcaggtcctcttgtacacctccctaccagacttttgtcacaaattcttgcccggatacgttgggggtatacaagagggagccgtcacaccggccggagttgtgaacaaataccagatcaacggacttcaggcctggcttctcacacacctcttgtggtttgcaaatgctcatttactgtcttggttttcccctaccatcatctttgacaactggatccccttactgtggtgcgccaacatcctgggctatgccgtcagtacgttcgccatggttaagggctattttttccctacttccgctcgcgactgcaagttcaccgggaacttcttctacaattacatgatggggattgagttcaatcctcggatagggaaatggtttgacttcaaattattcttcaacgggaggcccggcattgtggcctggactttaatcaatctctcttttgcagcgaaacaacgcgagcttcactcccatgtgactaacgctatggtattggtgaacgttcttcaagccatctacgtgatcgattttttttggaatgaaacgtggtatttgaaaacaattgacatatgtcatgatcactttgggtggtacctcgggtggggcgactgcgtgtggctcccatacctatatactctgcagggactgtacctggtttatcaccccgtccagctgtcaacccctcacgctgttggagtgcttctgctgggtctggtgggatattatatttttagggttgccaatcaccagaaggacttattcaggcggactgacggcagatgcctgatttggggcaggaagcctaaagtgatcgaatgttcttatacctcggctgacggacagaggcatcacagcaaactcctggtgagcggtttttggggcgttgctagacacttcaactacgtgggagacctgatgggttcccttgcctattgtctggcatgcggtggggggcatttactgccctatttttacatcatttatatggccatcctcctgacgcacaggtgccttcgagacgaacaccgctgtgccagcaaatatggccgtgactgggagaggtacacagcggctgtaccttaccgtcttttgcccggtatattttag

SEQ ID NO: 177449 - DNA, 1428 bp, synthetic construct
  misc_feature 1..1428: note = Description of Artificial Sequence: Synthetic coding sequence
  source 1..1428: mol_type = other DNA
atggccgccaagagccagcccaacatccccaaggccaagagcctggacggtgtcacgaacgaccggaccgcgagccagggacaatgggggcgggcttgggaggtcgattggttctctcttgcctctgtgatcttcctgctgctgtttgccccctttatcgtctattacttcatcatggcctgcgatcaatattcctgtgccttgaccggaccagtcgtggacatcgtgaccggtcatgcccgcctaagcgacatctgggcgaagacaccaccaataactaggaaggccgctcagttatacactctctgggtgacctttcaggtcctcttgtacacctccttacccgacttctgtcataaattcttgccaggctatgtcggaggcatccaggaaggggcagtgacacccgcaggcgtggtgaataagtaccaaatcaatgggttgcaagcttggctgcttacgcacctgctgtggtttgctaacgctcacctcctgtcttggttctcccccacaattattttcgataactggatccccctgctctggtgcgctaacatcctaggatatgccgtatcgactttcgccatggtgaagggctacttcttcccaacgtcagctcgggactgtaaattcacaggcaatttcttctataactacatgatgggcattgagttcaacccacgcatcgggaagtggttcgactttaagcttttctttaatgggcggcccgggatcgtggcatggactttgataaatctgagctttgctgccaagcaaagagagcttcacagtcatgtcacaaatgccatggtcctcgtgaacgtgcttcaagccatctacgtgatcgacttcttttggaatgagacctggtacttgaagaccatagatatatgccatgatcacttcgggtggtacctcggttggggcgattgtgtgtggttaccttacctatatacgctccagggcctgtatctggtgtatcaccctgtccagctttccacccctcatgctgttggcgtgctgctcctcggtcttgttggttactacatatttcgcgtcgcaaaccatcagaaggaccttttcaggcggacggatggacgctgccttatatggggacgaaagcctaaggtgattgaatgtagttacactagtgccgacgggcagcgccatcatagtaaacttctcgtgagcggtttctggggagttgcaaggcatttcaattacgtgggcgatctgatgggaagccttgcttattgcctggcctgtggggggggccatttgcttccatacttttacatcatttacatggcgattctgctcactcatcgctgtttaagagacgagcaccggtgtgcctccaagtacggccgggattgggaacgatatactgcagctgtcccctaccggcttctgcccggaatcttctag

SEQ ID NO: 177450 - DNA, 327 bp, synthetic construct
  misc_feature 1..327: note = Description of Artificial Sequence: Synthetic coding sequence
  source 1..327: mol_type = other DNA
atggccgccaagagccagcccaacatccccaaggccaagagcctggatggagtgaccaacgatagaactgccagccaaggccaatgggggcgggcatgggaggtggactggttctctctggcttctgtcatcttcctgttgcttttcgcccccttcatcgtctactacttcataatggcttgcgaccagtattcttgcgccttgactggaccagtggttgacatcgtgacaggacacgcacgcctgagcgacatctgggccaaaaccccaccgataacacgcaaagcagctcagctatacacactatgggtgaccttccaggtttag

SEQ ID NO: 177451 - DNA, 495 bp, synthetic construct
  misc_feature 1..495: note = Description of Artificial Sequence: Synthetic coding sequence
  source 1..495: mol_type = other DNA
atggccgccaagagccagcccaacatccccaaggccaagagcctggacggagtgacgaatgatcggaccgccagccaagggcagtggggcagggcctgggaggtcgattggttcagtcttgccagtgtaatatttctgctcttattcgccccatttatagtgtactattttatcatggcatgcgatcagtattcctgcgcattgactggcccagttgtggatatcgtgacgggacacgccagactgtccgatatatgggctaaaaccccacccatcacccgaaaggccgcccaactctacaccttgtgggtgacttttcaggtcctgttgtacacttccctccccgacttctgtcataaatttcttccaggctatgtaggcgggatacaagaaggcgcagtcacaccagccggcgtcgtgaacaagtaccagatcaatggcctgcaggcctggttgctgacccatctgctttggttcgctaacgcccacctttag

SEQ ID NO: 177452 - DNA, 276 bp, synthetic construct
  misc_feature 1..276: note = Description of Artificial Sequence: Synthetic coding sequence
  source 1..276: mol_type = other DNA
atggccgccaagagccagcccaacatccccaaggccaagagcctggatggagtgaccaatgacagaaccgcctcccaaggccaatgggggcgtgcgtgggaggttgattggttcagtctggcttccgtgatctttcttcttctcttcgcccccttcatagtgtattacttcattatggcctgcgatcaatactcatgtgcactgaccggacctgtagtggacatcgtgaccgggcacgctagactctccgatatttgggcaaaaacacccccctag

SEQ ID NO: 177453 - DNA, 318 bp, synthetic construct
  misc_feature 1..318: note = Description of Artificial Sequence: Synthetic coding sequence
  source 1..318: mol_type = other DNA
atggccgccaagagccagcccaacatccccaaggccaagagcctggacggcgtaaccaatgatcgcacagcgagccagggccaatgggggagagcttgggaagtcgactggttttccctagcctcagttatctttcttttgctgtttgccccatttatcgtctactactttattatggcctgcgaccaatactcgtgtgcgctgaccggcccagtcgtcgacattgtgaccggacatgcccggctgagcgatatctgggcaaagacccctccaatcacaaggaaagccgctcagctgtacaccctgtgggttacgtag

SEQ ID NO: 177454 - DNA, 846 bp, synthetic construct
  misc_feature 1..846: note = Description of Artificial Sequence: Synthetic coding sequence
  source 1..846: mol_type = other DNA
atggacagctacagcacctacctggccaccgtgaaggtgagcggctcctggctggaagagcaggacgaagacatttacgaggtcgaatccagagtcccacttccccaccccttccctctgtgcgaacaccttgacgaaaataacagcgtgatcgtcaacacctcaatcttccacttcattcacaagagaaatggccacatcttgaaactgatcagcaagattagcctccctacacccccttacagtttagaacacgccaaggtcacacaaaccgagctgatgcgggaatccttccgtcaaaagcaggaggctactgagtccttaaagtgccaggaggaacttagagagcgcttgcatgaagaatctagagcaagggagcagctggctgtggagttgagcaaagccgaaggtgtcatcgacggctacgcggacgaaaaaaccttgtttgagcgccagatacaggaaaagactgacattatcgacaggttggagcaagagctgctgtgcgcaagcaacagactgcaggagctggaggcagagcagcagcaaattcaggaagagcgagaactgctatctaggcaaaaggaggccatgaaggccgaagccggacctgtggaacagcagctattgcaggagacagaaaaactgatgaaggaaaagctggaggttcagtgccaggcagaaaaagtaagggatgacctgcagaaacaggtgaaagcactcgagattgacgttgaggaacaggtgtcacgtttcatcgagctggaacaggaaaaaaacacggaactaatggacttacgccagcagaaccaggctcttgagaagcagctggagaagatgcggtag

SEQ ID NO: 177455 - DNA, 11724 bp, synthetic construct
  misc_feature 1..11724: note = Description of Artificial Sequence: Synthetic coding sequence
  source 1..11724: mol_type = other DNA
atggaggacgaggagcggcagaagaagctggaggccggcaaggccaagttggcccagtttagacaacggaaggctcagagcgacggccagtcccctagcaaaaagcagaaaaagaaacggaagacctcctcttcaaagcatgacgtctccgcccatcatgatctaaacatcgatcagtcccaatgtaacgaaatgtacatcaatagtagccaacgagttgagtcaacagtaatccccgaatctactatcatgcgtacccttcattccggcgagatcaccagtcacgagcagggtttctccgtcgaacttgaatctgaaatatctacaacggctgatgactgctcttcagaagtcaacggatgttcatttgtgatgagaacaggtaagcccacaaacctgctgagggaagaggaattcggtgtggacgatagttactccgagcaaggagcacaggattcacctactcacttggagatgatggaatcggagctcgcagggaaacagcatgaaattgaggaactcaatcgggaactcgaagagatgcgagtgacatatgggacggagggcttgcaacagctccaggagtttgaagccgctatcaagcaacgcgacggaatcatcacacaacttaccgcgaacttacaacaggctcgacgggagaaagacgagactatgagagagttcctcgaattaaccgaacaatcccagaaattacaaattcagttccagcagctccaggccagcgaaactttgagaaattctactcacagtagcacagcagccgacttactgcaggcgaagcagcagatcctaacacaccagcaacagctagaagaacaagatcacttgctggaggactaccaaaaaaaaaaggaggatttcacaatgcaaataagttttttgcaggagaagatcaaagtatacgagatggaacaagataaaaaggtcgagaactcaaacaaagaagaaatccaagagaaggagactatcattgaggaactcaacacgaagattatcgaggaagagaagaagactctcgagcttaaagacaaattaaccaccgccgataagctgctcggcgaattgcaagagcaaattgtgcagaagaaccaggagatcaagaatatgaagctggagttaactaacagcaagcagaaggagcgccagagtagcgaagagataaagcagctgatggggactgtggaagagttgcaaaaacgcaaccacaaggatagtcagtttgagactgatattgtgcagcggatggaacaagaaacacagcgaaaattggaacaactcagagctgagttggacgaaatgtatggacagcaaattgtgcagatgaaacaggaactgattcgccaacacatggctcagatggaggagatgaagactcggcacaaaggagagatggaaaatgcacttcggagctactcaaacataaccgtaaacgaggaccagatcaagctcatgaacgttgctattaatgagctgaacataaaactccaggacactaacagccaaaaagagaagctcaaagaggagctcggcctgatcctcgaggaaaagtgcgctctgcagcggcagttagaggacctcgtagaggagctgtcattcagccgcgaacagatccagagagcgagacagactattgcagagcaggaaagtaagctgaacgaggcccataaaagtctatcgaccgtggaagatctgaaggccgaaatcgtctcagcaagcgagagcaggaaggagctggagctcaagcacgaggctgaggttacgaattataagattaagttggagatgctcgagaaagagaaaaatgccgttctggacagaatggcggagagtcaggaggccgagctcgagcgcttgcgaacacaactgctattcagccacgaggaagaactatctaagctgaaggaggatttggagatagagcacaggatcaatatagaaaaattaaaggacaatctggggatccactacaaacagcagatcgatggcctgcagaacgaaatgtcccagaaaatagagaccatgcagtttgagaaggataacctcattacaaagcagaatcagctgatcctagaaattagtaaactgaaggacctccagcagagtctcgtcaattccaagtcggaggagatgaccctgcagatcaatgagctacaaaaagagatcgagatcctgcgccaggaggaaaaggagaaaggaactctggaacaggaggtccaagagctccagttgaagaccgagctgctggagaaacaaatgaaagagaaagagaacgaccttcaggaaaagtttgcccaactagaagcagagaacagcattctgaaggacgagaagaaaactctggaggacatgctgaagatccatacaccagttagccaggaagaacggttgatctttctggactctataaagtcaaagtcaaaagactccgtttgggagaaagaaatcgaaatccttatcgaggaaaatgaggatctgaagcaacagtgcattcagctgaatgaggagattgaaaaacagagaaacactttctcctttgcagaaaagaactttgaagtcaactaccaagaactgcaggaggaatacgcctgccttctgaaagttaaggatgacctcgaggattccaagaataagcaggagctggaatataaatcaaaacttaaagccctgaacgaggaactgcacctgcagcgtatcaacccaacaaccgttaagatgaagtccagtgtctttgatgaagataagacctttgtggcggagaccctggagatgggcgaggtggtcgagaaggacacaaccgagctgatggaaaagctggaggtgaccaagcgggaaaaactggaactgtctcagaggctttccgacctgagcgagcaattgaaacagaaacatggcgagatctctttcctcaacgaagaagtgaagtctctcaaacaggaaaaggaacaagtttctcttaggtgtcgagaactggagatcatcataaatcataacagagctgaaaacgtacagtcatgtgacacacaggtgagcagcctgctagacggagtggtcactatgaccagccgcggtgctgagggctcggtgagcaaggttaacaagagctttggggaagagtctaagattatggtcgaggataaggtgagtttcgaaaatatgaccgttggagaggaaagtaagcaggagcagttaatactggaccatttacctagtgtcactaaagagtcctctctccgcgctacccaacccagtgaaaatgacaaactgcagaaagaactcaatgtgctgaagtctgagcaaaatgacctcagactacagatggaagcccagcgaatctgcctctctctagtttatagcacacacgtggatcaggtccgtgaatacatggaaaatgagaaggacaaggcattatgcagcttgaaggaagagctgatcttcgcccaggaagaaaagataaaggagctgcagaaaatacaccagctcgagctgcagaccatgaaaacccaggaaacaggcgacgagggcaagccccttcatctccttatcgggaagttacagaaagctgtttctgaagagtgttcatactttctccagaccttgtgctctgtcctcggcgaatactacacccccgctcttaaatgcgaggtgaacgctgaggacaaagagaattcgggtgactacatctctgaaaatgaagacccagagctacaagactatcgctacgaagtccaggactttcaagaaaacatgcacacattgctgaacaaagtgactgaggaatataacaaactattggtccttcagacacgcctcagtaaaatttggggacagcagaccgacggcatgaagcttgagtttggcgaagaaaatttgcccaaagaagagacagagtttctgagcatccactctcagatgactaaccttgaagacattgacgtaaaccataaatccaagctgtcgagcctgcaggacttggaaaagacgaagttggaggaacaggtccaagaactcgaaagtctaatctctagtctgcaacagcagctgaaggagactgagcagaactacgaggcggaaatacattgcctgcagaagcgcttgcaggccgtcagtgagtccactgtgcccccatcattgccggtggatagtgttgtgatcactgaatccgacgcccagaggacgatgtatccaggatcatgcgtgaagaagaatattgatggcaccatcgagttcagcggcgagttcggagtgaaggaggaaacaaatatcgttaagttactggagaaacagtatcaagagcaacttgaagaggaagtagccaaagttatcgtgtctatgtcaatcgcctttgcccagcagaccgaactgagtagaatttccggtggaaaagagaatactgcttcctctaagcaggcacacgcagtctgccagcaggaacaacattactttaacgagatgaagctctcccaggaccagatcggatttcaaacgttcgagaccgttgatgttaaattcaaggaggaatttaagcccctatcgaaggaactcggagagcacggcaaagagattctgctgtcaaactccgatccccatgacataccggagagtaaagattgtgtgctgaccatatcggaggaaatgtttagtaaggacaagacgttcatcgttcgacagtccatccacgacgaaatctcagttagttctatggacgcctctagacagttgatgctgaacgaggagcagttggaggatatgcggcaggagctggtgcgccagtatcaagaacaccaacaggccactgaattgctgaggcaagcccacatgcgacaaatggagcggcaacgggaggatcaggagcaattacaagaggaaattaagaggcttaaccgccaactcgctcagagatcttcaattgacaatgaaaatcttgtctccgagagagagcgagtcctgctcgaagaattggaggcgttgaaacagctgtccctggctggaagggagaagttgtgctgtgagctgcgcaattcttctactcagacgcagaatggcaacgagaatcagggtgaagtggaagagcagactttcaaagagaaggagctcgatagaaaaccagaggatgtgcctcccgaaattctgtctaatgagcggtatgcactccagaaggcgaacaatcgactcttgaaaattttactagaagtggttaagactactgcggccgtcgaggagactataggccgccatgtactcgggattctagaccggagctcaaagagccaaagctctgcatccctcatttggcggagtgaagctgaggcttccgtaaaatcttgtgttcatgaggagcacacaagagtcactgatgagtctatcccttcttactccggatctgatatgccacgcaatgacattaatatgtggtccaaggtcacagaagaaggaaccgaactgtcccaaagactggtcagatctggcttcgctgggaccgagattgatccggaaaatgaggagcttatgttgaacatctcgagccggctgcaagccgctgtcgagaagctcctggaggccattagtgaaaccagctcgcagctggagcacgcgaaggtgacccagaccgagctcatgcgggagagtttcaggcagaagcaagaagccaccgaaagtctgaagtgccaggaagaacttcgggagagactccacgaagaatcgagggcacgggaacagctggctgtcgaactgagtaaggcggaaggcgtgatcgacggttatgcagatgagaagacgctttttgagcggcagatccaggagaagactgacattattgatcgactcgagcaggaacttctgtgtgccagcaatcggctacaggagctcgaggcagagcagcagcagattcaagaagaacgggaactcctttctcgtcagaaagaggctatgaaagccgaagctggtcccgtagaacaacagctgctacaggagaccgagaaactgatgaaggagaaattagaggttcagtgccaagcagagaaagttagggacgacctgcagaagcaggtgaaggctctcgaaatcgatgtcgaagaacaggtgtccagattcattgagctggagcaggagaagaacacggaacttatggatctgagacagcaaaatcaggctctggaaaaacagctggagaaaatgcggaaatttttggacgaacaggccattgatcgggagcatgagagggacgtattccagcaggaaattcagaagcttgagcaacagctgaaagtagtcccacgtttccaacccatttctgagcaccaaacaagggaagtcgagcaactagcaaaccacttaaaggaaaagactgataaatgctctgagctgcttctgtccaaggagcagctccaaagagacatccaagagaggaatgaggagatagaaaagctcgagtttcgagtcagggagctggagcaggcgcttttggtctctgctgatacattccagaaggtggaagatagaaagcacttcggcgctgtcgaagcgaaacccgagttgtccttggaggtgcagttgcaggcagagcgggacgcaattgacagaaaagaaaaagagataactaacctcgaagaacagttggaacagttccgagaggaattggaaaataaaaacgaagaagttcagcagctgcacatgcagctggaaattcagaaaaaggagtctactaccaggctgcaggaactggaacaggaaaacaaattatttaaggatgacatggagaagttaggccttgccatcaaggaatcagacgcaatgagcactcaggaccagcatgtcctcttcggcaaatttgcacagatcattcaagagaaagaggtcgagatcgaccagctgaacgagcaagttacaaagctccagcaacaattaaaaatcacaaccgacaacaaggtgatcgaagaaaaaaacgaattgattagggacttggaaacacagatcgagtgcctaatgtccgatcaggagtgcgttaagagaaaccgagaggaggagattgagcaactgaacgaagttatcgagaagctgcaacaggagttggcgaatatcggacaaaagacgtccatgaatgcccatagcctcagcgaggaggcagattcgctgaagcatcagctggatgtagtcatcgccgagaagttggccttagagcagcaagtggagactgcgaatgaggaaatgaccttcatgaagaatgtcttgaaggagactaacttcaagatgaatcagctgactcaggagctcttttctcttaagagagaacgcgaaagtgtggagaagattcagagcattcctgaaaattcggtcaacgtggccatagaccacttgtccaaagataagcctgagctcgaggtcgtacttacagaagacgccctaaagagcttagaaaatcagacatatttcaagagctttgaggaaaacggaaaaggatctataatcaacctggaaacccggttgttgcagctggaatctacagtcagcgcaaaggatctagagctcacccagtgctacaaacaaataaaagacatgcaagaacagggccagtttgaaaccgagatgcttcagaaaaagatagtcaatcttcagaaaatcgtcgaggaaaaggtggcagccgctctggtgagtcagatccagctggaggcggtacaagagtacgctaaattctgccaggacaatcagactatctcctccgagccagaacgcacaaacatacagaaccttaatcaactccgcgaagatgagcttggttctgacataagcgcactaacactacggattagtgagctggagtcacaggtggtcgaaatgcacacaagcttgatcctcgagaaagagcaggttgaaattgccgagaagaacgttttagagaaggaaaagaagctgctggagttgcaaaaactgcttgagggcaacgagaagaagcagagagagaaggagaaaaaacgcagcccacaagatgttgaagttttaaaaaccacgactgaactgttccactctaatgaggagtcaggatttttcaacgagctggaagctttgagggcggaatcagtcgccactaaagctgaattggccagctataaggaaaaagctgagaaactacaagaggaactcctggtcaaggagaccaacatgactagtctccagaaagacctcagccaggtgcgtgatcatctggccgaggccaaggaaaagctcagcatcctagagaaggaggatgagactgaggttcaagaaagcaaaaaggcttgcatgttcgagcctcttcctatcaaactgtctaaatccatcgcctcacagaccgatggcacactcaaaatttcctcttccaatcagactccccagattctcgtcaagaacgccggaattcaaatcaacctgcagagcgagtgcagctccgaggaggtaactgagatcatctcccagtttacagagaagattgaaaagatgcaggagttgcacgccgccgagatcttagatatggagagtcgccatatctcggaaaccgagactctgaagagagagcactatgttgctgtccagcttctaaaagaggagtgcggtaccctcaaagcagtcatacaatgtctccgcagtaaggagggcagcagtatccccgagctggctcattcagacgcctatcagacacgtgagatatgctcctccgattcaggctcagactggggacaagggatttacctgacccattctcagggctttgacatcgcttctgaaggacggggggaggagtcagagagcgctacagattcattccccaagaaaattaaaggtctgctaagggcagttcacaacgaggggatgcaggtgctgtcgcttactgaatctccctactcagacggcgaagatcacagtatccagcaggtgtcagagccttggctggaagagcgaaaggcatatatcaacaccatttcctccctgaaagacctcataactaaaatgcaacttcagagagaagccgaagtctatgattcgagccaaagccacgaatctttctcagattggaggggtgagctgctgttggcattgcagcaggtgtttctcgaggaaagatcagtactgctcgctgcgtttcgaaccgagctcacagccttggggacaactgatgctgtgggattgctgaactgcttggagcaacggatacaagagcaaggcgtggaataccaggccgctatggaatgtctccaaaaggccgatcgccggtccctcctttctgagattcaggccctacacgcacagatgaatggacggaagatcactctgaagagggagcaggagagcgagaagccttctcaggagctcctagaatacaatatccagcagaagcaatcccagatgcttgaaatgcaagtggaactttctagtatgaaagacagggcaaccgagctccaggagcagctgagctccgagaagatggtggtcgccgagctcaagtccgaactcgcacaaacaaaactggagttggaaacaaccctaaaggctcagcataagcacttgaaggaattagaggctttccgcctggaagttaaggacaagacggatgaagtccacctgctgaacgacactctcgcctccgagcagaagaagtctcgggagctgcagtgggcattagaaaaagaaaaggctaagctcggacggagtgaagagcgagacaaggaggagctggaagatcttaaatttagcctggaatcccagaaacagaggaacttgcagctcaacctgctgctcgagcagcaaaaacagcttttgaatgaatcccagcagaaaattgagagtcagcgaatgctgtatgatgcacagctgtccgaggagcagggacgaaatctggaactccaggttttgttggagagtgagaaggtccggatcagagaaatgagcagtacactcgaccgggaacgagagcttcacgcgcagctgcagtctagcgacggaaccggacagtcccgacctcccttgccctcagaagatctgctgaaagagttgcagaaacagctggaggagaagcacagccggattgtagaactgctcaatgaaacagaaaagtacaagctcgacagtctgcaaactcggcaacagatggaaaaggacaggcaggttcataggaagaccttgcagactgaacaagaagctaatactgaaggccagaaaaaaatgcatgaattgcagagcaaagtcgaagaccttcaacgccagctggaagaaaagaggcaacaagtctacaaactggacctagaggggcagcgcctgcagggaattatgcaggagtttcagaagcaggagctagaacgcgaagagaaaagggaatcacgcaggattttgtaccagaacctgaatgaacccaccacctggtctctcacaagcgacaggacaagaaactgggtcctacagcagaagatcgaaggtgagacgaaggaaagcaactatgccaaactgattgagatgaacggcgggggtactggctgcaaccacgaattagaaatgatccgccagaaactgcagtgtgtcgcctccaaactgcaagttttgccccagaaggcatccgagagattgcaatttgagaccgccgatgacgaagatttcatttgggttcaagagaacattgatgagatcatactgcagttgcagaaactgacgggtcaacagggtgaagaaccatcattagtgagtcccagtacttcctgcggatcccttacagaacggctccttcgccagaacgcggagcttaccggccacataagccaacttacagaagagaaaaacgatctgcgtaatatggtaatgaagcttgaggagcaaataagatggtataggcaaaccggggccggcagggataattccagtaggttttcacttaacggaggagcaaacatagaagcaatcatcgcgagcgagaaggaagtgtggaatcgggaaaaactcaccctccagaaatccctgaagagagctgaagccgaagtctacaaactgaaagcagagttacggaacgactcgctgctgcagactctttcacctgatagcgaacatgttaccctcaagcgaatctacggcaaatacctaagagccgagagcttccgcaaagctttgatctatcaaaaaaagtacctgcttctactgttagggggatttcaggaatgtgaggatgcgacgctggctctcctcgccagaatgggaggtcaaccagcgtttactgatctcgaggtgattaccaatcgacctaagggtttcaccaggttcagatccgccgtccgggtgtcaattgctatttctcgtatgaagtttttggttcgaaggtggcatagggtaacggggtccgtgtctatcaatataaaccgcgatggttttggactgaatcaaggagccgaaaagaccgactccttctatcactcttctggtggtctagagctgtacggcgagccgcgccacactacctataggtcgagaagtgacctggattatatacgatcaccattgccctttcagaataggtacccggggacgcctgccgactttaatcccgggagcctggcctgttctcagctacagaactacgatcccgaccgagcactgaccgactacataacacgactagaggccctacaacgcaggttggggaccatccagtccggctctaccacacagtttcacgcaggcatgcgaagatag

SEQ ID NO: 177456 - DNA, 11574 bp, synthetic construct
  misc_feature 1..11574: note = Description of Artificial Sequence: Synthetic coding sequence
  source 1..11574: mol_type = other DNA
atggaggacgaggagcggcagaagaagctggaggccggcaaggccaagatcgaagagctgtccctggcctttctcgtcagacagctggcccagtttcgccaaagaaaggcacaatctgacggtcaatctccttcaaagaagcaaaagaagaagcggaagacttcctccagcaaacatgacgtgtctgctcaccacgacctgaacatcgaccagtcccagtgtaatgagatgtatattaacagctcccaacgggtcgaaagtacggtgataccagagagcacaattatgcgcacgcttcattctggtgaaatcactagtcacgaacaggggttctcagttgagctcgagtcagaaatctccaccacggcggacgattgtagctctgaagttaatggctgctcttttgtgatgcggactggaaagcccactaacctcctccgagaagaggagttcggtgtagatgacagctactctgaacaaggggctcaggattctcccactcacctcgaaatgatggaatctgagctggcaggcaagcaacacgaaatcgaagaactgaatcgggaactcgaggagatgcgggttacctatggcaccgaagggctccagcagcttcaggaattcgaagcagcaattaagcagcgggatggcattatcactcagctgacagctaaccttcaacaggccagaagagagaaggatgagacaatgcgggaatttctagaactgacagagcagagtcaaaagctgcaaatccagtttcagcagttgcaggcaagcgagactctgagaaactctactcatagttctaccgccgcagatctgctgcaggccaagcaacaaattcttactcaccagcaacaactggaggagcaggaccacttgctcgaagattaccagaaaaaaaaggaagatttcacgatgcagattagtttcctccaggagaaaatcaaagtctatgagatggaacaggacaaaaaggtggaaaatagtaacaaggaagaaatccaagaaaaggagaccatcatcgaggagctgaacaccaaaattatagaagaggagaagaaaacacttgaactcaaagataagcttaccacggcagataaattgttgggggaacttcaggaacagatcgtgcaaaaaaaccaggagatcaaaaacatgaagctggaactcaccaactccaagcaaaaagaacgccaaagctccgaagaaataaagcaactgatggggaccgtcgaggagcttcagaagaggaatcacaaggactcccagtttgaaaccgatattgtgcagagaatggaacaggaaacacagagaaagttggagcagctgcgggcggagctagacgagatgtatgggcaacagattgttcagatgaaacaggagctgatcagacaacatatggcacaaatggaagagatgaaaactagacataagggagaaatggagaatgccctccgctcctattcaaacattactgtcaacgaggaccagatcaagttaatgaacgtggccatcaatgagcttaacataaagctgcaggacaccaactcccagaaagaaaaacttaaggaggagttgggattaatcctggaagaaaaatgcgcactacaacgtcagcttgaggacttagtcgaggaactgtcttttagcagagagcagatccagagagcacgccagacaatcgccgaacaggagagtaaacttaatgaggcacataagagtttgtcaacggtggaggatctaaaggccgaaatcgtgtccgcaagtgagtctaggaaggagctggaactaaagcacgaagccgaggtcaccaattacaagatcaaactcgagatgctggagaaggaaaagaatgctgttttagaccggatggccgagagccaggaggccgaactggagcgtctgaggacacaactgctgttcagccacgaggaggagctcagtaagcttaaagaggatcttgaaatcgagcatagaatcaatattgagaagctgaaagataacctagggatacattataaacagcagatcgatggactacagaatgagatgagtcagaaaatcgagactatgcagttcgaaaaggataatctgattacaaagcagaaccagctcatactggagatttccaagctgaaggatctgcagcagtccctcgtaaactcaaagagtgaagaaatgaccctgcaaataaacgagctgcagaaagagatcgagatcttaagacaagaagagaaagagaagggtacactagagcaggaagtccaggagctgcagctgaaaactgaactgcttgagaaacagatgaaagaaaaggagaacgacctgcaagaaaagtttgctcagctggaggcggagaatagtatcctgaaagacgagaagaagacgctcgaggacatgctgaagatccacacccctgttagccaggaggaacggcttatcttcctggactcaattaagtctaaaagcaaagattccgtatgggaaaaagaaatcgagatcctgattgaagagaatgaggacctcaaacagcagtgtatccagcttaatgaggaaatagagaagcagagaaacacattttcctttgccgagaagaatttcgaggtcaactaccaagagctgcaggaggaatatgcctgccttctgaaagttaaggacgatctcgaagactcgaagaataagcaggaactggagtataagtccaaactgaaggcactaaatgaggagctgcacttgcagagaattaacccgaccacagtcaagatgaagtcctcagtgtttgacgaagataaaactttcgttgccgaaacactggagatgggggaggtggtggaaaaagataccaccgagcttatggaaaagcttgaggtgacgaagcgtgaaaaactggagctttcccaacggctcagcgatttgtccgagcagctgaagcagaagcatggggaaatctccttccttaatgaggaggtcaaatctctcaaacaggagaaagagcaggtgtcccttcgctgccgcgaactagaaatcattataaaccacaaccgagccgagaatgtgcagagttgcgacacacaggtgtcaagcctactggatggggtggtcacaatgacttctagaggcgccgagggcagtgtaagcaaggtgaacaagtcatttggcgaggagtccaagattatggtcgaggacaaggtcagctttgagaacatgaccgtgggtgaggagtccaagcaagagcagttaattttagaccacctcccctccgtgactaaggagtcatccctgcgcgccacccaaccctctgagaatgataagttgcagaaagagctgaatgtgctgaagagtgaacagaatgatctgcgcctgcaaatggaggcacagaggatctgcctgagtcttgtgtacagcacacacgtggaccaggtacgcgagtacatggaaaatgaaaaagacaaggctttgtgtagcttgaaggaagaattaatattcgcccaggaggagaagatcaaagaactgcagaaaattcaccagctcgagctacagactatgaaaacccaggaaactggagacgaaggaaagccactccacctcctcatcggcaaactccagaaagcggtgtccgaagaatgtagctactttctacagacactgtgcagcgtgttaggtgaatattatactcctgccctcaaatgcgaggtcaatgctgaagacaaggagaactccggtgattatatctctgagaacgaggatccagagctgcaagactaccggtacgaagtccaagactttcaggaaaatatgcataccctcttgaacaaggtgacagaagagtacaacaagctgctggtgctgcagacccgtctcagcaagatttggggccagcagactgatggaatgaaactggaattcggcgaggagaacttgcccaaggaagagaccgaattcctgtccattcattcacagatgacaaacctcgaggacattgatgtaaatcacaagtccaaattgtcatctttgcaggacctcgagaagacaaagcttgaggaacaggtgcaggagctggagtcacttatctcttccttacagcaacagttaaaggagactgaacagaattacgaggctgagatccactgtctgcagaagcgcctccaagctgtaagtgagagcaccgtgccgcccagcttacctgtggatagtgtcgtgatcaccgaatccgacgcccagcggaccatgtatccggggtcttgcgttaagaagaacatcgacgggaccatcgagttcagtggggaattcggagttaaggaggaaacaaatattgtgaagctgctggagaagcagtaccaggaacagctcgaagaagaagtggctaaggtgattgtctctatgtcgattgcattcgctcagcagactgaactgtccagaatctccggggggaaagagaatactgcttcttctaagcaggcccacgctgtatgccagcaagagcagcattactttaatgaaatgaagctttcccaagaccagattggatttcaaacatttgagacggttgatgtaaagtttaaagaggagtttaaaccactgagtaaagaactcggtgagcacggcaaagaaatactactctcaaacagtgacccccacgacattccggaaagcaaggactgtgtcctgactatctctgaggagatgttctccaaagacaagacatttattgtgcgccagagcatccacgatgagatcagcgtttcgagtatggatgcctcaaggcagctcatgctgaacgaagagcagctggaagacatgcgacaggaactcgtacgccagtatcaggaacaccagcaagcgaccgagctgctccggcaggcgcacatgagacagatggagagacaacgggaagaccaggaacaactccaagaggaaataaagcgcctcaaccggcaattggcgcagagatcttccattgacaacgagaacctggtgtccgagagggagcgggtgctgctggaagaacttgaggcccttaaacaactgtccctcgccggacgcgaaaagctttgttgtgagctaagaaactcgtcaactcagacgcagaatgggaatgaaaatcagggcgaggtggaagagcagacttttaaggagaaggaattggaccgtaagcccgaggacgttccccccgaaatcctgtccaatgaacggtacgcgctgcaaaaggctaataaccgactcctgaaaattctgttggaggtggtgaaaacgacggcagcagtggaagagactatagggagacatgtgctgggtattcttgacagatctagtaaatctcagagctctgccagcctcatttggagaagcgaggccgaggcctccgtgaagtcctgcgtccacgaagagcatacccgggtgactgatgaatccattccctcatactctggatccgacatgcccagaaacgatattaatatgtggagcaaagttactgaggaagggactgagctaagccagaggttagtcagaagtggattcgctggaaccgaaattgaccccgaaaatgaagaactaatgctcaacatctcgagcaggctgcaagcggccgtggaaaagttgttggaggccatcagtgaaacatcgtcacagctagagcacgccaaagtcactcagacagaactgatgagagaaagttttcgtcagaaacaggaggcaaccgagtctttgaagtgtcaggaggaacttcgtgaaagactgcatgaggaatctcgtgccagggagcagttggccgtggagttgtcaaaggcggagggcgtaatcgacggttacgctgacgagaaaacactctttgagcgacagatacaagaaaaaacagacatcattgatagattggagcaggagctactgtgcgcctctaacagactccaggagctggaggcggaacaacagcaaattcaggaagaaagagaactactctcacgccagaaggaggctatgaaagctgaggctggccccgtcgagcagcagctgctgcaagagaccgagaaattaatgaaagagaaacttgaggtccagtgccaagcggaaaaagtacgcgacgatctccaaaaacaagtcaaggctctggaaattgacgttgaggagcaggttagtcggttcatcgaactggaacaagagaaaaacaccgagctgatggatctgcgccagcagaaccaggctctggaaaaacaactcgaaaagatgaggaagtttttggatgaacaggccatcgatcgcgaacatgaaagagacgtcttccagcaggagatccagaagctggaacagcagctcaaagtcgtgcctcggttccaaccaatcagcgagcaccagaccagagaggtggaacagctggccaatcacctgaaagaaaaaacagataaatgtagcgagcttcttctttccaaggaacagctgcagcgagacatccaggagcggaatgaggagattgagaagctggagttccgtgttcgcgaactggagcaggcactcttggtgtccgctgacactttccagaaggtcgaagatcggaaacattttggagctgttgaagcaaagcctgaattgtccctcgaagtccagcttcaagcagaacgagatgccatcgatcgaaaagagaaggaaattactaatctcgaggagcagctcgaacagtttcgagaggagctagagaataagaatgaggaggtgcagcagctacacatgcagttggagatacagaagaaagagtctaccacccggcttcaggaactagagcaggaaaacaaactctttaaggatgacatggagaagctgggtttggctattaaagagtcggatgccatgagcacccaggatcaacatgttctgttcggaaagttcgctcaaatcattcaagaaaaggaggttgaaattgaccagctgaacgaacaggtgaccaaactccagcagcagttgaagatcactacagataataaggtcattgaagaaaaaaatgagttaattcgtgacctggaaactcagattgagtgtctgatgtcagatcaggaatgcgtgaaacgaaatcgagaagaagagatcgagcagttgaacgaagtaatcgagaagctccaacaagagctcgccaatattggacagaaaaccagcatgaatgcgcacagtctgagcgaggaggcggatagcctgaagcatcagctggacgtagtgatagccgagaagcttgcattggagcagcaagtagagacggcaaatgaggagatgacattcatgaaaaatgtgcttaaggaaacaaactttaaaatgaaccagctgacccaggaacttttttctctcaagcgcgagcgcgagagcgtggaaaaaatccaatcaattccggaaaattcggtgaacgtggctatagatcacctgagcaaggataagccggagttggaggtggtgctcactgaggacgccctgaagagtctcgagaaccaaacatactttaagtcctttgaagaaaacggtaaggggtcaattataaatctcgagacgaggctgctgcagctggagagcacagtgtccgccaaggacttggagctcacccagtgctataaacaaatcaaggatatgcaagaacagggccagttcgagactgaaatgctgcagaaaaaaatcgtgaatctacagaagattgtggaggagaaggtggcggcggcactggttagtcaaattcagctggaggctgtccaagaatacgcaaaattctgccaggataaccagaccattagcagcgagccagagcgcacaaatattcagaacctcaatcaactcagggaggacgagctgggcagcgacatttccgcgctcaccctgcgcatctctgaactggagagccaggtggtggagatgcataccagtctcattttggagaaggagcaagttgagatagctgagaagaacgtgctggaaaaagagaagaagctattggagctgcagaagctgctcgaaggtaatgaaaagaaacagagagagaaggagaaaaaaagatccccccaggatgttgaggtccttaagacaaccactgagctcttccattcgaacgaggaaagcggattctttaacgagctggaggcactccgtgccgagtctgtggccacgaaggcggaactcgcgtcttataaggagaaagccgaaaaactccaggaggagctgctcgtcaaagagactaacatgacttccttacagaaggacctcagccaggttagggatcatctcgccgaggccaaggaaaagctctccatcctcgaaaaggaggacgagactgaggtacaagaaagtaagaaagcttgcatgttcgagcctctgcctataaagctgagtaagtctatcgccagtcaaaccgatggaacgctcaaaatcagttctagtaaccagacgcctcagatcttggtgaaaaacgcaggtatccagatcaacttgcagtctgagtgctcgtccgaggaggtgactgagatcattagtcagttcaccgagaaaatagagaaaatgcaggaactacacgcagccgagatcctggatatggagtcacgccacatttccgagacagagacgcttaaaagagagcattatgtcgcggtccagttgcttaaggaggagtgcggaaccctcaaggccgtaatccagtgcctgcgatcaaaggagggactgctgagagcagttcacaatgaggggatgcaggtgctctctctcaccgaatcaccctattccgatggcgaagatcacagtatacagcaagtcagcgagccttggctggaggaacggaaagcctatattaacactatttcctcccttaaggacctcatcactaaaatgcagctgcaacgagaagccgaggtctatgatagcagccagagtcacgaatctttctcggactggcgaggcgaactcctgctggccctgcaacaggtgtttctcgaagagaggagcgtgttactcgcagcgtttaggacggaactgacggccttaggcaccaccgacgcggtggggttactaaattgcttggagcaacgcattcaggagcagggcgtggagtaccaggctgctatggaatgcctgcaaaaagctgaccgtaggagcctcctgtcagaaatccaggcactgcacgctcagatgaacggcagaaagattactcttaaaagagagcaggagtccgaaaagccctcccaggaacttctagagtacaacattcaacagaaacagagccagatgcttgaaatgcaagtggagttaagcagtatgaaggaccgcgccacagaactccaggagcaactatctagcgagaagatggtggtggccgagctgaaaagcgagctggcacagaccaagttggaactggagactaccctcaaggcccagcacaaacacctcaaagagctggaagccttccgactcgaagtgaaggataagacagatgaggtgcatttgcttaatgatactctggccagcgaacagaagaaatctagggagctgcagtgggccttggagaaggaaaaagctaaactcggacggagcgaggagcgggataaggaggagcttgaggacttaaagttttcgctcgagtcgcaaaagcagcgtaacctgcagctcaatttgcttctggaacagcaaaaacaacttctcaatgaaagtcagcaaaaaattgagagccagcggatgctgtacgatgcccagttgagcgaggaacaaggccggaacctagagctacaggtactgctggagagtgaaaaagtgcgcattcgagaaatgtcatccacactcgaccgagagagggagctgcatgcgcaacttcagtctagcgacggaactgggcaaagtcgcccaccactgccttctgaggatttgctgaaggagctgcagaaacagttagaggaaaagcatagtcggatcgtcgaactgttgaatgagactgaaaagtataagctggatagcctccagacacgacaacaaatggagaaggatcgtcaagtgcaccgcaagactctgcagactgaacaggaagcaaatacagaaggccaaaagaaaatgcatgaactgcaaagtaaggtggaggatctgcagcggcagttggaggagaagcggcaacaggtgtacaaacttgacctggaaggccagcggctccaaggcatcatgcaggaattccagaagcaagaactcgaacgggaagagaagcgcgagtcccggcgaattctttaccagaacttaaacgagccaacgacatggagtctgacaagtgatcggacccggaactgggtgctccagcagaagattgagggagagaccaaggagagcaattatgcaaaacttatcgagatgaatggggggggcacgggttgcaaccatgagctcgagatgatccgccagaagctacagtgtgtagcatcgaaactgcaagtgttgccccagaaggccagcgagcgcctgcagtttgagaccgccgatgatgaggattttatttgggtacaggaaaacatcgacgagattatcctacagcttcagaagcttactgggcaacaaggcgaagaaccctccctggtctctccatcaacctcctgtggaagccttactgaacgattactccggcagaacgccgagcttactggccatattagccaactcaccgaagagaaaaatgatctgcgtaacatggtcatgaagttagaagagcagattaggtggtaccggcagacgggcgctggccgcgacaacagctcccgcttctccctgaacggtggagcaaacatcgaagccatcattgcaagcgagaaggaggtgtggaatagggagaaactgacactccagaagagtctgaagagagccgaggccgaggtgtacaagttaaaggcagaattgcggaatgactccttactccaaaccctcagtcccgatagcgagcatgtcaccctgaaacggatctatggcaagtacctcagggcagagagtttcagaaaagctcttatctaccagaaaaaatacctgctactgcttctcggaggctttcaggaatgtgaagacgccaccctggcattgctggctcgcatgggtgggcagcccgcctttaccgatctcgaggtgattactaatcgcccaaagggattcactcgcttcagatcggccgttcgtgtgtctatcgcaattagccgcatgaaatttttagtgaggaggtggcaccgggtgaccggcagcgtgtcgatcaacattaatcgggacggattcggcctaaaccagggagccgagaagactgactctttttatcactcatcaggtggtctggaactgtatggggagccccgccataccacttacaggtctcgaagcgatctcgactacatccggtcgccactccctttccagaaccggtatcctgggacgccagctgacttcaatccaggaagtttggcctgctcccagctgcagaattacgatcccgacagggccctgacagactacataacaagactggaggctctccagagacgtctggggaccattcaaagcggtagcaccacacagtttcatgccggtatgagacgctag

SEQ ID NO: 177457 - DNA, 11736 bp, synthetic construct
  misc_feature 1..11736: note = Description of Artificial Sequence: Synthetic coding sequence
  source 1..11736: mol_type = other DNA
atggaggacgaggagcggcagaagaagctggaggccggcaaggccaagatagaggagctctccctggcctttttggttcgccagctagcccagtttcgccagaggaaggctcagtctgatggacaaagtccctctaagaaacagaaaaaaaagcgcaaaacatcctcaagcaagcatgacgtgtccgcacatcacgatctcaatattgaccagtcgcagtgtaatgagatgtacataaatagctcgcagagggtggagtccacagtgattccggaaagtaccatcatgcgcactctgcattctggcgaaattacttcgcatgaacaaggtttcagcgtggagctagaaagcgaaatctctacaaccgccgatgattgttcttcggaagttaatggctgttctttcgttatgcggaccgggaagcccacaaatctactgagggaagaagagttcggcgtagatgactcgtattcggagcagggagcccaggacagcccaacgcatcttgagatgatggaaagcgaactagctgggaaacaacatgaaatcgaagagctcaatcgcgagttggaggaaatgagagtcacttatggcaccgaagggctgcagcaactacaggaatttgaagctgcaattaaacagcgagatgggatcattactcagctgacggccaaccttcagcaagcgcggagggaaaaggatgagactatgcgcgagtttctggagctgaccgaacagagtcagaagctgcagattcaattccagcaactgcaagcctctgagaccctgcgcaattctacgcactccagcaccgcggccgacctcttgcaggcgaagcagcagatcttgacccaccagcaacaacttgaagaacaagaccacctgctagaggattaccagaagaagaaggaggatttcaccatgcagataagtttccttcaggaaaaaattaaagtttacgaaatggaacaggataaaaaagtagagaactcaaataaagaggagatccaagagaaggagactatcattgaagaactgaacactaaaataatcgaggaggagaagaagaccctggaactcaaagataaactaacaacagccgacaaactgttgggcgagttacaagagcagatcgtgcaaaagaaccaagaaatcaagaatatgaaactcgagctgaccaatagcaaacagaaagagcgccagtcaagtgaagaaattaagcagctcatgggcaccgtcgaagaactgcaaaagaggaaccataaagattcccagtttgaaactgatatcgtgcagagaatggaacaggagactcagaggaagctggaacagctgagggcagagctcgacgagatgtacgggcagcagatcgtgcagatgaaacaagagctgatcaggcagcatatggcccagatggaagagatgaagacccgccacaagggagagatggagaacgctctgcgcagctattctaatataaccgtgaatgaggatcagatcaagctcatgaatgtggccatcaacgaattgaacattaaacttcaagacacaaattcgcaaaaggaaaagctgaaagaagagttgggtctgatcctggaagagaaatgtgcacttcagaggcagctcgaagatttagttgaggaactgtctttctctcgtgaacagatccagcgcgcccgacagacaatcgcagaacaggaaagcaagcttaatgaggcccataagagcctgagcactgtcgaagatctgaaagcagaaatcgtcagcgcatcggaaagcaggaaggagttagaactgaagcatgaggcagaggttactaattataagatcaagctggagatgcttgagaaggagaaaaacgccgtactggatcggatggcagaatcacaggaggccgaacttgaacggttacggactcagctcttattttcccacgaggaggaactgtccaagctgaaggaggacttggagatcgaacaccggattaatatcgagaagctgaaagacaatctgggaattcactataagcagcagatcgacggcctgcaaaatgaaatgagccagaagatcgaaacaatgcaattcgagaaggataacctcatcaccaagcagaaccagctgattctcgaaatcagcaaattgaaggatttgcagcaatccctcgtgaactctaagtcagaggaaatgaccctgcagataaatgaattgcagaaggagattgagatacttcgtcaggaggaaaaagagaagggcacactcgaacaggaagtgcaggagctgcagctcaaaaccgagctattagaaaagcaaatgaaagaaaaggagaatgacctccaggaaaagttcgcccagctcgaggcggagaacagcattctgaaagacgagaagaaaaccctggaggatatgctgaagatccacacaccagtgtcccaggaggagcgcctgatcttcctggatagtattaagtctaagtccaaggactcagtttgggagaaggagatcgagatcctgatagaggaaaacgaggatctgaaacaacagtgtattcaattgaatgaggaaattgagaagcagcgaaatacattttcttttgccgagaagaactttgaggtgaattaccaggaactgcaggaggaatatgcatgtcttctaaaagtcaaagacgacctggaggacagcaagaataaacaggaactcgagtacaaatctaagctgaaggcactgaatgaggagcttcatctgcagcgaatcaatcccacaaccgtgaagatgaaaagcagtgtgtttgacgaagacaagacattcgttgccgaaacgctagagatgggcgaggtagtggaaaaagataccaccgagctaatggagaagctggaggtgaccaaacgagaaaaactcgagttaagtcagcggctgagcgatctgagcgaacagctgaagcagaagcacggcgagatttccttcctgaatgaagaggtgaaaagtctgaaacaggaaaaagagcaggtgtcactgcggtgccgggaattggagatcatcattaaccacaacagagctgaaaacgtccaatcgtgcgacacccaagtatctagcctgctagacggggtggtcaccatgacctccaggggcgcggaggggtcagtgagtaaggtgaacaaatccttcggggaagagagcaaaattatggtagaggataaagtgtcttttgagaatatgacagtcggtgaagagtctaaacaggagcagctgatactcgatcatttgcccagcgtcaccaaggagtctagtttgcgggccacacaacctagtgagaacgataagctgcagaaggagctgaacgtactgaagtcagaacaaaatgacctccgtctccagatggaagcacagcgcatatgtctgagtctcgtgtatagcacacatgtggatcaggtacgcgagtacatggaaaatgagaaagataaggcactttgctcactcaaagaggagctcatctttgctcaggaggagaaaatcaaagagcttcaaaagatccatcaattggagttgcaaactatgaaaacacaggaaacgggagatgagggcaaacctctgcacctgcttattgggaaactacaaaaggctgtcagcgaggagtgctcatattttcttcagacactgtgctcggtgttgggggaatactacacaccagcgctgaagtgcgaagtgaatgcagaggataaagagaactcgggtgactatattagcgagaacgaggacccggagctccaggattaccgctatgaggtgcaagattttcaggagaacatgcatacattgctcaataaagtgactgaagagtacaacaaactcctggtgctgcagacacgtctgtctaaaatttgggggcaacagaccgacggaatgaaactggagttcggagaggaaaacctcccaaaggaggagaccgagttcctgtctattcattctcagatgacaaatctggaagacatcgatgtaaatcacaagagcaaactttcctctctgcaggacctggagaaaaccaaattggaggaacaagtccaagagttggaaagcctaataagttccctccagcagcagctcaaagagacagagcagaactatgaagctgagatacattgtttacagaagcgtcttcaggccgtatctgagtcgacagtacccccatctctgccagtggactctgtggtgattaccgaatcagatgcacagcgtactatgtaccccggctcatgcgttaaaaagaatatcgatggcacaatcgagttttccggggagttcggagtgaaagaggagacgaacattgtaaagcttttagaaaaacaataccaggaacagctggaggaagaagtagccaaggttattgtgtcaatgagtattgcattcgctcagcagactgaactctctaggatatcaggtggaaaggaaaacaccgctagctccaagcaggcccatgctgtgtgtcagcaagaacagcattacttcaacgaaatgaaacttagccaggaccaaatcgggttccagacatttgaaaccgtcgacgtgaaatttaaggaagagttcaagccgttatccaaagaactgggggaacacgggaaggagatacttctcagcaacagcgaccctcacgatatccccgagagcaaagactgcgtcctgactatctccgaagagatgttctcaaaggacaaaaccttcatagtgcgccagtctatacatgatgaaatctcagtctccagcatggacgctagtcgccaacttatgttaaacgaggagcaactggaggacatgagacaagagttagtgcgtcaatatcaagaacatcagcaggcgaccgagctgctaagacaggcccacatgcgccagatggaacggcagcgcgaagaccaggagcagctccaggaggagatcaagcggctgaaccgccagttggcccagcggtcgtcaatcgataacgaaaacttagtgtccgagagagaacgggtcctcctggaggagttggaggcactgaagcagctgtctctggccggacgggaaaaactgtgttgcgagttgaggaactcctcaactcaaactcaaaacgggaatgaaaaccagggggaagttgaggaacagacatttaaagagaaagaacttgataggaagcccgaggatgtccccccagagattctctcaaacgagagatacgcgctccaaaaggcaaacaacagactgctgaagatcttactggaagtggtcaaaaccaccgccgctgttgaggaaacaattggtcggcacgtgctcggaattctcgatcgctcaagtaaaagccaatcctccgctagcctcatttggcgctctgaagccgaagcgagcgttaagagctgcgtgcatgaggaacacaccagggtcaccgatgagagtatcccaagctactcaggcagcgacatgccaagaaatgatataaatatgtggtccaaagtgactgaggagggaaccgaactttcgcagcgactggtgcggagcggattcgcaggaaccgagatcgatccagagaatgaagagctgatgctgaacatctcctcccgcttacaagccgccgtcgaaaagttacttgaagcaatttctgaaacttccagtcaattagagcacgccaaagtgacacagactgagctgatgcgggaaagctttcgccagaagcaggaagctacggagtcgcttaagtgccaggaagagttgcgggaacggcttcatgaagagtctagggcgcgtgagcagttggcagtagaactatctaaggccgaaggagtgatcgatggctacgcagatgagaaaacactgttcgaaaggcagattcaggaaaagactgacattatcgaccgcctggagcaggagttgctgtgcgcctcaaacagactgcaggaactggaagccgaacagcagcagatccaggaagaacgcgaacttcttagccgacaaaaagaagccatgaaggccgaggctggaccggtggagcagcagctgctgcaggaaactgaaaagctaatgaaagaaaagctcgaggtgcaatgccaggccgagaaagttcgggatgacctgcagaagcaggtgaaggccctcgaaattgatgtagaagagcaggtgtctaggtttatcgagctggaacaagagaagaatacagagctcatggatttgagacagcagaatcaagcattggagaagcagctggaaaagatgcgaaagttcctggatgagcaggctatcgatagggagcacgagagagatgtgttccagcaggagattcagaagctggaacagcagctcaaagtggtgccccggtttcagccgatttccgagcaccagaccagggaggttgaacagctcgctaaccacctgaaagaaaagactgataaatgctctgaattgttgctctccaaagagcagctgcagcgagatattcaagagcgcaatgaggagatcgagaagctggaatttcgagtccgtgagttggaacaggcccttttggtatccgccgataccttccagaaggtggaagacaggaagcacttcggcgctgtagaagctaaacctgagttgtccctcgaggtccagctacaggccgagagagatgctattgatcgcaaagagaaggagatcactaacctggaagagcaactagagcagtttagggaggaactggagaataagaatgaggaggtgcagcagcttcatatgcagcttgagatccagaaaaaagaatccactacacgacttcaggagctggagcaggaaaataagctgttcaaagatgacatggagaagctgggactggccataaaagagagcgacgccatgtccacacaggatcagcacgttctattcggcaagttcgcacaaatcatccaggaaaaggaagtggagattgaccagctaaatgagcaggtcacaaagctccaacagcagctgaagatcaccactgacaataaagtcatcgaagaaaagaatgaattgattagagatttggagacccaaattgagtgtctgatgagcgaccaggagtgtgtaaaacgaaatcgagaggaggagattgaacagctgaatgaggtgattgaaaagctacagcaggaattagctaacattggccagaagacctcaatgaacgctcatagcctctccgaggaagctgatagcctaaaacaccaactcgatgtcgttatagccgaaaagctggccctcgaacaacaggtggaaacagcgaatgaggagatgacgttcatgaaaaacgtgctcaaagagaccaatttcaaaatgaaccaactcacccaggaactgttctcgctcaaaagggagcgggaatccgttgagaaaatccagagtattccagaaaactcggttaacgtggcaattgatcatttgtctaaggacaaacccgagctggaggttgtgctaaccgaagacgccctgaaatccttggagaaccaaacctacttcaagtcatttgaagagaatggtaaaggcagcatcatcaacctggaaactaggctactgcagctggagagcaccgtctccgctaaagatctggagttaacccagtgttataaacagattaaggacatgcaggagcagggccagttcgaaacggagatgttgcagaagaagattgtgaatcttcagaagatcgtggaagagaaagttgccgccgccctggtctcccagatccaacttgaggcggtgcaggaatatgccaaattttgccaagataaccaaactatcagtagcgaacctgagcggactaacattcaaaacctaaaccagttacgggaagatgaactgggtagtgacatttccgctcttactctcaggataagtgagctcgagagccaagttgtggagatgcacacttcactgattctggagaaagagcaggtagaaatcgccgagaagaatgttctggagaaggagaaaaagctgctggagctccaaaagctccttgaaggtaatgagaagaagcaaagggaaaaggagaaaaagcgcagcccccaagatgttgaggttctcaaaaccacaacggagctattccactcaaatgaagagagtgggttctttaatgagctggaggcactgagggccgaatcagtcgccaccaaagccgagctggcttcgtataaggaaaaggctgagaagctgcaggaggaacttctggtaaaagagaccaatatgacttctctccaaaaggacttgagtcaagtgcgggaccacctggcggaggctaaagagaaactctcaattttggagaaagaggacgaaactgaggtccaggagagtaaaaaagcctgcatgttcgaacctctgcccatcaaattgagcaaatctatagcctcccaaacagacgggacactgaaaatctcaagcagcaaccagactccccagattctggtcaagaacgcaggcattcagattaatctccagtctgaatgtagcagcgaggaggttaccgagataatctcgcagttcaccgagaagatcgagaaaatgcaggagctgcacgccgccgagatcctggatatggagtctaggcacatttcagaaacagagacgctgaagcgcgaacactacgtagccgtacagctgctcaaggaggaatgcggcaccctcaaagccgtgattcagtgcttgaggagcaaggaggtgttcgggttttataatatgtgctttagcacactctgtgactccgggtctgattggggccaaggaatctatctcacccattctcagggctttgacatcgctagtgaaggccgcggggaggaaagcgagtccgctacggatagctttccaaaaaagatcaaagggttgctgcgcgccgtgcacaacgagggaatgcaggtcctgagcctgaccgagtccccttattcagacggggaagaccattctattcagcaggttagcgaaccatggctggaagagcgaaaggcatacattaatactatctcttcgttgaaggaccttatcacaaagatgcagctccagagggaggctgaggtgtacgattcatcccagtctcatgaaagcttttctgactggcgcggagaactgctgttagctctgcagcaggtgtttttggaggagcggtccgtgctcctcgcagcatttcggacagagcttactgctctcggcacaacagacgcagtcggcctcctcaattgtttggaacagcgcattcaggagcaaggcgtcgagtaccaggctgccatggaatgcttgcagaaggcggaccgtcggagcctgctctcagaaatacaagctctccacgcccagatgaatgggagaaagatcacgttaaagagagagcaggagagcgagaaacccagccaggagctgctggagtacaacattcaacagaagcagtcacagatgctggaaatgcaggtggaattaagctcaatgaaggatcgcgcaacagaattgcaggaacagctgagttctgaaaaaatggtggtagcagagctgaagtctgaactggcccaaaccaagctagaactcgagaccaccctcaaggcacagcacaagcacctgaaagagctggaagccttccggctggaagtgaaggataagaccgatgaggtgcaccttctaaatgacaccttggcatccgagcaaaaaaagagccgcgagctgcaatgggccttagagaaagagaaagccaagctcggccggagcgaagaaagggataaagaggagctcgaagatctgaaattttctctcgagtctcagaaacaacgcaacctccagctgaaccttctcctggagcagcagaaacaattgttaaatgagagccagcagaagatagaatctcagaggatgctttacgatgcccagctgtcagaggagcagggacggaatttagaactgcaggtcctgctagagagcgaaaaagtgcgcatccgggagatgagcagcacactggatagggaacgagagcttcacgctcagttacagtcttccgacgggactgggcagtcgagaccaccattgcccagtgaagacttgctcaaagaactgcaaaaacagcttgaggaaaagcactcaaggatcgttgagctcctgaatgagacagagaagtacaaactggactctcttcaaaccagacagcaaatggagaaggaccggcaggtgcacagaaagacactgcagacagagcaggaagccaatactgaaggacagaagaagatgcatgaactgcagtccaaggtcgaggacttgcagaggcagctggaagagaaacgccagcaggtgtacaagcttgatctggagggccagcggctgcagggcatcatgcaagaattccagaaacaagagttggaaagagaggagaagagagagtcacgccgtatcctatatcagaatcttaatgaacccacaacttggtccctcacgtcagacagaacccgcaactgggtcttacaacagaagatcgagggcgaaacaaaggaaagcaattacgctaaactcattgaaatgaatgggggaggcacgggatgcaatcacgagttggagatgatacggcagaagctacagtgtgtagcctccaaactgcaggtccttccccagaaggcaagtgaacggctccagttcgagacggccgacgacgaggactttatttgggttcaggagaacattgacgagatcattttacaactgcaaaagttaacaggacagcagggtgaagagccatccctcgttagcccgagtaccagctgcggaagcctcactgagagattgctaaggcagaatgccgaactaacagggcacatctcccagttaacagaggagaagaacgacctgcggaatatggtaatgaaacttgaggagcaaatcagatggtatagacagacgggcgccggacgtgataactccagtagattcagcctgaacgggggggcgaatatcgaagccattatagcctcagaaaaagaggtctggaaccgggaaaagctgacactccagaaaagcctcaagcgggctgaagcagaagtgtacaagctgaaagcagagttgagaaacgattcattgcttcaaaccctcagccccgactccgaacacgtgaccctgaagaggatctacggtaagtacctaagagccgaaagctttagaaaagccctgatctatcagaagaagtatctcttgctgctgcttgggggattccaagaatgcgaagacgcaacactcgcacttctcgctcgcatgggtgggcagccggccttcactgacctcgaggtgattacaaatcggcctaaaggctttactcggtttcgcagcgcagtaagggtcagcatcgccattagccgaatgaagttcctagtcagaaggtggcatagagtgactggctcagtttcaatcaatatcaaccgcgacggtttcggactgaaccagggggcagagaagaccgatagcttctatcactcttccggggggcttgagctgtatggcgagccgcgtcacactacttacagaagccgatccgaccttgactatatcagatctcccctccctttccagaatagatacccagggacacccgcggactttaatcccggcagcctggcctgcagccaacttcagaactatgaccctgaccgtgcactgactgactatatcacacggctcgaggcgctgcagagacggttgggcactatacagagcggctctacgacccagtttcacgctggaatgcgacgttag

SEQ ID NO: 177458 - DNA, 4932 bp, synthetic construct
  misc_feature 1..4932: note = Description of Artificial Sequence: Synthetic coding sequence
  source 1..4932: mol_type = other DNA
atggaggacgaggagcggcagaagaagctggaggccggcaaggccaagattgaggaacttagcctggcattcctggtacgtcagcttgctcagttcaggcagagaaaagcccagagcgatggccagtccccatccaagaagcagaagaaaaagcgaaagaccagttcttccaagcatgatgtctcagcacaccatgaccttaacatcgatcagtcccagtgtaatgaaatgtacatcaatagctcacagagagtcgaaagcactgtgattcccgagagtactatcatgcggacccttcacagtggcgaaataacttcgcacgagcaggggttttccgtggaacttgagtcagagatcagtacgacagcagatgactgtagttccgaagtcaacggctgtagtttcgtgatgcgtaccggcaaacccacaaatttactgcgggaggaagaattcggtgtggatgacagctactctgagcagggagctcaggactcacccacccacctcgagatgatggagtccgaactggccggcaaacagcacgaaatcgaggaactgaatcgagagctcgaagagatgagggtgacttacggtactgagggccttcagcaactccaggagtttgaggcagccatcaaacaacgggacggaataatcacccagttgaccgcaaacctccagcaggcccgtagagagaaagacgagacaatgagggagttcctggagctgaccgagcaaagtcagaagctgcagatccagttccagcagctacaggcatcagagacccttcgcaatagcactcattcgtctacagccgctgaccttcttcaggcgaagcagcagattttaacccaccagcagcaactggaggagcaggaccatctgctcgaggactaccagaaaaaaaaggaagactttacgatgcagatttcttttcttcaggagaagattaaagtgtatgagatggaacaggacaagaaagtggagaactctaataaggaggagattcaggaaaaggagacaattatcgaggagcttaacaccaagattatcgaagaagagaaaaagaccttagagctgaaagacaagctcacaactgcggataaattgttaggcgagttacaagagcaaatagtgcagaagaaccaggagattaagaacatgaagctcgaactcactaattccaagcagaaagagaggcagagcagtgaagagataaagcaactcatgggtaccgttgaagagttgcagaagcgcaaccataaagactcccaattcgagacagacatcgtgcagaggatggaacaggagacacagaggaagttagagcagctgagagctgagctggatgagatgtacggccagcagatcgtgcagatgaaacaggagctaatacgccagcatatggcccagatggaggagatgaagactcgccacaagggcgaaatggagaatgccctgagatcatacagcaacattactgtcaatgaggatcagatcaaactgatgaacgtggccattaacgagttgaacattaagctacaggataccaatagtcagaaggaaaagctgaaggaggagctaggcctgatattggaagaaaaatgtgcgttgcaacggcagttggaagatcttgtggaagaattgtctttttcaagagagcagatccagagggctaggcagactatagctgaacaagaaagtaagctgaatgaagcacacaaaagcctgtccaccgtagaggatctgaaagccgagattgtgagtgctagcgagtctcgaaaggaactcgagcttaagcatgaagcagaggtgacgaactataagatcaagctggaaatgttagagaaagaaaaaaacgcggtcctcgaccgtatggctgagtcccaggaagccgagctggagcgcttaaggacacaattgctgttttcccacgaggaggagctgagcaaactgaaggaggacttagagattgagcacagaataaatatcgaaaagttaaaagataatctgggtatccattataaacaacagattgatgggctgcagaatgaaatgagccagaagatcgagacgatgcagtttgagaaagataacctgataactaagcagaatcaactcattctggagatctcaaagctgaaggacctccagcagagtctggtgaactctaagtccgaggagatgacccttcagattaacgaattgcaaaaggagatcgagatcctgcgccaggaggaaaaggagaaaggaactctggaacaggaggtgcaggagctgcagctcaagacggaactgctcgagaaacagatgaaagagaaagaaaacgacttacaggagaagttcgcccagcttgaggctgaaaattccattttgaaggatgagaagaaaactttggaggacatgctgaagattcatacaccagtttcacaagaagagcggttaatcttcctggactccataaagagcaagtcaaaagactccgtttgggaaaaagaaatcgaaatactcatagaggaaaatgaggacctcaagcaacagtgtatacaactgaatgaggaaatcgagaaacagcgtaatacattctcatttgctgagaagaacttcgaagttaactaccaggagctgcaagaggagtatgcctgtctcttaaaggtaaaggacgatttagaggactctaagaacaaacaggagcttgaatataaatcaaagctgaaagcactgaacgaggaactgcacctgcagaggatcaaccctaccacagttaagatgaagagcagcgtgtttgatgaagataagaccttcgtcgcagaaacactcgaaatgggagaagtcgtggagaaggacaccaccgaactgatggagaaactggaggtaaccaaacgtgaaaaactggagctttctcaacgtctgtccgacttgtccgagcagctgaagcagaagcacggggagatatcctttctaaatgaggaagttaagtcgctgaagcaggagaaagagcaggttagtctgaggtgtagggagcttgaaatcattattaaccacaatcgagccgagaacgtgcaatcctgcgacactcaggtatcaagcttgctcgatggagtcgtgacaatgactagccgaggcgctgaaggctctgtgagcaaggttaataaatcgtttggagaggagagcaagatcatggtggaagataaggtgagctttgaaaatatgaccgtgggagaggagagcaaacaggagcagctgattctggatcatctcccatccgtaacaaaggaatcttcactgagagccacccaaccctccgagaacgataagctgcagaaagaactcaacgtgttaaagagcgagcagaacgacttgagactgcaaatggaagcccagaggatctgcctatctctggtttactcgacacatgttgaccaggtaagagaatacatggaaaacgagaaggacaaagcgctgtgttctctgaaagaggagctgatctttgcccaggaagaaaagattaaggaactgcagaagatccaccagctggagctccaaacaatgaaaacccaggaaaccggtgatgaaggaaagcccctgcacctgctgatcggtaaattacagaaggccgtaagcgaggagtgctcttattttctccagacactgtgttcggttctaggcgaatattatacccctgctctaaaatgtgaagtcaatgccgaagataaagaaaattccggtgactacatcagcgagaacgaagaccccgagctccaggattaccggtacgaggtacaagatttccaggagaatatgcatacactcctgaacaaggtgacagaggagtacaataagctcctagtcctgcagaccaggctcagcaaaatttgggggcagcagacagacggaatgaagctggaattcggcgaagagaatcttccgaaagaggagactgagttcctatctatccactcccagatgaccaacctagaagacatcgacgtaaatcacaaatctaagcttagctcactgcaggatctggagaaaactaagctggaggaacaggtacaggaactggaaagtctcatatccagtctgcagcaacagcttaaggaaactgagcagaactacgaggctgaaatccattgcctgcagaagcgcctgcaggccgtgagcgaaagtaccgtgccccccagtctccccgtggacagtgtcgttatcacagagtcagacgcacagagaacaatgtaccccggcagttgcgtgaagaagaacatagacggtacgatcgagttttccggtgaatttggagtgaaggaggagacaaatatcgtgaaattgcttgaaaagcagtatcaggaacagttagaagaagaggtcgccaaggtaatagtatccatgagcattgcttttgctcagcagacagagctgtcacggatttcaggaggaaaggaaaataccgcttcaagtaagcaggctcatgccgtgtgccagcaggaacagcactacttcaatgagatgaaactctcccaagatcagattggtttccagaccttcgagacagttgatgtcaaattcaaggaggagttcaagccgctctcaaaggagcttggcgaacacggcaaggagatcctgttatcaaatagcgatccgcacgacatcccagagagcaaggattgcgtactgaccatttctgaagaaatgttttccaaagacaagaccttcatagtgagacagagtatccacgatgagattagcgtgtcatctatggacgctagtaggcagctcatgctgaacgaggaacagcttgaggacatgagacaggagttagtgcggcagtatcaggagcatcagcaggccactgagcttctacgccaggctcacatgcgccagatggagcggcagcgggaagatcaggaacagttgcaagttcgagtgctgtag

SEQ ID NO: 177459 - DNA, 11631 bp, synthetic construct
  misc_feature 1..11631: note = Description of Artificial Sequence: Synthetic coding sequence
  source 1..11631: mol_type = other DNA
atggaggacgaggagcggcagaagaagctggaggccggcaaggccaagatcgaggagttaagcttggcattccttgtgagacaactggcccagttccggcagcgaaaggcacagagtgacggacagtccccaagcaaaaaacaaaaaaagaagaggaagacgtcttctagtaaacacgacgtctctgctcaccacgatctgaacatcgatcagtctcagtgtaacgagatgtacattaacagctcgcagcgcgtcgagtcgactgtgattcctgagagcacaattatgcgcactctgcattccggcgaaatcacctcgcatgagcaagggttttctgtggaattggaatccgagatttccactacggcggatgattgctccagcgaggtcaatggctgttcttttgtgatgcgcacaggaaaaccgaccaacttactccgggaagaagagttcggtgtggacgacagttattcagaacagggtgcacaggactcacccactcatctggaaatgatggagagcgagctcgctgggaagcagcatgaaatcgaagaactaaatcgagagctcgaggagatgagggtaacatacgggacggaagggctgcagcagctgcaggaattcgaggccgctatcaagcaacgtgatggcatcatcacccagctgaccgccaacctgcaacaggctcggcgcgaaaaggacgagacaatgcgggagttcttggagctaacggagcagagccaaaaactgcagatacagttccagcagcttcaggcctccgagacgcttcgaaactccactcattcgagcacagcagccgacctgctccaggctaagcagcagatcctgacccatcagcaacagcttgaggagcaggaccatcttctggaggattaccagaaaaaaaaggaggatttcacgatgcaaatttctttccttcaggagaagatcaaggtgtacgaaatggaacaggataagaaggttgaaaacagtaacaaggaagaaattcaagagaaagagaccataatagaagagcttaacaccaagatcatcgaagaggagaagaagactcttgaactcaaggataagctgaccactgccgacaagctgcttggggagctgcaagaacagatcgtgcagaaaaaccaggagattaagaatatgaaactcgagctgacaaattcaaaacaaaaggagaggcaatcctccgaggagattaaacagctgatgggcaccgtcgaggagctccagaagcgaaaccacaaagacagtcagttcgagactgatatcgttcagcggatggaacaagagacacaacggaagctcgagcaactgcgagctgagttggacgagatgtatggtcagcagatagttcagatgaagcaggaattaatccgtcaacatatggcgcagatggaagagatgaagacaagacacaaaggcgagatggagaatgcgctgaggtcttacagcaacataaccgttaatgaagatcagataaaattaatgaacgtcgccattaatgagctgaacataaagctccaggataccaacagtcaaaaagagaagctgaaggaggagctcgggctaatcctggaggagaaatgcgcgctccagagacaactcgaggatctggtagaggaattgtcattcagccgggaacagattcagagggcccgccagacaattgctgaacaggaatctaagttaaacgaggcacacaagtctctgagcacagttgaggatcttaaggcggagatagtctctgcctctgaatcccgaaaagagttggagttgaaacacgaggccgaggtgaccaattacaaaatcaaactcgagatgttggaaaaagagaagaacgccgtgttggaccgcatggctgaatcccaggaagcagagttagaaaggttaagaactcagctcctgttctctcatgaggaggagttgtccaagttaaaggaagacctggagatagaacaccggatcaacatcgagaagctgaaagataatctcggcattcactataaacaacagatcgatgggctgcagaacgaaatgagtcagaaaattgagactatgcagttcgaaaaagacaacttgattaccaagcagaatcagctcatccttgaaatatctaaattaaaagacctccagcaatctttggtaaacagcaagtcagaagaaatgaccctgcagatcaacgagctgcaaaaagaaattgaaatactgcgccaggaagagaaagagaagggcacactggagcaggaagttcaggagcttcagctgaaaactgagctgctcgaaaaacaaatgaaggaaaaggaaaacgacttgcaagagaaattcgcacagctagaggcagagaacagtattctgaaagacgagaagaaaacactggaggacatgcttaaaattcacacgcctgtctctcaggaggagaggctgattttcctagatagcatcaagtccaagagcaaggattccgtgtgggagaaggagattgaaatccttattgaagaaaacgaggacctgaaacaacagtgtatacagctgaacgaggagattgagaaacagcgaaacactttctctttcgccgagaaaaactttgaagtgaactaccaggagctccaggaggagtacgcctgcctcttaaaggtgaaggacgatcttgaagacagcaagaataagcaggaactcgaatacaagagtaaactaaaggccctgaatgaggagctgcacctccagagaatcaatcctacgacggtgaaaatgaaaagctccgtgttcgacgaagataagaccttcgtggccgagacgctggaaatgggtgaggtggtagaaaaggacaccacagaactgatggagaagctggaggtcacaaagagagagaaactggagctatcacagagattaagcgatctctctgaacagctgaagcaaaagcacggagagatttcctttctcaacgaggaagtaaagagcttgaaacaagaaaaggagcaagtctcactccggtgtagggagctggaaatcattatcaatcataatcgggctgagaacgtacagagttgcgacacacaggtaagctcactactcgatggagtcgtcaccatgacatctaggggggcggaggggtccgtttccaaggtgaataagagcttcggggaggagagtaagattatggtggaagataaggtctcgtttgaaaacatgactgtaggggaggaatctaaacaagaacagctgatcctggatcatctcccttctgtgacgaaagaaagcagtcttagagccactcagccctccgaaaatgacaaactgcagaaggagctcaacgtcctgaaaagcgagcaaaacgatctgaggctccaaatggaggctcaaaggatatgcctgtccttggtgtatagtactcacgtagaccaggtgagagaatacatggaaaatgagaaagacaaagctctatgtagtctgaaggaggagctgatcttcgcccaagaagaaaagattaaagagctgcagaagatccaccagttggagctgcagaccatgaagacacaggaaacgggagatgaaggcaagccacttcatctgctaattggcaaactgcagaaagctgtgtccgaggaatgcagctactttttgcagaccttgtgtagcgtactgggtgagtactatactccagctttaaagtgcgaagtgaacgccgaagataaagagaacagcggcgactacattagcgagaatgaggatcccgaactgcaggattatcggtatgaggtacaagattttcaggagaacatgcacacactcttgaacaaggtaacagaggagtataataagctcctggtgctgcaaaccagactctctaagatctggggccaacagacagatgggatgaaacttgaattcggcgaggagaatctgcccaaagaggaaacagaatttctgtcaattcacagccagatgacaaacctcgaagacattgacgtcaaccataaaagcaaactctcgtctctccaagaccttgaaaagacgaagctcgaggagcaggtgcaggagctggagtcactaatcagcagccttcagcagcaactgaaggaaactgaacagaattacgaggctgagattcattgccttcagaagcgtctgcaggccgtgtctgaatcaaccgtgcccccatccctgccagtagattcagtggtgatcactgaatctgatgctcagagaaccatgtatcccggctcatgtgtgaagaagaatattgacgggaccatcgagttttccggcgaattcggcgtaaaggaagagacaaatattgtgaaattgctcgagaaacaataccaggaacaactcgaggaagaggtcgccaaagtaatcgtgtctatgagcatcgccttcgcacagcagacagagctgagtcggatctccggcggcaaggaaaacactgcgtcgagtaagcaggcacatgccgtgtgccaacaagagcagcactactttaacgagatgaaactgtctcaggaccagataggatttcaaaccttcgaaactgtagacgtgaagttcaaggaggaatttaagcctctgtctaaagagctgggggaacacggcaaagaaatcttgctctctaacagtgacccacacgacatcccagaatccaaggattgcgtcttgaccattagcgaggagatgttttcaaaggacaagacattcatcgtcagacagtcgattcacgacgaaatcagcgttagttcaatggatgcctctcgccagcttatgttgaacgaagagcagttggaggacatgcggcaggagctggtgcggcagtaccaggaacaccagcaggctacagaattattgcggcaagcccacatgagacagatggaacgccaaagggaggatcaagagcagctgcaggaggagatcaaacggttgaaccggcagctggcacagcggtccagtatcgataatgaaaacctcgtctctgagagagagagggttttgctcgaggagttagaagccctcaagcagttgtccctagctggccgggagaaactctgctgcgagctgcgtaacagtagcactcagactcagaatggtaacgaaaatcagggagaggtcgaagagcagacatttaaagagaaagagctcgacagaaaaccagaggacgttcctccagagattctgagtaatgaacgatacgctctgcagaaagctaacaatagattgctgaaaatcctgttggaagtcgtaaagaccactgcagctgtggaggaaacgatcggccgtcacgtcttgggaatcctggatcgttctagcaagagtcagtctagcgcttctctgatttggcggagcgaggctgaggcctcagtgaagagctgtgttcacgaagagcacacaagagttactgatgagtctatccccagttattccggctcggacatgcctagaaacgatatcaacatgtggagcaaggtcacagaggaaggcactgaactgagccagcgcctggtgagaagcgggtttgccggaacagaaattgaccccgagaatgaggaactgatgttgaatatatcatcacggctgcaggctgcagtggaaaagcttctcgaagccatctcagagactagtagtcagttagagcatgccaaggtgacccagacagagctgatgcgagagtcttttagacagaagcaggaggccacagagtccctgaagtgtcaggaagagctgcgcgaacgcctgcacgaagagtcaagagccagggagcaactggccgttgaactgagtaaagccgaaggagtgattgatgggtacgcagacgaaaaaacattgtttgaacgacagatccaggagaagactgacattattgatagattggaacaggagttactgtgtgctagcaatcgtctccaggagttggaggcggaacagcaacagatacaagaggagagggagctgctgagccgccaaaaagaggcaatgaaagcagaggcaggacccgtggagcaacagctcctgcaggagacggagaaactcatgaaagaaaagctcgaggtccagtgccaggctgagaaggtaagagatgacctgcagaaacaagttaaggcccttgaaattgatgttgaagagcaggtaagcaggttcatcgagcttgagcaggagaaaaataccgaattgatggatctaagacagcagaatcaagccttggagaagcaactcgagaaaatgcgaaaattcctcgacgagcaggccattgacagggagcatgagagagatgtatttcaacaagagatacagaagctggaacagcagctgaaagtagtcccccggtttcagcccatatccgagcatcaaacccgggaagtcgaacagttggcaaatcacttaaaagagaagaccgacaaatgttctgaactcctgctgtcaaaagaacagctgcagcgggacatacaagaacgcaacgaagaaatcgagaaactcgagtttagagtacgtgagctggagcaggcgttgttagtcgaagaccgtaaacactttggcgccgtcgaagccaagcccgagttgagtctggaggtacaactgcaggctgagcgggacgctattgaccggaaagagaaagagattaccaacctggaggagcaattggagcaattccgagaggaactcgagaacaagaacgaggaggtgcagcagctgcacatgcaactcgaaatacagaaaaaggagtcaaccactcgcctgcaagaacttgagcaggagaataagctgtttaaggacgacatggagaagctgggacttgctataaaggagtccgacgcgatgtctacacaggatcagcacgtgctgtttggcaagtttgcgcagatcatccaggaaaaggaagtggaaattgaccaacttaacgaacaggtgactaaactgcagcagcagcttaagataaccactgataataaggttatcgaggagaagaatgaacttatacgggacctcgagacgcagatcgaatgtctcatgtctgatcaagagtgcgttaaacgcaatcgcgaggaagagatcgagcaactgaatgaggttatagagaagctgcagcaggagctcgcaaatatagggcagaagacgagcatgaacgcccattccctctccgaagaggctgattcgctcaaacaccagctggacgtcgtgattgccgagaagctcgctttagaacagcaggtggaaacagcaaatgaggaaatgaccttcatgaagaacgtgctgaaggagaccaatttcaaaatgaatcaacttacgcaggagttattttccctaaaacgcgagcgcgagtcagtcgaaaaaatccagtccatccctgaaaatagcgtgaacgtggctatagaccacctgtcaaaagacaagcctgagcttgaagtcgtgttaactgaggacgctttaaagtcgcttgaaaatcagacttatttcaaatctttcgaggagaacgggaaaggatccatcatcaatctggagactcgccttctgcagctggagtcgactgtctctgccaaggacctcgagctgacacaatgttataagcagatcaaagacatgcaagagcagggacaatttgagaccgagatgctacagaagaaaattgttaacctccagaagattgttgaggagaaggtcgctgctgctctcgtgtctcagattcagctggaagccgtacaggaatatgctaaattttgccaagacaatcagaccatctccagtgagccagaaaggacaaatatccaaaacttgaatcagcttagagaggacgaattgggcagtgacatcagtgcgctcactttgaggattagtgagctggagagccaggttgtggagatgcacacctccctcattctggagaaggaacaggtggagatagccgagaagaacgtgctagaaaaagagaagaagttgctcgaactccaaaaattattggagggcaatgagaagaagcagcgggaaaaggagaagaagagaagcccacaggacgtcgaagtgctcaaaacaacgaccgagctttttcattccaatgaggaaagcggatttttcaacgaactcgaggcactgcgtgccgagtctgtcgctacaaaggctgaactagcctcctacaaggaaaaggcagagaagttacaagaggagctgctcgttaaggagacaaatatgaccagcttgcagaaagatctctcacaggtgcgagaccacctggcagaagccaaggaaaagctctccatactcgaaaaagaagatgagaccgaggtgcaggagtctaagaaagcctgcatgtttgagcccctgccaattaaactgtcgaagagcattgcctcccagaccgatggaacactgaagatctcaagttctaatcagaccccccagatcctggttaaaaatgcaggaattcagatcaacctgcagtccgagtgttcgagcgaggaagtgactgaaatcatctcccagtttacagagaagatcgagaaaatgcaggagctgcacgccgcagaaatcctcgacatggagtcgcgacacatctccgaaacagagaccctcaaacgtgagcattacgtcgctgtacagttgcttaaggaggaatgtggaaccctaaaagctgtgattcagtgtttgagatccaaggaaggatcttcgataccagaactggcccactcggacgcttatcagaccagggaaatctgttcctccgacagtggttcagattggggtcaagggatctaccttacacactcacagggattcgatatcgcgtccgaaggcaggggggaggaatccgagtccgctacagacagttttccaaagaagattaaggggctcttacgggcagtacataacgagggaatgcaggtgttgagtctgaccgaatcaccatattccgacggggaggatcacagtatccagcaggtttcggaaccctggctggaagaaaggaaagcctatataaacacaatttccagcctgaaggatctaataacgaaaatgcagctgcagcgcgaagctgaggtgtatgactcctctcagtctcacgagagcttcagcgactggcggggtgagttgcttctcgcactccaacaggtcttccttgaagagcgcagcgttctgctggccgcatttcggactgaactgacagcattgggaaccaccgacgccgttggactgctcaactgtctggaacaacgaatccaggaacagggcgtcgaataccaggcagcaatggagtgcctccagaaagccgatcggcggtcgctcctgtcagaaatccaggctttgcacgcacaaatgaacggccgcaaaattaccctgaaaagggagcaagagtcagagaaaccgtcacaggagctcctagaatacaatattcaacagaagcagtctcagatgttagaaatgcaggtggagctgagctcgatgaaagaccgtgcaactgaactccaggagcagctcagcagcgagaagatggtcgttgcagaattaaaatcagagctggctcagaccaagctggagcttgagactacgcttaaagcacagcacaaacacctgaaggaacttgaagcctttaggctcgaagtgaaggacaaaaccgatgaggtccatctgctgaacgacactctggcctcagagcagaaaaaaagccgcgagttgcagtgggcactcgagaaggaaaaagccaagctgggccggtccgaagagagagataaagaggagctggaagacctcaaattcagtctcgagagccagaagcaaagaaatttgcagctgaacctgcttctagagcaacagaaacagctgctcaacgagagccagcagaaaattgagtcccaaagaatgttatacgacgctcagctgtcagaagaacaaggtcgcaacctggagctccaagttctgcttgagtcagaaaaggtgagaatccgcgagatgagcagtacactcgatcgcgagagagagctgcatgcccagctgcaaagcagcgacggaacgggccaatctagaccgccactccctagtgaggatcttctcaaagagctccagaaacagcttgaggaaaagcatagccggatcgttgaactgctgaacgagaccgaaaagtataaattggacagtctccagactaggcagcagatggaaaaagacaggcaggtccatcggaagacactccagaccgagcaggaggccaacaccgaaggccagaaaaaaatgcatgaactgcaatcaaaggtggaggatctgcagcgtcagctcgaagaaaagagacagcaggtgtataagctagatcttgaggggcagagactccagggaatcatgcaagagttccagaaacaggagctcgaaagagaagagaaacgagaatccagacgcattctgtaccaaaatcttaacgagcctacaacttggagtctgactagcgacagaaccagaaattgggttctgcagcagaagatcgaaggcgagaccaaagagagtaactatgccaaactcatcgagatgaatggaggaggaacaggctgcaatcacgagttagagatgattagacaaaagttacaatgtgtggcctccaagcttcaggtgctgcctcagaaagctagtgagcggttgcagtttgagacagctgacgacgaagactttatctgggttcaggagaacattgatgagatcatcctgcagctccagaagctgactgggcagcagggcgaggagcctagcttggtctcccctagcacttcatgtggctccttgaccgagagacttctcaggcagaatgcggagcttacgggccacatctcccagcttacggaggagaaaaacgatctgagaaacatggtaatgaagctagaggagcagatccgctggtataggcagactggcgccggaagggacaattccagccggttttccctgaatggaggggccaacattgaagctatcattgccagcgagaaggaagtgtggaaccgggagaaactgaccctacagaaatcactgaagcgagcggaggctgaggtttacaagctgaaagcagaactcagaaatgacagcctgctgcagacattgtctcctgattctgaacacgtcacactaaagaggatttacgggaaataccttcgggctgagagtttccgtaaggctctgatttaccagaagaaatatctcctgctgcttttagggggttttcaggagtgtgaagacgcaaccttagccctgttggccaggatgggagggcagcctgctttcactgacctcgaggtcatcacaaacaggccaaagggctttaccagattcagatcagccgtgcgggttagcatagctatcagccggatgaagttcctcgttagaaggtggcatagagtgaccggcagtgtgtctatcaatatcaaccgtgatggctttgggcttaaccagggagcagagaagacagacagtttttatcactcaagcggcgggctcgagttatacggcgagccccgccacaccacatataggagccggagcgacctcgattatatccgttccccgttaccttttcaaaacagataccccggcacccccgctgacttcaaccccggctccctcgcatgcagccaactacagaactatgatccttag

SEQ ID NO: 177460 - DNA, 1782 bp, synthetic construct
  misc_feature 1..1782: note = Description of Artificial Sequence: Synthetic coding sequence
  source 1..1782: mol_type = other DNA
atggccatccagttccggagcctgttccccctggccctgcccggcatgctggctttactaggctggtggtggttcttcagccgcaagaaagggcacgtctctagtcacgacgagcagcaagtggaagctggcgcagtgcaactgcgggcggatcctgcgatcaaggaacccctgccagtcgaggacgtgtgtcccaaggttgtgagcacaccaccttcggttactgagcccccagagaaagagctttccacagtgagcaagctacccgcagagcccccagcactgctgcagactcacccaccctgccgtcgttccgagtctagtggtattctcccaaacaccactgacatgagactgcgcccgggtacaagacgggatgactcgaccaaactcgaattggccttaaccggcggtgaagctaaaagcattccgctagagtgtcctttgtccagcccaaagggcgttcttttttcaagcaagagcgctgaggtctgtaaacaggacagccctttcagtcgggtccctagaaaggtgcagcccggctatccagtggtcccggccgagaaaaggtccagcggcgagcgggctagagaaactgggggcgccgaaggaaccggggatgcggtgctcggcgagaaggtgctggaggaggctctgctgtctcgggagcacgtgctggagctcgagaactcaaagggaccctcacttgcttcgctggaaggcgaagaggacaagggcaagagtagcagcagtcaggtcgtcggcccagttcaggaggaggagtacgtggccgagaagttaccctctaggttcatcgaatcagcccacaccgagctggccaaagacgatgccgcgccggcccctccagtcgctgatgccaaggcccaggacagaggggtggagggcgaattgggcaacgaagagtcactagacagaaacgaggaggggctggatcgcaatgaggagggcctcgaccggaatgaggaatcactggataggaatgaagaaggccttgaccgcaatgaggagatcaaacgagcagccttccagattatcagccaagtgatctctgaggctacggagcaggtactggccaccacggttggaaaggtcgccggaagagtgtgtcaggcaagccagttgcaggggcagaaggaggaatcctgtgtccctgttcaccagaaaacagtgcttggtccagatacggctgagccagctaccgccgaggccgctgtcgccccacccgacgcgggtctgcctcttcctgggcttcctgccgaggggagtcctccaccaaagacatatgtgagctgtctgaaatccctgctcagtagcccgactaaggattctaagccaaatatctctgctcatcatatcagtctggcgtcctgcttggcactgacgacgcctagtgaagagttgcccgacagagcgggtattttggttgaggacgccacctgtgtgacttgcatgtccgactcctctcagagcgtgccactggttgccagtcccggccactgctccgacagcttttcaaccagcggccttgaagatagctgtaccgaaacatcctcctcccctcgggataaagctataacacctccattgccagagtccacagttcccttctcaaatggagtccttaaaggcgagctgagcgaccttggtgcagaggacgggtggacaatggacgccgaagccgaccatagtggtgtggcggccccccccccgggtaagcgtggtacgctgattacacgttgccccgggttcttcgagtgctag

SEQ ID NO: 177461 - DNA, 2712 bp, synthetic construct
  misc_feature 1..2712: note = Description of Artificial Sequence: Synthetic coding sequence
  source 1..2712: mol_type = other DNA
atggccatccagttccggagcctgttccccctggccctgcccggcatgctcgctctcctgggctggtggtggttcttctcaagaaagaagggacacgtaagctcacacgatgagcagcaagtagaagccggggccgtgcagctgagagcagatccggctatcaaggaaccactgcctgtggaggacgtgtgtcctaaggtcgtttccacaccaccgtcggttaccgaacctcccgagaaggagctctcgaccgtgagtaaattgcccgccgagccgccagcccttctgcaaacccaccccccctgccggcgatctgaaagctctggcatactacctaataccactgacatgagactgagacctggcacacgtcgtgatgattccactaaactagaactggcacttacagggggggaggccaaaagcattccgctcgaatgcccattgtcaagtccaaagggcgttctcttcagtagtaagagcgcagaggtgtgtaagcaagatagccccttcagcagggtccccaggaaggttcaacccggatatcctgtggtgcctgccgagaagaggagcagtggcgaacgagccagggagaccggcggcgcggaagggacaggggatgccgtgttgggagagaaggtgctggaggaagccctactgtcccgagagcacgtcctggagcttgaaaatagtaaggggccatctctggccagcctggagggggaggaagacaaaggcaagagctcttcaagtcaggtggtggggcccgtgcaggaggaggagtacgtggctgaaaaacttccatcgaggttcattgaatcagcccataccgagctcgccaaagatgacgccgccccggcgccaccagtagctgacgcaaaggcccaggataggggagttgaaggcgaactgggcaatgaagagagcctcgaccggaatgaggagggactggatagaaatgaagagggactagaccgaaacgaggagtccctcgaccgcaatgaggaagggctcgatcgcaatgaagaaattaagcgagccgctttccaaatcatatctcaggtgatctctgaggctactgaacaagtgctagccactacggtgggaaaagtagctggtcgcgtctgccaagcctcacagctgcagggtcaaaaggaggagagctgcgtgcccgtgcaccaaaagactgtgcttggacctgatactgctgagcctgccacggcagaagctgccgttgctcctcccgatgccggcctgccattgccaggtttgccggccgaaggctctccgccacccaagacctacgtcagctgcttaaagtctctcctgtccagtccgaccaaagacagcaagcctaatatttcagctcatcatataagccttgcctcctgtctcgctctgaccacccccagtgaagagctgcctgatagggcagggattctcgtggaagatgccacatgcgtcacatgtatgtcagacagctctcaaagcgtgcctttggtcgcctctcctggacattgctccgacagtttcagcacgtcagggttggaggattcctgcaccgagactagcagctcccctagagataaagccatcaccccccctttgcccgagtcgactgtacctttctccaatggcgtattgaaaggagagttgagtgaccttggtgccgaggacgggtggacaatggacgcggaggcagatcattcgggtggctcagatcgaaattccatggactctgtggacagctgctgctcgctgaagaagaccgaatccttccagaatgctcaggccggctccaaccctaaaaaggtggacctgatcatctgggaaattgaggtcccgaaacatctggtggggcggctgattggcaaacagggtagatatgtttcttttctgaaacaaacctccggcgccaagatctacatatctactctcccttacacccaatcagttcagatttgccatatcgaagggagccagcatcacgtcgacaaagcactcaacctgatcggaaaaaagtttaaggaactgaatttaacgaacatttacgctcccccattgcccagcctcgcgctgccctccctgccaatgaccagttggctaatgctacctgatggcatcactgtagaagtcatcgtcgtaaatcaggtgaacgccggccacctattcgtgcaacaacacactcaccccacttttcacgccctgcggtctcttgaccaacagatgtatctttgttatagccagcctggtatcccaactctaccaactccggtggagatcacagtcatctgcgcagctcctggggccgatggggcctggtggcgggctcaggtggtggcctcttacgaagagaccaatgaggtggaaattagatacgtggactacgggggttataaacgggtgaaggtggatgtgctgcgccagatccgctccgactttgtcacccttccttttcagggtgcagaggtgctgctggatagcgttatgcctctgagtgacgatgatcagttctcacctgaagctgatgccgccatgtccgaaatgacggggaacacagcactgcttgcccaggtgactagctatagcccaacagggttacccttaatccagctgtggagcgtcgtgggcgatgaggtcgtgctgatcaataggtcattggtggagagagggctggcacagtgggtggattcttattacacctcactgtag

SEQ ID NO: 177462 - DNA, 2838 bp, synthetic construct
  misc_feature 1..2838: note = Description of Artificial Sequence: Synthetic coding sequence
  source 1..2838: mol_type = other DNA
atgggcgccctgggcgtgagcggcagcagcagccccggcggctgcccagggtggagacgactacctgcagctgtcaataccaaccctgtggacttcgctcctggcgtaatcacacaggcttcacggatggcgatccagtttagaagcctgttccccctcgccctgcctggtatgctcgcccttctgggatggtggtggttttttagtcgcaaaaagggacacgttagcagtcatgatgagcagcaagtggaggcaggagccgtccaactaagagcagatcctgctataaaagagcccctgcctgtggaagatgtctgccccaaagtggtctcaaccccccccagcgtcacggaaccccctgaaaaagagctttctactgtaagcaagctgcctgctgaaccccccgctcttctgcagacccaccctccttgccgacgctcagagagctccgggatcttacctaacactacggatatgcgcttacggcctggaactcggagagatgatagcacaaaattggaattggctctcacaggaggcgaagctaagtcaattcctcttgagtgccctctgtcatctcccaaaggggttctgttcagttccaagagcgctgaggtgtgcaagcaggacagcccgttctctcgggtccccagaaaggtgcaacctgggtacccagtcgtccccgcggagaaacggtcatccggggagagggctcgagaaactggaggcgcagaagggacaggagacgctgtgctgggcgaaaaagtactagaggaggccctgctgtcccgcgaacacgtcttggagctcgaaaatagtaaggggccttccctggcaagcctggaaggggaagaggacaaggggaaatcgtcgtcctcccaggtcgtgggaccagtccaggaggaggagtacgtagctgaaaaactgccctcccggttcattgaaagcgcgcacaccgaactagctaaggatgatgctgcccctgctccaccagtggcggacgccaaagcccaagataggggggttgagggagagctggggaacgaggagtcgctcgacaggaatgaggaaggcctagaccgaaatgaggaggggttggatcgcaacgaagagtctctcgatcggaatgaagaaggactcgacaggaacgaagagatcaaacgggcggcattccagattatttcgcaggtcatatccgaggccaccgaacaggtcctggcgactacagtgggtaaagtggccggccgcgtttgccaggcaagtcagttacagggacagaaagaagagtcctgtgtgcctgttcatcagaagacagtattgggccctgacactgcggaacccgctaccgcagaggctgcggtagccccaccagatgccgggctcccattgcccgggttaccggccgaaggctcccctccacccaagacatacgtcagctgtttaaagtccctgctgagttcccccacaaaggattccaagccaaatatctctgcccaccacatctctctggccagctgtctggcactaactaccccttcggaagaactgcccgaccgcgctggcattctggttgaggacgccacatgcgtgacgtgtatgtcggactctagccaaagcgtgccactcgtagcctctcccggacattgctcggattcctttagcactagcggacttgaggacagctgtactgaaacaagctccagccccagagataaagcaattacaccacctctcccagaaagtacagtcccattttcgaacggcgtgttaaagggggagctgtccgatctgggcgccgaggacggctggaccatggacgctgaggctgaccacagtggggggtctgatagaaatagcatggacagcgtcgattcatgttgttcccttaaaaagacggagtcctttcaaaatgctcaggctggaagtaaccccaaaaaagtggatctgattatatgggaaatagaagtgcccaaacaccttgtcggaaggcttattggcaagcagggacgatatgtgtcttttctcaagcaaacatcaggggccaagatttacatctccacactgccttatacacagtcagtccagatttgtcacattgagggctcgcagcaccatgttgataaggctctgaatctaataggtaaaaagtttaaggagttaaacctcactaacatttatgcccctccactgccctcccttgccctgcctagtttacccatgacatcttggctgatgctacccgacgggattactgttgaggttatcgtagttaaccaagtaaacgcgggccatcttttcgtacagcagcacacccaccctactttccacgcactgcggtccctggatcaacaaatgtacctctgctacagccaacccggtatcccaaccctgcctacacctgtcgaaataacggtaatttgcgctgcacctggagccgacggcgcgtggtggcgcgctcaggtagtggctagctatgaggaaacaaacgaagttgagatcagatacgtcgactatggggggtacaaacgcgtcaaggtggatgtgttaaggcaaatccgcagcgattttgtgaccctcccctttcagggtgcagaggtactgctggattctgttatgcccctctcagacgacgaccagttctcacctgaagcagacgcggccatgtctgaaatgactggtaacaccgccctcctggcccaggttacctcatactcccctacgggcctgccattgattcagctctggtcagttgtgggtgatgaagttgttctcattaatcgctctcttgtcgagagggggttagctcagtgggtggacagttattacacctccctatag

SEQ ID NO: 177463 - DNA, 2712 bp, synthetic construct
  misc_feature 1..2712: note = Description of Artificial Sequence: Synthetic coding sequence
  source 1..2712: mol_type = other DNA
atggccatccagttccggagcctgttccccctggccctgcccggcatgctcgcgcttctgggatggtggtggtttttctcccggaagaaaggacacgtgagttctcatgacgagcagcaggtcgaggccggcgccgtccagcttcgggcagatccagctatcaaggagcctttgcctgtggaggacgtgtgcccaaaggttgtcagtactccaccttctgtgactgagcccccggagaaggagctgagtaccgtgtccaagctgcccgcagagcccccagctctattgcaaactcaccccccatgccgacgctcagagtccagcggcatactgccgaataccacagatatgcgccttagaccagggaccaggagagatgattctacaaaattagagctcgctttgaccggcggcgaggcaaaaagtatcccacttgagtgccccttgtcgtctcctaaaggcgtcctgttcagtagtaagtctgccgaggtgtgtaaacaagatagcccctttagtcgagtcccacggaaagtgcagccaggataccccgtcgtcccggctgagaagagatcatctggagaaagggctcgggaaaccggaggcgccgaaggcactggcgacgctgtgcttggtgaaaaagtgctggaggaagccctcctcagcagagagcatgtgctcgagcttgagaactcaaaaggcccttcactggcttcccttgaaggagaggaggacaagggcaagtcatcctcctctcaggtggtgggacccgttcaggaggaggaatacgttgccgagaaattaccaagtagatttattgagtctgcacacactgagctggctaaggatgacgcagcccctgcaccacccgtcgcggacgccaaggcccaagataggggcgtggaaggggagctggggaatgaagaatctttagatcgcaatgaagaaggcctggaccgcaacgaggaaggactggatcggaatgaagagtctctggaccgaaacgaggagggtttagaccggaacgaggaaattaagcgggcagctttccagatcatctcacaggtgatatcagaagccactgaacaggtgttggccactacagtaggcaaagtagccggccgggtgtgccaagcttcacagctgcagggtcaaaaggaggaaagctgtgtcccggtgcatcagaaaacagttctcggacctgacacggcagagcctgctacagccgaagcggccgttgctcctcctgatgctggcctgcccttgcccgggctgcctgctgaaggcagtccaccaccgaagacatatgtctcctgtctgaagtccctcctttcttctcctaccaaggattccaagcctaacattagtgctcatcacatcagtctggcgagctgtcttgccctcactacaccctctgaggagctgcctgaccgcgcaggtatcctcgtagaagatgcgacctgcgtcacttgtatgagcgattcttcccagagcgtgcctctggtggcatcgccaggccactgctccgactctttctcgaccagcggtctcgaggattcatgcacagagaccagctcctcccctagggataaagcaattacgcctccacttccggaatctaccgtcccttttagcaacggtgtgttaaagggcgaactgagcgacttgggcgcagaggacggttggaccatggacgccgaagcagaccactcaggagggagcgatagaaacagtatggacagtgttgacagctgctgttcactgaagaaaactgagtctttccagaacgcccaggcgggaagcaatcctaagaaggtcgacctgatcatatgggaaatcgaggtaccaaagcacttggttggtcggttgattggcaaacagggtcggtatgtgtccttcctcaagcagacctccggtgccaagatatatattagcacactgccctatacacagagcgtgcagatctgccacatagaagggagtcagcaccatgtcgacaaagccctcaatctgatcggcaagaagttcaaggagctcaatcttactaatatttatgccccaccacttccgagcctggcactccctagtctgcccatgactagttggttgatgctacctgacggcattacagtcgaggtgatagtggtcaaccaggtgaatgctggacacctgtttgtgcagcagcatactcatcctactttccacgctctgcggtctttagatcagcagatgtatctctgctattctcaacccggcattccgacactccccacgcccgtggagatcacagtgatttgtgcggctcccggcgccgacggagcctggtggcgggcacaggttgtggctagctatgaggagactaacgaagtagagataaggtacgtcgattacggtggatacaagcgagttaaggttgacgtgttacggcaaatacgctctgattttgtaacgctgccatttcagggggctgaggtgttgctggactccgtcatgccgctctctgacgatgaccagttctctcccgaggcggatgcagccatgtctgaaatgacaggaaacacagccctcttggcccaggtcaccagctactcacctacagggttacccctgattcaactatggtctgtggtcggggacgaagtggtcctcatcaaccggagccttgtggaaagaggactagctcagtgggtggacagctactatacatcactgtag

SEQ ID NO: 177464 - DNA, 1095 bp, synthetic construct
  misc_feature 1..1095: note = Description of Artificial Sequence: Synthetic coding sequence
  source 1..1095: mol_type = other DNA
atgggcatcctggagaagatcagcgagatcgagaaggagatcgcccgcacccagaagaataaggctacggagtaccatctggggctcctgaaagctaaactagctaagtaccgcgcacaactgttggagccctccaaaagcgctagttcgaagggtgaggggtttgacgtcatgaagagcggcgacgcgagggtcgctctgattggctttccatcggtgggcaaaagtacatttctgtctctcatgaccagtaccgccagtgaagccgcttcctacgagttcaccaccttgacctgcatccccggcgtgatcgagtacaagggggcaaatatccagttattagatctgccgggcatcattgagggggccgcacaagggaaaggcaggggcagacaggtgattgctgtggccaggacagcagatgtcatcattatgatgctggacgcaacaaaaggagaagtgcagcgttcactcctggaaaaggaacttgagagcgtcggtatcagactgaataaacacaaaccaaatatctacttcaaaccaaaaaagggtggagggatctcatttaactccacagttacactgactcagtgcagtgagaagctcgtgcaactgattctgcatgagtacaaaatattcaatgccgaggtgcttttcagagaggactgcagccccgacgagtttattgacgtcatagtcggcaatagggtctacatgccttgcctatacgtttataacaaaatagatcaaatcagcatggaagaggtcgatcgactggcacgtaagcccaacagtgttgtgatttcttgcggcatgaaattgaatttggactacttactggaaatgttgtgggaatacctggcattaacatgtatctataccaagaagcgtggccagcggcctgactttacagacgctatcatccttaggaagggagcgtccgtcgaacatgtctgccacaggattcaccgcagcctggcatcccagtttaagtacgccctggtatggggaacctccacgaagtattctccacagcgggtcggcttgacacataccatggaacatgaggacgtaatccagatagtgaaaaagtag

SEQ ID NO: 177465 - DNA, 1815 bp, synthetic construct
  misc_feature 1..1815: note = Description of Artificial Sequence: Synthetic coding sequence
  source 1..1815: mol_type = other DNA
atgcggggcgccggccccagcccccggcagagcccccggaccctgcgccctgaccctggccccgctatgagtttttttcgacggaaggtaaagggcaaggaacaggaaaagacgagtgacgttaaatccataaaagcttccataagcgtccatagcccacagaaatctaccaagaatcacgcattgctagaggccgctggtcccagtcacgttgcgattaatgctatatccgctaatatggactctttcagttccagtcgtacggcgaccttgaagaaacagccaagtcacatggaggccgctcatttcggcgatctgggcaggtcgtgtctagattatcagacacaagaaactaaatcgtctctctctaagaccctcgaacaagtcctgcacgacactattgtgttaccctacttcatccaatttatggagctgaggcgaatggagcatctcgtaaaattctggttagaggcggaatccttccattccaccacctggtctaggatacgggcgcacagtttaaatacagtgaagcaatccagtcttgctgaacccgtcagcccatcaaaaaagcacgaaaccacagccagtttcctgacagacagcctggacaagaggctggaagactctggctccgcccagctgtttatgacgcactccgagggcatagacctgaacaacaggactaatagtacacaaaaccatctattgctgtcccaagagtgcgattccgctcattcattgcggctggaaatggccagggcgggcacgcaccaggtgagcatggagacccaggagagcagctcaaccctcacagtcgccagccgtaacagtcctgcaagcccacttaaggagctgagtggcaagctgatgaagagtatagagcaggatgccgtcaataccttcacgaagtacatcagccccgatgcggcaaagcccatccccatcacggaggcgatgcgtaatgacattatagcccgcatttgcggagaggatggccaggtggatcctaactgcttcgtacttgcgcagtccattgtgtttagcgccatggaacaggagcattttagcgagttcctgcggagccaccacttttgtaagtatcaaatcgaagtcctgacctccggaactgtttatctggcagatattctgttctgcgagtccgccctgttctacttctcagagtatatggagaaagaagacgccgtgaacattctgcagttttggttggccgcagacaattttcagtcacaactcgcggccaagaaaggacaatacgatggtcaggaagcgcagaatgatgcgatgatcttgtacgataaatattttagcctccaagccactcatccattaggttttgacgatgttgtgaggttggagatagagtcaaacatttgtcgcgaaggcgggccgttaccaaattgttttaccaccccattaagacaagcttggacaaccatggaaaaatcaagcgtgaaaaaagcctcaattaaaatactcaagaattttgacgaagcaatcatcgtcgacgcagcctcacttgacccagagtcactgtatcaacgtacatacgccggcaaaatgacgttcgggcgtgtcagcgacttgggccagttcattcgagagtccgagcccgagccggatgtcaggaagtcgaagggttccatgttttctcaggctatgaaaaaatgggtgcaggggaatacagacgaggcccaggaagaactggcatggaagattgcaaaaatgattgtgagcgacatcatgcagcaggcgcagtatgaccagccactggaaaaatctaccaaggtatag

SEQ ID NO: 177466 - DNA, 8454 bp, synthetic construct
  misc_feature 1..8454: note = Description of Artificial Sequence: Synthetic coding sequence
  source 1..8454: mol_type = other DNA
atgaagctgaacccccagcaggcccccctgtacggcgactgcgtggtgaccgtcttactcgctgaggaagataaggctgaggacgatgtggttttctatctcgtgtttctgggaagcacgttgagacactgcacatctactcgaaaggtcagctctgatactttggagactatcgcccctggacacgactgctgcgagacagtcaaagtccagctctgcgcctctaaagaaggactgcctgtgttcgtcgtcgccgaagaggatttccatttcgtacaggacgaagcatatgacgcggcgcagtttctggcgaccagcgccggaaatcagcaggccctgaattttactcggttcctggatcagagtgggcctccgtccggggatgttaattccctggacaagaaattggtgctggccttcaggcaccttaagcttccgactgagtggaatgtgctgggtactgatcagtccctgcacgatgcgggaccacgggagaccttaatgcattttgcggtgaggctgggtttgctccgcctgacatggttcctgctgcagaaaccaggggggcgcggggcactctctattcacaaccaggagggggcgacaccagtttcactggccctggaaagaggataccacaagctgcaccagctccttacggaggagaacgcaggcgaacctgatagttggagcagcctctcttatgaaattccatatggtgattgctctgtgcgtcaccatcgggaactggacatctatactctgacaagcgaatcagatagccaccatgaacatcctttccccggcgatggatgtactgggccgatctttaaacttatgaacatccaacagcagttgatgaaaaccaacctgaagcaaatggattctttgatgccccttatgatgacagcccaggacccatcttcagcccccgaaaccgatgggcaatttctcccctgcgccccagagcctaccgatccacagcgcctgtcaagcagcgaagagacagagagcacgcagtgttgcccaggctcacccgtcgcccagacagagagcccttgcgatctgtcttcaatcgtcgaggaagaaaacactgatcgatcttgcaggaagaagaacaagggagtggaacgcaaaggagaggaagtggaacccgccccaattgtggacagcgggactgtaagcgatcaggactcatgtcttcaatctctgcctgactgcggagttaaggggacagaaggtttgtcaagttgtggcaaccggaacgaagagaccggcacaaaatcgtcggggatgcctactgatcaggagagcctgtcaagcggcgacgcggtgttacagcgggatttggtaatggagccgggcaccgctcaatatagctctggaggcgagcttggaggtatcagtaccacaaacgtgtccacccctgacaccgccggcgagatggaacatggcttaatgaatcccgacgctacagtttggaaaaatgttcttcaggggggagagagcaccaaagagcgatttgaaaacagcaatattgggaccgcaggagccagcgatgttcacgtgacatcaaaacccgtggataaaattagcgtgcccaattgtgcccccgccgcctcttcgctggacggaaacaaaccagccgaaagcagtttggctttctcaaacgaggaaacgtctaccgagaagactgcagagactgagacttcacgtagcagagaggaaagcgccgacgctccggtcgatcagaacagcgttgtgatcccagcagctgctaaagacaagatttctgatgggctggagccctatacattgttggccgctggtattggagaagcgatgagcccaagcgatttggccctgctcggcctggaagaagatgtcatgcctcaccagaattccgaaacgaactcgtcccacgctcagagccagaaaggcaagtcgtctccaatctgctctacgacaggtgatgataaactttgcgcagactccgcatgccagcaaaatacagtgaccagttcaggagatctcgtggcgaaactctgcgataatatagtgtctgaatctgagagtactactgcccgccaacccagctcacaggatccgcccgatgcaagccattgtgaagacccccaggcccacactgtgacatcggatcctgtaagagacactcaggagcgcgcagacttctgcccctttaaagtcgtggataacaaggggcaacgtaaggacgtgaagctggacaagccactcactaacatgcttgaggtcgtgagccatccgcaccccgtagtaccaaaaatggagaaagagctagtacctgatcaggctgtgatcagtgattctactttttccctggcaaacagcccaggcagtgaatcagttaccaaggacgacgcactttcctttgtgccctcacagaaggagaagggaacagccacacccgagctccataccgcaacagactacagggacgggcctgacgggaattctaatgagccagatacacggccactggaggatcgagccgtcggattgtcaacatccagcacagccgccgaactgcagcatggcatgggaaatacttcgcttactgggctcggaggcgagcacgagggaccggcgccccctgccatcccagaggccctcaacatcaaagggaatacagactccagcttacagagcgtgggtaaagctactctagctctagattcggtgctgacagaggaaggtaagctgctggtggtgtctgaatcatctgcggcccaggagcaggataaagacaaggctgtgacttgctccagtatcaaagagaacgccctttcttcaggcaccttgcaggaagagcagcgcacgcctcccccgggccaggacacccagcagttccacgagaaatctatcagtgctgactgcgccaaggataaggccctccagctatcaaacagcccaggagcctcttcggcctttttaaaagccgaaaccgaacacaataaggaggtggctcctcaagtttcactcttgactcaggggggagccgctcaaagcttggtgccacccggtgccagcctggccacagaatcccggcaagaggccctgggggccgaacacaattctagcgcgctccttccatgcctgttgcccgatggtagcgatggttcagacgccttgaattgctcgcagccttctcctctcgacgtcggcgtgaaaaatacacagtcgcagggcaaaaccagcgcctgcgaagtaagtggcgacgtgaccgttgatgtgacaggcgttaatgcgttacagggaatggctgagccacgcagggagaatattagccacaacacccaggatatattgatccctaatgtgctgctgagtcaggaaaagaacgccgtcctcgggctgcccgtagctctgcaggacaaggcggttaccgatccgcagggcgtgggcacacctgaaatgattcccttggattgggagaagggaaaactcgagggagctgaccattcctgcactatgggtgacgcagaggaagcccagatcgatgatgaggctcacccagtcctgctccaaccggttgccaaagagttgcctacagacatggaactttctgcccacgatgatggggctcccgccggggttcgggaagtgatgcgcgcgcccccctctggacgggagcgcagtactccctcccttccgtgtatggtgtcagcccaggacgcgccccttccaaaaggagccgatttaatcgaagaagccgcctcaagaatagtcgacgccgtgattgaacaggtgaaggctgctggtgccctcttgaccgagggagaggcatgtcatatgtccctgtctagtccagagttgggtcccctgaccaagggactcgagtctgcatttacagagaaggtatcaacatttcctccaggcgaaagtttgcccatgggctccacacctgaggaggctaccggctccctcgctggctgtttcgccggccgagaggaaccagagaagatcattttgcctgtccaggggcctgaacctgctgctgagatgcctgacgtgaaggcagaggatgaggttgacttccgggcctcttccatctctgaagaggtcgccgtgggctctatcgctgccactctgaaaatgaagcaaggccccatgacccaagccataaaccgcgaaaactggtgtactatcgaaccttgccccgacgcagcttctcttttggcatccaaacagagtcccgaatgtgagaatttcctggacgtggggcttggccgcgaatgcactagtaaacagggcgtgctcaagcgggaatcagggtcagacagcgacttatttcactcaccctcagatgatatggattccatcatctttcctaaaccagaagaagagcatcttgcctgcgatatcactggatcttcgagctctactgatgacactgcatccttggatagacatagttcccacggtagtgatgtaagcctgagccagattcttaaacctaacaggtctcgggatcgacagtcactggacggattttattcgcacgggatgggagccgagggtagagagtctgaatcagaacccgcggatcccggagacgtcgaggaagaagaaatggattcaatcactgaggtgcccgccaattgctcagtacttagatcctctatgaggtcgttgtccccttttcgccgacactcttgggggcccggaaaaaacgcagccagcgacgcagaaatgaaccataggtcaatgtcatggtgtccatctggcgtgcaatacagcgcagggctgtccgcggacttcaactaccgatcattcagcttggaaggtctgacaggaggtgctggcgtgggcaataagccttctagtagcctggaagtttctagtgcaaacgccgaagagctgagacatcccttcagtggagaggagcgagttgatagtctcgtatctctatcggaagaagacctggagtccgatcaacgcgaacatcgcatgttcgatcagcagatctgtcacagaagcaagcaacagggctttaactattgcacttcagccatttcaagtccattgacaaaatctataagccttatgactattagccatccgggtcttgacaacagtcgcccctttcattcaacatttcacaacactagcgctaacctgacagagtctatcacagaggagaactacaattttctgccacacagcccctcgaagaaggatagtgagtggaagtccggcactaaggtttcaaggaccttttcatacattaaaaacaagatgtcgtcttctaaaaaatcaaaagagaaggaaaaggagaaggataaaatcaaggagaaagaaaaggattcaaaggacaaagaaaaggacaaaaaaaccgttaatggacacacattctctagtattcctgtggtgggccctatcagttgttctcagtgcatgaagccttttaccaataaggatgcctacacttgcgctaactgtagcgcttttgtgcacaagggctgcagggagtctctggcttcttgcgcaaaagtaaagatgaagcagccaaaagggtccctgcaggcgcacgacaccagctccctaccaactgtcataatgcggaacaaaccttcacagcctaaggaacgacctcgctcagccgttctgttggtggacgagaccgccactactccaatattcgcgaatcggagatctcagcagtcggtttcactcagcaagtccgtatcaatccaaaacatcaccggcgtaggcaatgacgaaaacatgagcaacacatggaagttcctttcccattcaaccgattctctgaataagattagtaaagtgaatgaaagtaccgaatcactgacagatgagggggtgggaacagacatgaacgagggtcagctgctgggggactttgaaattgagagcaagcaactcgaggcggaatcatggtccagaatcatcgactccaagttcctcaaacagcagaagaaagatgtcgtaaagcgacaggaagtgatatatgaactgatgcagacagaatttcaccacgtgcgtacactcaaaatcatgtccggagtctatagtcaaggtatgatggctgaccttctgtttgaacagcagatggtggaaaagctttttccttgtctggatgagctgatttcaattcacagccagttctttcagagaatcctcgagcgtaagaaagagtcactggtggacaagtcagagaaaaattttctgatcaagcgtattggggatgtgttagtcaatcagttcagcggagagaacgctgagcggcttaagaaaacgtacggcaagttctgcggacagcataaccagagtgtgaattatttcaaggacctgtacgccaaggataagagattccaggcctttgtgaagaaaaaaatgtccagctccgtggttcgtcgcctcggcattcctgagtgcatcttattggtgacccagagaatcacgaagtacccggtgctttttcagcggatcctgcagtgcacgaaagataatgaggtggagcaggaggacctggctcagagcctgtctttggtgaaagacgttattggggcggtcgattcaaaggttgccagttatgaaaaaaaggtgagattaaatgagatctacacaaagaccgacagtaagagcatcatgaggatgaagtcaggacagatgttcgccaaagaggacctgaagcgcaagaaattggtgcgagacggctccgtgtttctcaaaaatgcagctggccgcctcaaggaggtccaggctgtgctcctcactgacattctcgtcttccttcaggaaaaggaccagaagtacatctttgcgtctctagaccagaaaagcactgtgataagtttgaagaagctgattgtcagggaagtggcgcatgaggaaaaaggcttgtttcttatcagtatgggcatgaccgatccagaaatggttgaggtgcatgcctcgagtaaggaggaaagaaatagctggatacaaatcattcaggataccataaatactctgaatagagatgaagacgaggggatcccttcagagaatgaggaggaaaagaagatgttggatacacgggccagagaactgaaggagcagctgcatcaaaaagatcagaagattctgctgctactggaggaaaaagaaatgatcttcagagatatggcagagtgcagtacccctttaccagaagactgctctccaacacactccccacgggttctgtttcggagcaacaccgaggaggccctgaagggaggccctctgatgaagagcgcaatcaatgaagtcgaaatcctccaagggctggttagtggtaatctcgggggaaccctgggcccgactgtatcatcccctatcgagcaggatgtcgttggtccagtaagcctgccccggcgggccgagaccttcggcggctttgactcccatcagatgaacgctagcaaaggcggcgagaaagaggaaggcgacgacggccaggatttgcggcggaccgaatccgactctgggctgaagaaaggggggaatgccaacttggtgtttatgctgaaacggaatagcgagcaggtcgtccaatctgtagtgcacctgtacgaattgctgtctgccctccagggggtagtcttgcagcaagattcatacatcgaagaccagaaattagtgctgtcggagcgcgccctgacccgcagcctctcacggccctcctcccttattgaacaagaaaaacaaagaagcctggaaaagcagcgccaggacctggctaatctgcagaagcagcaggcccaatacctcgaagaaaaaagaagaagagagcgagaatgggaggctcgtgaacgagaactgagggagcgagaggccctcctggcacagcgcgaggaagaagtacaacaagggcagcaggacttagagaaggagagggaagagctccagcagaagaaagggacttatcagtatgacctcgagagactgcgggcagcacagaagcaacttgagcgagagcaggagcagctccgacgggaagctgagcgcctgtcacagcgccaaaccgaacgggacctatgccaagtgtcccatccacacacaaagctgatgagaattccctccttcttcccttcgcctgaggagcctccaagcccgagtgccccctctatagccaaatctggaagtctcgatagtgaattgagtgtctcgcctaagcgaaattccatcagcaggacccacaaggacaagggccccttccatatcctgtcctcaacgtctcagaccaataaagggcctgaaggccagtcccaggctcccgccagtacaagcgctagcaccagactgttcggtttgacaaaacccaaagagaaaaaagaaaagaagaaaaagaataagacatctcgctcccaacctggagatggtccagcaagcgaggtgagtgctgaaggcgaggagattttctgttag

SEQ ID NO: 177467 - DNA, 3177 bp, synthetic construct
  misc_feature 1..3177: note = Description of Artificial Sequence: Synthetic coding sequence
  source 1..3177: mol_type = other DNA
atgagcagcagcaagaagagcaaggagaaggagaaggagaaggacaagattaaagaaaaggagaaggactctaaagataaagaaaaggacaagaaaactgtaaatggtcacactttttccagcattcccgttgtgggacctatatcctgctctcagtgtatgaaaccttttactaacaaggatgcctacacatgcgcaaactgctctgccttcgtacataagggatgcagagagagcctggcgtcttgtgcaaaggtgaaaatgaagcaaccgaaggggagtctgcaggcccatgacacttccagtctgcccacagttatcatgcgaaacaaaccgagtcagcctaaggagagaccgcgcagcgctgtgttgctggtcgacgaaacagccactacccccattttcgctaatcgaagatctcaacaaagcgtctccttaagcaagtctgtttcaatacagaatataactggtgtagggaacgacgaaaatatgtcgaacacctggaagttcttgagccacagtaccgacagcctgaataaaatctctaaggtcaacgagtcgacagagtctctgacagacgagggcgtgggcacagacatgaacgagggccagttgttaggcgactttgagatcgaatctaagcaattggaagcagagtcctggagccgaattatcgattcgaagttcttgaaacagcagaagaaagatgtggtgaagcggcaggaagtgatttacgagctcatgcagacagagtttcaccacgtgcgaaccctcaaaatcatgagcggggtgtattcacagggaatgatggccgacctgctgtttgaacaacagatggtagaaaaactctttccttgtctggacgagctgatctcaatacacagccagttcttccagaggatcctggagcgtaagaaggagagtttagtggacaaaagcgagaagaatttccttattaaacgaataggagatgtgttggtgaaccagttcagtggtgagaacgctgagcgcctgaaaaaaacatatggtaagttctgcggccagcacaaccagtcagttaactactttaaggacctctacgcaaaggacaagcgcttccaggcatttgttaagaagaaaatgagcagtagtgtagtcaggcgccttgggattcctgagtgtatcctgctagtgacccagcggatcaccaaatatcccgttctgttccagcgcatcctccagtgtaccaaagacaatgaggtcgagcaagaagatcttgcccagtccctttcactcgtgaaggatgtgatcggtgccgtcgatagcaaggtggcgagctacgagaaaaaggtccggctcaacgagatctatacaaagaccgatagtaagtctataatgcggatgaaatcgggacaaatgttcgcgaaggaggatcttaaacggaagaagctcgtcagagatgggtctgtgttcctcaagaatgcagccgggagactaaaggaggtacaggcagtgctgctcaccgacattctggtgttcctgcaggagaaggaccagaaatatatctttgccagcctcgatcagaaatcgaccgtgattagcctgaaaaaattgatcgttcgggaggtggcgcatgaggagaaagggttgttcttaataagtatgggaatgacggaccctgaaatggtggaagtgcacgcatccagcaaggaagagcgaaactcctggatccaaataatccaagacaccattaataccttaaatcgagatgaagatgagggcatcccttctgaaaacgaagaagaaaagaagatgcttgacactagggctagggagctgaaggagcagttgcaccagaaggaccagaaaatactcttactgctcgaggaaaaggaaatgatctttcgcgacatggccgagtgcagcaccccactgcctgaggactgctcgcctactcacagccccagagtgttgtttagatccaatacggaggaagcgcttaaggggggcccgctgatgaagtccgcaattaatgaggtagagatcctgcagggattggtgagcgggaatctggggggcacgctgggacctacggtcagttcgcccatagagcaagacgtcgtgggccccgtgtccctccctaggcgcgcagagacttttggaggattcgactcacaccagatgaacgccagcaagggcggggagaaggaagagggagatgatgggcaagatctcagacgcaccgaaagtgatagcggactgaagaaaggcgggaatgccaatcttgtcttcatgcttaagagaaattcggaacaggtggttcagtctgtggtacatctgtatgagttattgtccgcgctgcaaggtgtggtgttacagcaggacagctatattgaggatcaaaagctggtgctgagcgaacgtgctctaacaagatctctgtcaaggccgagttctctaatcgagcaggagaagcagaggtccttggagaaacagagacaagacctggctaatctgcagaagcaacaggctcagtacttggaggagaagagacgccgggaacgcgaatgggaggccagagagcgtgaattgagagaaagagaggctcttctggcccagagagaggaagaggtgcagcagggtcaacaagacctggagaaggagcgagaggaactacagcaaaaaaagggtacttaccagtacgatctcgaacgcctccgagcagcccagaagcaattagagagggagcaggagcagcttaggcgggaagccgagcgacttagccagcgtcaaacggaaagagacctttgccaagtttcacatccgcacaccaagctgatgagaattccatccttcttcccgagcccagaagaacccccctcaccgagcgccccgtctattgcaaagtcaggaagccttgacagtgaattgtcagtgtcacctaaaagaaattccatctcccgcactcataaggataagggtccatttcacatactgtcatccacaagccaaacgaacaaaggaccggagggccagtcgcaagctcccgcctctacttcagcctctacgcgactgtttggactcactaaaccaaaagaaaagaaggagaagaaaaaaaagaataaaaccagtcgttctcagcccggcgatggccctgcctctgaggtctcagctgaaggggaggagatcttttgctag

SEQ ID NO: 177468 - DNA, 8451 bp, synthetic construct
  misc_feature 1..8451: note = Description of Artificial Sequence: Synthetic coding sequence
  source 1..8451: mol_type = other DNA
aagctgctggagaagcagccccccatcgagggcgactgcgtggtgactgtgctactagctgaagaggacaaggcagaagacgacgtggtgttctacttggtttttctgggcagcactctccggcattgcacgagcacaaggaaagtgtctagcgatacactggaaacaattgctcctgggcacgactgctgtgagacagtaaaggtgcaactgtgtgcaagtaaagaaggcttgcccgtctttgtggtggccgaggaagacttccattttgtgcaggacgaggcttatgacgccgcccaattcctggccacaagcgctgggaatcaacaggccctaaacttcacaaggttccttgaccagtcagggccacctagtggggatgtgaattctctggataaaaaactggtgttggcgtttcggcacctcaagctccccaccgaatggaacgttttaggaactgaccagagcttacacgacgctgggcccagagagaccttgatgcattttgccgttcggctaggcctgctgagactaacttggttcctgttacagaagcctggcggaagaggggcactgtccattcacaaccaagagggtgcaactcccgttagcttggctctagagcgaggataccacaaacttcaccagctgctgaccgaagagaacgctggagagccggattcctggtcatctctgtcctacgagatcccatatggcgactgctctgtgcgccaccaccgagaactggacatttacactttgacgtcagaatctgattctcaccatgaacaccccttccctggagacggttgcacaggcccaatcttcaaattaatgaacatacagcagcagctgatgaagaccaatttgaaacaaatggactccctgatgccactgatgatgacagcccaggacccttcttctgcacctgaaacagatggccagtttttaccctgcgctcctgaaccgacagaccctcaacgtttgagtagctcagaagagactgagtccacacagtgctgtccaggatcgccggtcgcgcagacggagtccccttgcgacctgtccagcatcgtggaggaggagaataccgatcgctcctgccgcaagaagaacaagggagtcgagcggaaaggcgaagaagtcgaacctgccccgatcgtggacagcggcaccgtatcggaccaggactcatgccttcagagcttgcccgactgtggtgtgaaaggcaccgaaggtctctcttcctgcggaaaccggaatgaagagaccggcacaaaaagcagtggtatgccaaccgatcaggaaagtctatcatcgggcgacgccgtgcttcagagggatctggtgatggaacctggtaccgctcagtatagtagtggcggcgagctgggaggaatttctacaacaaatgtatccacgcccgatacagctggggaaatggaacacggcctcatgaatccagacgctacagtgtggaagaatgtactacagggcggcgagtctactaaagaacggttcgaaaacagtaatatcggcaccgctggcgcttcggatgtccacgttacgtcaaagccagttgataagatcagcgtccccaattgcgcccccgcggcttcatctttagacggaaataagcctgcggaatctagcttagcattttctaatgaggagacttctacggagaagaccgcagagacagagacttccagaagcagggaggaatccgccgacgcccctgtggatcaaaactcagtggttatcccagctgccgccaaagacaagatctccgatggcctagagccttacactttgctggctgccggaatcggagaagctatgtctccttcagatctggcactgctagggctagaagaggacgtcatgccgcatcagaattccgaaaccaacagcagccatgcccagagtcagaagggcaaatccagccctatttgttctaccactggagatgataagttatgcgccgattctgcttgtcagcagaataccgtcacctcgtctggggacctggttgcgaaactgtgcgacaatatcgtgtctgagtctgaaagcaccacggcacgccagccttcatcccaggatcccccagacgcctcccactgcgaagacccccaggcccataccgttactagcgatccagtgcgcgacacgcaagaaagggcggacttttgtcctttcaaagtagtggacaacaaaggtcagcgcaaggatgtcaaactggataagcccctcactaatatgcttgaggtggtctcacatccacatccagtggtgccaaagatggagaaggagctggtccccgaccaggccgtcatttccgactcaactttcagtctcgcgaacagccctgggtccgagtccgtcaccaaggatgacgcgctgtctttcgtaccatcccagaaagagaaaggaaccgctaccccagaattacacacagcaactgattacagggatgggcctgacgggaatagtaatgagcctgacacccggccccttgaggacagagcagtgggtctgtctaccagttcaacagccgctgagcttcaacatgggatgggcaacacctccctgacgggactgggcggtgagcacgaggggccagcccctccagccatcccggaggccttgaacattaagggaaacacggactcttctttgcagagtgtgggcaaggccacactggcgttagactccgtgctgaccgaagaaggtaagctactggtcgtctcagaatcctccgccgcccaggaacaagataaggacaaggcagtgacttgtagttccatcaaggagaatgctctgagttcaggcaccttgcaagaagaacagaggacacctccccccggacaggacacacagcaattccacgagaagtcaatcagcgcagactgcgccaaggataaagctctgcagctgtcaaactcacccggggcctcgagtgcctttctgaaggctgaaaccgaacataacaaggaagtggccccgcaggtcagtctcttgactcaggggggcgccgctcagagcttggtccccccaggtgctagcctggccaccgaatcccggcaggaagctcttggcgcagagcacaactcatccgctctgcttccttgtcttcttccagatggcagcgacggttctgacgccttgaactgttcacaaccttccccgttagacgttggtgtgaagaacactcagagccaagggaagacaagcgcctgcgaggtgtccggcgacgtcacagtggacgtcactggggtgaatgcacttcagggaatggctgagcctagacgcgaaaacatcagccataatacacaggacattctcattccaaacgtgctcttgtcccaggaaaaaaatgcagtattagggttgcccgttgccctccaggataaggctgtcaccgacccacaaggggtgggcacccctgaaatgatccccctcgactgggagaaagggaaactagaaggagcagaccattcttgcacgatgggtgatgccgaagaagcccagattgatgacgaggcccacccagtgctcttgcagcctgtcgctaaggagctaccaaccgacatggagctttccgctcatgacgacggggcacccgccggggtgagggaggtgatgagagccccacctagcggaagagagaggtccaccccttccctcccttgtatggtgtccgcacaggacgctcctctcccgaaaggtgcagatcttattgaagaagcggcctctagaatcgtcgacgccgtcattgagcaggtgaaggccgccggcgccctgctgacggagggcgaggcgtgccacatgtcgctgagcagcccagaactgggccccctgaccaagggactggaatcagcatttactgagaaagttagtacctttccccctggagagtccctcccaatgggcagcactccggaagaggcaaccgggagtctggcgggctgcttcgctggccgtgaagagcccgaaaagattattctgcctgtacaggggcctgagccagccgcggagatgcctgacgtcaaggctgaggacgaagttgatttccgtgcctcatcgatcagcgaggaggtggcggtggggtctatcgccgccacgctgaagatgaaacagggacctatgacgcaagccatcaatcgcgagaattggtgtaccattgagccctgcccagacgccgcatctctcctggcctcaaagcagtcccccgagtgcgagaacttcctcgatgtgggtttgggcagagaatgcacttccaagcagggagtcctcaagcgggaatctggctctgacagcgatctctttcactctccatcagatgatatggacagcataatctttcccaagcctgaggaggaacacctggcatgcgatatcacggggtcgtccagtagtaccgacgacaccgcctctctcgacagacactcatcccacggctccgacgtgtctctttctcagatcctgaaaccaaatcgcagccgcgacaggcagtccctggacggcttttactcacatggaatgggggctgagggccgcgaatcagagagcgaaccggccgatcccggcgacgtcgaggaagaggagatggattctataacagaggttccagctaactgttctgtgcttagaagcagcatgcggagcctatcccctttccgacgacacagttggggccccggtaagaatgccgcatccgacgctgagatgaatcaccgctcaatgtcctggtgccctagtggcgtgcaatactccgctggactctccgccgacttcaattatcgctccttctcactggaaggcctgaccggaggcgcaggtgttgggaacaaaccgagttctagcctggaggtaagctcagcgaatgcagaggagttgcgccacccattcagcggcgaagaacgcgtagactccctggtaagcctctctgaagaggacttggagtcggaccagagagagcatcgcatgtttgaccagcagatttgccaccgttctaagcagcagggattcaactattgcacctccgcaatcagctcacctttaaccaaaagcattagcctgatgaccatctcccaccccggactcgacaatagccgccctttccattccactttccacaacacaagtgctaacttgaccgaaagcattacagaagaaaactataattttcttcctcactccccgagtaagaaagatagcgaatggaaatctggaaccaaggtgagccgtacgttctcctacataaaaaacaaaatgagttccagcaagaaaagtaaagaaaaagaaaaggagaaggataagattaaagagaaggagaaggactccaaagacaaagaaaaggataagaaaaccgtgaatggtcatacctttagtagcatccccgtggtgggccccatctcctgctcccagtgtatgaaaccatttaccaacaaagacgcctatacatgtgccaactgttcagcatttgttcacaaaggctgtcgtgagtcactcgcatcatgtgctaaggtgaaaatgaaacaaccaaaaggcagcctgcaggcccacgacaccagttctctgcctaccgtcattatgcggaacaaacccagtcagcccaaggagagaccccgctctgcagtcctgctagtggacgaaacagccacaacaccgatattcgccaaccgccgctctcagcagtctgtgagcctgtctaaaagcgtgagtattcaaaatatcaccggcgtggggaacgacgagaatatgtctaatacatggaagtttttgtcgcactcaactgactctcttaataagatcagcaaggttaatgaaagtaccgaatccttgactgacgagggcgtgggcactgatatgaatgagggccagctactgggcgacttcgaaatcgaatccaaacagctggaggccgaaagctggtcacgcattattgacagcaaatttctcaaacagcagaaaaaagatgttgtgaagaggcaggaagtaatctacgaactaatgcagacggaattccaccacgtgagaactctcaagattatgtctggggtatacagccagggaatgatggccgatctgctcttcgaacagcaaatggttgaaaagctgttcccttgtctggatgaactcatcagcattcactcacaattctttcagcgaatcttggaacgaaagaaagaaagcctggtcgacaaaagtgagaagaacttccttatcaaaagaattggcgacgtgttggtaaaccaatttagtggagaaaatgctgaaagactgaagaagacttatggcaagttttgtggacagcacaaccagtcggtcaattatttcaaagatctgtatgcaaaagacaagaggttccaggcttttgttaaaaagaaaatgagctcttccgtggtccgaaggttaggcattcccgagtgcattctactcgtgactcaacgcattacaaagtatcccgtgctgtttcagaggattttgcaatgtacgaaggacaatgaggtcgaacaggaagatttagcccagtctctgtcccttgttaaggacgtgataggtgcagtggacagcaaggtggcctcttatgagaagaaagttagattgaatgaaatatatacaaagaccgattctaagtccattatgaggatgaagtccggccagatgttcgccaaagaggatcttaagagaaagaaattagtgagggacggcagtgtttttttaaaaaatgccgcaggacggctcaaggaagtgcaggcagtgctcctgaccgatattctggtgttcctgcaggaaaaagaccagaagtacatatttgcatccctggaccagaagtcaaccgtgatatcattgaaaaagctgatagtccgcgaagtggctcacgaagagaaaggcctgttcctcatctcgatgggcatgaccgatccggagatggtcgaggtgcacgcatctagcaaagaggagagaaatagttggatccagatcatccaagatacaattaatactctcaaccgcgacgaggatgaggggattcctagtgaaaacgaagaggaaaaaaagatgctcgacacacgggctcgcgaactaaaagagcagctgcaccaaaaggatcagaagattctgctgctgctcgaagagaaggaaatgatatttcgagatatggccgagtgcagcacaccgcttcctgaggattgctcccctacgcatagcccgagagtgctgttcagatccaacaccgaagaagccctgaaagggggaccactgatgaaatccgccattaatgaagtggaaattttgcagggcctggtttctggcaacctgggagggactctgggacccactgttagttctccaattgaacaggatgtggtggggcccgtgtctctgccccggagagcagagacctttggcggtttcgactcgcatcagatgaacgctagtaaaggcggcgaaaaggaggaaggcgacgatggtcaagatctgcgtcgaacagaaagcgacagtggcctaaagaaagggggcaacgctaatctggtgtttatgctgaagcggaacagtgagcaagtggtccaatctgttgtacacttatacgaactcctgtctgcattgcaaggggtagtcctacagcaggattcttatatagaggaccagaaactcgtactttcggaaagagcacttaccagatcgctgtctagaccctccagcctgatagagcaggagaagcaacggagtttggaaaaacaacgtcaagaccttgccaacctgcaaaagcaacaggcccagtaccttgaagagaagaggcgtagagaacgggaatgggaggctcgcgaacgcgagctaagagagagagaagcattactggcacaaagagaggaagaggtgcaacagggacagcaagacttggaaaaggaacgggaggagctgcagcaaaagaaggggacgtatcagtatgacctggaacggctgagagctgcacagaagcaacttgaacgcgaacaagagcagctgagaagggaagctgagcggctctcccagcgtcagactgagcgcgatctgtgccaggtctcccacccacacaccaaattgatgcgtataccctccttcttcccctcacccgaggagcccccgtcccccagcgccccgtctatcgcgaagtccggctcactggacagcgaactaagcgtgtcacctaaaaggaattcaataagcaggacgcacaaagataagggcccatttcacatcctgtcttctactagccagacaaacaaggggcctgaaggtcagagtcaagcccccgctagtacatcagcgtctactcgcttattcggtttgactaagcctaaggagaaaaaagagaagaagaaaaagaacaagactagccgctctcagccaggtgacggcccggcgagcgaagtttctgctgagggcgaagagatcttttgttag

SEQ ID NO: 177469 - DNA, 8442 bp, synthetic construct
  misc_feature 1..8442: note = Description of Artificial Sequence: Synthetic coding sequence
  source 1..8442: mol_type = other DNA
atgaagctgaacccccagcaggcccccctgtacggcgactgcgtggtcaccgtgctgctggctgaggaagacaaggctgaggacgacgtcgtcttctatcttgtctttctcggctcaaccctccgtcattgcaccagcacaaggaaagtgtctagtgacacgttggagacgatcgctccaggtcatgattgttgcgaaactgttaaagtgcagttatgcgccagcaaggagggcttgcccgtgttcgtagtggcggaagaggattttcactttgttcaggacgaagcatacgacgcagcacagtttctggctacttccgctggaaaccagcaggcactgaactttacacgtttcctggatcagtcagggccacccagcggggacgttaatagcctggacaaaaaacttgtgttggccttcaggcacttaaagctccccactgagtggaacgtccttggcactgatcagtccctgcacgacgccgggccccgggaaaccctgatgcatttcgcggtgcggctgggcctcctccgcctgacatggtttttgctccagaagcccggcgggaggggggcattgtcaattcataatcaggagggcgcaaccccggtgtccctggccctggagcgcggctaccataagctgcaccagctcctgaccgaagaaaacgccggggaaccagactcatggagctccttatcgtacgaaatcccgtacggggactgctcagtgaggcaccatcgggagctggatatttatactctcacttcggaatctgattcacaccacgaacatccattccccggggatggatgtaccggcccaatcttcaagcttatgaacatccagcagcagctaatgaaaacaaacctgaagcaaatggacagcctcatgcccctcatgatgaccgcacaggacccaagcagcgctcccgagaccgacgggcagtttctgccctgcgccccggagcccactgaccctcaaaggctgtcttcctccgaggagaccgaatctacccaatgctgccccggttcaccagtcgcacaaaccgaaagtccatgcgatctcagcagcattgtcgaggaggaaaatacagaccggagctgccgcaagaaaaataagggtgtcgaaagaaagggggaagaggtagagccagcccctattgtcgacagtgggaccgttagcgatcaggattcatgtctgcagtcgctcccggactgtggcgtgaaaggcacagagggtctatcctcctgcggtaaccggaacgaggagacgggtacaaagtcaagcggaatgcctaccgatcaggaaagcttgtcgagcggggacgcggtcctgcaacgggatctggttatggagcccggtaccgcccagtattcctccggcggtgagctgggcggaatcagcaccaccaatgtctctacacctgacaccgccggtgaaatggaacacggattgatgaatcccgatgccacagtgtggaagaatgttctccagggtggagagagcaccaaagaaagattcgaaaattctaatattgggacagccggagccagcgatgttcatgttaccagcaaacctgttgacaaaatctcggtgcctaattgcgcaccagcagcgtcatccctcgatggcaataagcctgcggagtctagcttagctttctcaaatgaggaaacctcaacggaaaagaccgctgaaactgagactagcaggtcgcgtgaagaatcagcagatgcgcctgtggaccagaattctgtggtgattcccgccgctgccaaagacaaaatatccgacggactggaaccctatacccttttagcagcaggaattggtgaagccatgtctccaagcgacctggcgctgttggggctggaagaggacgtcatgcctcaccagaactcagagaccaatagttcacacgcccagtctcaaaaggggaagtcatctcctatctgtagcactactggcgacgataagctttgcgccgatagcgcctgtcagcaaaatacagtgacttcaagtggggatttggtggcgaagctgtgcgacaatatagtgtctgaatcggagtctaccactgcccggcagcctagctcacaagatcctccggatgcctctcactgcgaagacccccaggcacacacagtgacatctgatcccgtccgcgatacccaggaaagggccgatttctgcccctttaaagtggtggataacaaaggtcaacgaaaagatgtgaagctggataaacctttgaccaacatgttggaagtcgtttctcacccccaccccgtggttcctaagatggagaaggaactcgtccccgatcaagcggtaatttcagattccactttttctcttgccaactctccgggcagcgaatctgttacaaaggacgatgcactcagctttgtgccatcacaaaaggagaaagggaccgctacacctgaactgcatactgctacagactacagagatggcccagacggaaactctaacgagcctgacacacgccctctcgaggatagagccgtgggtctttctaccagcagcaccgccgctgaactccagcacggaatggggaacacgagcctgaccggactgggcggcgaacatgagggccctgcacccccggccatccctgaagctctgaacatcaagggtaacaccgacagtagtctccaatccgtgggcaaggccacactggcgctggattcagtcctgaccgaggaaggtaagctgctggtggtgagcgagagttccgcagcgcaggaacaggataaggacaaggcggttacttgctcttccatcaaagaaaatgctctgtcttctggcacacttcaggaagagcagcgaacacctccacctggacaggatacccaacaattccacgaaaaatccatttccgcagattgtgcaaaagacaaggccctacagcttagtaatagccctggagcttcctccgctttcctgaaggccgaaacagaacacaataaagaggtcgccccacaagtgagcttactgacacagggcggcgctgctcaaagcctggtgccacctggggcaagtctggccaccgagtccaggcaagaagccctaggggcagaacacaatagctcagctctgctcccttgtttgctgcctgacgggtcggacggaagcgatgctcttaactgttcccagcctagtccacttgatgtaggagtcaagaatacacaaagccagggaaagacctctgcttgtgaggtgagcggtgacgttactgtagatgttacgggtgttaacgcactacagggcatggccgagcctcggcgcgagaacatcagccacaatactcaagatatactgatacctaatgttctcctctcacaggagaaaaacgcagtgctcggattaccagtcgcactgcaggataaagcagtaacggatccacagggggtggggacccccgaaatgatccccttggattgggaaaagggtaagctggaaggggcggaccactcctgcacaatgggggatgcagaagaagcccagatagatgatgaggctcaccccgtcctgctgcagccagtggccaaagaattacctacagatatggaactctccgcacacgatgatggagcccccgccggggtgagagaagtgatgcgagcccccccctctgggcgcgagagatctacaccatcgctcccctgtatggtgagtgcacaggatgctccgttacctaagggtgccgacttgattgaggaagcagcttcccggatcgtggacgccgtcatcgaacaggtgaaagccgcgggggccttattaaccgagggggaggcgtgccacatgtcactgtccagtccggagcttggcccactgactaagggcctagaaagcgcctttacagagaaagtgtccacattccccccaggtgagagcttgccaatgggttccaccccagaggaagctacggggtctctcgcgggttgctttgcaggcagagaagaaccggagaaaatcattctgcccgttcagggacctgaaccagcggccgagatgccagacgtgaaggcagaagacgaggtagactttagggccagttctatttccgaggaggtggccgtcggctcaatcgccgcaactcttaagatgaaacagggtccgatgactcaagcaatcaaccgagagaactggtgcacaatcgaaccgtgccctgatgccgcttcccttctcgcctctaaacagtcccccgagtgcgaaaattttctggatgtgggtctcggccgggagtgcacctccaagcaaggcgtgttaaagcgtgaaagtggatccgactcggacctgtttcatagcccctctgatgatatggacagtattatcttccctaaaccagaggaagagcacttggcatgcgacatcactggttcatcctcaagcaccgacgatactgctagcctcgatagacacagcagccacggcagcgatgtctctctctcccagatacttaagccaaatagatccagggaccggcagtctctggatgggttctattcacatggcatgggtgccgagggaagggaatctgaaagtgaaccagccgatcctggagacgtcgaggaggaggaaatggactccattaccgaagttccagccaattgtagtgtgttaagaagcagcatgaggtcccttagcccttttcgtcgccacagctggggacccgggaagaacgccgcttccgatgcagagatgaaccatagaagcagtatgagagttctgggcgacgtcgtgaggcgtccgccaatccataggcggtccttttcccttgaaggactgactggcggcgcaggcgttgggaacaagccttcgagcagtctggaagtcagttcggccaatgccgaggagctgcgccaccccttctccggagaagagagggtggactcgctggtttcactgtccgaagaagatctggagtccgatcagcgggaacaccgcatgttcgatcaacagatctgtcaccgtagcaagcagcaagggtttaattattgtacttctgcgatctcttctcccctgacgaagagtatatctctgatgacaatctcccatccgggtctcgacaactccagaccattccacagtaccttccataatactagcgcgaatttgaccgagagcattacggaggaaaactacaatttcctgccccactcacctagtaaaaaagattccgaatggaagtcggggactaaagtgtcccgcacgtttagctacatcaagaataaaatgagttccagcaagaagtcaaaggaaaaggagaaggagaaagacaagattaaagaaaaggagaaagacagcaaggacaaggagaaagacaaaaagacggtcaacggtcacaccttcagtagcatccccgtggtgggacctatttcctgttcgcaatgtatgaaaccatttacgaacaaggatgcatatacttgcgcgaactgctcagcttttgttcacaagggctgccgggagtctttggccagctgcgccaaggtgaagatgaagcagcccaaagggagcctgcaagcccacgatacttcctctttacccactgtcatcatgagaaacaagccttctcaacctaaagagcgacccaggtcggccgtgctgttggtcgacgaaacagctacaacgcctatcttcgcgaaccgccggtcacagcaatcagttagcctatcaaaatctgtgagcattcaaaacattactggagtgggtaatgacgagaatatgagcaacacgtggaaattcctgtctcattccactgactcacttaataaaattagcaaggtgaacgagagtaccgaaagcctgaccgacgagggggtcggcaccgacatgaacgaagggcagttgctaggtgactttgagatcgaaagcaaacagttagaggccgaatcgtggtccaggatcattgattccaagttccttaaacagcagaagaaagacgtcgtgaaaaggcaggaggttatttatgagcttatgcagaccgaatttcatcatgtccgcaccctcaagatcatgtctggggtctacagtcaggggatgatggccgaccttctttttgaacagcaaatggtggagaaattgtttccttgtcttgatgaactgattagtatccatagccagttcttccagcgaattctggaaaggaagaaagagtccctggtcgataagtctgaaaagaatttcctgatcaaacgtattggggacgtgttggtcaatcagttcagcggcgaaaatgccgagagactgaaaaagacatatggaaagttttgcggtcagcataatcaatctgtgaactactttaaggacttatacgccaaagacaagcgcttccaagcttttgttaagaaaaaaatgtcttccagcgtggtcaggcgactgggcattcctgagtgtattctgctggtgacacaaagaatcactaaatacccagtgttattccagcggatcctgcagtgcacaaaggacaacgaggtggagcaggaggatctggcgcagtctctctccctcgtcaaagacgtaattggcgccgtagacagcaaagtcgcatcctacgagaagaaagtccggttgaacgagatctataccaaaactgactccaagtcaatcatgagaatgaaaagtgggcagatgttcgccaaggaggatctgaaaaggaaaaaactggtcagggacgggtcagtattcctgaaaaacgcagccggccgactgaaagaggtccaggcagtgcttcttacagatattctggtgtttctgcaggagaaggatcagaaatacatttttgccagtctggatcagaaatccactgtcatatctttgaagaagttgatcgtccgagaggtcgcccatgaggagaaggggctcttcctgatcagcatgggtatgacagatcccgagatggtggaggtgcacgcttcaagtaaagaggagcgtaactcatggattcagattatccaggataccatcaatactctgaacagagacgaagatgagggtatcccatcggagaacgaagaagagaaaaagatgctcgatacgagggctagagagctcaaagagcagcttcatcagaaagaccaaaaaatcctcctgttactcgaagaaaaagagatgatctttcgcgacatggcagagtgcagtactccactgcctgaagactgtagtccaactcactctccaagggttctgtttcgttccaataccgaagaggccctgaaggggggtcctctgatgaaatctgcgatcaacgaagtcgaaattctgcagggccttgtcagcggcaacctgggtggcacactcggccccacagtgtcttctcccatcgaacaggatgtggtgggccccgtgtcactacctaggcgagctgaaacatttggtgggttcgactcgcaccagatgaatgccagtaagggtggcgagaaggaggaaggggatgatggacaagacctgagaagaactgaatccgacagcgggctgaaaaaggggggaaacgctaacctggtctttatgctgaagcggaatagcgagcaggtggtacagtcggtggtgcatttgtacgagctgctatcagccctgcagggagtggtccttcagcaggatagctacattgaggatcagaaactcgttttgtcggaaagggctttgacaaggtccctgtctagaccgagttccttaatcgaacaggagaagcagaggagcctggagaagcagcgtcaggacttggctaacctgcagaagcagcaggcacagtacctggaagagaagcgtcgacgtgagagagagtgggaagcccgggaaagagaactgcgcgaaagggaagctctgctagcccagcgggaagaggaggtccaacagggccagcaggatttggaaaaggaaagggaagagttacagcagaaaaaagggacttatcaatacgaccttgagcggctgcgagccgcccagaagcagctggaaagggagcaggaacagctgaggcgggaggccgaacgactctcccagcgacagacagagcgggacctgtgtcaggtgtcccatccacacacgaagttgatgcgcattccctccttcttcccatctccagaggaacccccttccccgtccgctccatctatcgccaaaagcggctcactggattcagaactgtccgtgtccccaaaacggaatagcatttcccgcacacataaagacaagggcccttttcacatcctttctagtacctcccagacaaataagggaccagagggccagagccaagctcccgctagcacctcagcctctacccgattgttcggcttgaccaagccgaaagagaagaaagaaaaaaagaaaaagaataaaacatcgcgaagccagcccggggacggtcctgcgtccgaggtttctgcagaaggcgaggagattttctgctag

SEQ ID NO: 177470 - DNA, 1245 bp, synthetic construct
  misc_feature 1..1245: note = Description of Artificial Sequence: Synthetic coding sequence
  source 1..1245: mol_type = other DNA
atgagcaacacctggaagttcctgagccacagcaccgacagcctgaataaaataagcaaggtcaatgagagcaccgaatccttgacagatgaggggacagacatgaacgagggccagctgctgggagattttgaaatcgaaagtaagcagcttgaggctgaaagctggtctcgaatcatcgactccaaatttctgaaacagcagaaaaaggacgtggtgaagaggcaagaggtcatttacgagctcatgcaaacggaattccaccatgtccgtacactgaagattatgagcggcgtatacagccaaggcatgatggccgatttgctgtttgagcagcagatggttgagaagctgtttccgtgtctcgacgagctgatctccatccatagccagttctttcagcggatcttggagcgaaagaaagagtcattggttgataaaagcgagaagaatttcctcattaaacggatcggggatgtgttggtgaatcagttctccggcgagaatgccgagagactgaagaagacatatggtaaattttgcggccagcacaaccagagtgtgaactactttaaagatctgtatgccaaagataagagatttcaggcattcgtgaaaaagaagatgtcttccagcgtggtgcggaggttgggaattccagaatgtattctgctggtcacccaacgcattaccaagtacccagtgctctttcagaggattttgcagtgcactaaggataatgaggtcgagcaggaggaccttgcccagtccttatcactcgtcaaagacgtaatcggcgccgtggactcaaaagtcgcttcttatgaaaagaaggtccgacttaatgaaatatacacaaagactgacagcaaatctatcatgcgtatgaagtccggacaaatgttcgcaaaggaggacctgaagaggaaaaagttagtgagagacgggtctgtgtttctcaaaaacgcagcgggccgcttgaaagaggtccaagcagtgctgctgacggatatcctggtcttcttgcaagagaaggatcaaaaatacatttttgcttccttggaccagaagagtacagtcatctccttaaagaaattaatcgtgcgggaagtagcccacgaggaaaaaggattgtttttgatctccatggggatgaccgacccggaaatggtggaagtccacgctagttctaaagaggagcgcaattcctggattcagatcattcaggacacgataaacacttag

SEQ ID NO: 177471 - DNA, 1158 bp, synthetic construct
  misc_feature 1..1158: note = Description of Artificial Sequence: Synthetic coding sequence
  source 1..1158: mol_type = other DNA
atgtacgagcggcacaagcggcggtacagcctgtgcgacatcagcaaagttgatcgtaccgtggacgttgtcctgctgaagatcaaccgcgagaactggtgcactatcgagccctgccccgacgcagcttctctgctcgcctccaaacagagcccggagtgtgaaaatttcctggatgtcgggcttgggcgcgagtgtactagcaagcaaggcgttctcaaaagggaaagcggttccgattccgacctcttccattcaccaagcgatgacatggactccatcatatttcctaagccagaggaagaacatcttgcttgcgatattaccgggtctagctcgagtaccgacgacacagcctccctggaccggcacagcagccacggctccgatgtgtctctctcccaaatcctaaagcccaaccgcagcagagatcggcaatctttggacggcttctattcacatgggatgggggctgaagggagggagtcagaaagcgaaccagcagaccctggggatgtggaggaggaagagatggattcaattaccgaagtgccggccaactgtagcgtgctgaggagcagcatgaggtcgctatctcctttccgtcgccattcctggggaccgggcaagaatgcggcaagtgatgccgagatgaatcataggagcttctccctcgaagggctcaccggaggagcaggggtaggaaacaaaccctcttcttcccttgaagtgagctcggcgaacgcagaagagctcagacacccattcagtggggaggagcgggtagacagtttggtctcccttagtgaggaagacttggagagtgaccaaagagaacaccgcatgttcgaccagcagatctgtcaccggagcaagcagcagggcttcaattattgcactagtgcaatttcatctcccttgaccaaatctatcagtctgatgacaatttcccatcctggtcttgataatagcaggcccttccactcaacttttcataatacatctgctaatctgaccgagtccatcacagaggaaaactacaattttttgcctcactctccctctaaaaaggattccgaatggaagtccggaaccaaagtctcccggacatttagctatattaagaacaagatgtcttcaagcaaaaaaagtaaatag

SEQ ID NO: 177472 - DNA, 8379 bp, synthetic construct
  misc_feature 1..8379: note = Description of Artificial Sequence: Synthetic coding sequence
  source 1..8379: mol_type = other DNA
aagctgctggagaagcagccccccatcgagggcgactgcgtggtgacagtccttctggctgaggaggataaggctgaggatgacgtcgtgttttacctggtctttctcgggtcaacccttcgacactgcaccagcacgaggaaggtctctagtgacactctggagaccatagctcctggtcatgactgttgtgagacggtcaaggtccaactctgtgcctctaaggaaggcctcccagtctttgtcgtggctgaagaggacttccacttcgtgcaggacgaagcctacgacgccgcccagtttctagctaccagcgccgggaatcagcaggcactgaattttacccgatttctggatcagagcggtcctccatcaggtgacgtaaattctctggataagaaactagtgttggccttcaggcatttgaaactcccaactgagtggaatgtgctaggcacagaccaatctctgcacgacgctggccctcgggagacgctgatgcacttcgctgtgcgtttgggacttctcaggctcacatggtttctgctccagaaaccaggcggaagaggcgcactgtcaattcataatcaggaaggcgccacacctgtttctttggcccttgaaaggggatatcacaagcttcatcagctactaaccgaggaaaacgctggcgagccggattcctggtcctcactatcttatgagatcccatacggcgattgcagcgtgaggcaccaccgggaactcgacatctacactcttacttccgaatcggattctcaccacgagcacccattcccgggggacggttgcacaggaccaatttttaagcttatgaatatccaacagcaactcatgaagactaatcttaaacagatggattcccttatgcccctgatgatgaccgcccaggacccttcctccgctcctgagaccgatggccagttcctgccatgcgctcccgagcccaccgacccccagcggttgtctagtagcgaagaaaccgagtcgacgcagtgttgcccagggagtcctgttgcacagaccgagtcaccgtgtgacctgtctagcattgtcgaggaagagaacaccgatcgcagttgccggaagaagaacaaaggagttgaacgaaagggtgaagaagttgaaccagcccccatcgtggactctggcaccgtctcagatcaggattcctgtctccagagtttgcctgattgtggcgttaaaggcacagaaggcctctcctcctgtgggaaccgtaatgaggagacggggactaagtcctcaggaatgcctactgaccaggagtccttgtccagcggggatgccgttctgcagcgggatttagtcatggaacccggcactgcccaatatagtagtggcggtgagctaggcggtatctctacgactaacgtgagtacacccgacactgccggcgaaatggaacatggattaatgaacccagatgccaccgtgtggaagaatgtgctacagggtggggagtcaacaaaggaaaggttcgagaatagcaatattggaacggccggcgctagcgatgtgcatgtgacgagtaaaccggtagataaaattagtgtccccaactgcgccccagctgcgtcttcgctggacgggaacaaaccagccgagagcagcctcgctttctctaatgaagagacatctactgagaaaacggctgagaccgagactagccgctcccgcgaggagtcggctgatgcccccgtggaccagaactcggttgtgatccccgcagctgctaaggacaaaatctccgacggcctggaaccatatactcttctagctgctggcatcggcgaggcgatgtcgcctagtgatttggccttgctggggctcgaagaggatgtaatgccacatcagaattcagaaacaaatagttcccacgctcagtcgcaaaaagggaaaagctcgcctatctgttctactaccggagacgataagttatgcgccgacagcgcgtgtcaacagaacactgttacgagctctggcgacctggtggccaagctctgtgacaacattgtgtcagaatcagaatctaccacggcacgccagccaagctctcaggaccctcccgatgcctcacattgtgaggatcctcaggctcacacggtgacctctgacccagttcgggacacgcaagagagggctgatttttgtccgttcaaggtcgtggacaacaaagggcagagaaaagacgtgaaactggataaacctttgacgaatatgcttgaagttgtaagccatccccatcctgtagtgcctaaaatggaaaaggaactggtacccgatcaggctgtcattagtgactctactttctccctggccaactccccaggctctgagtcagtgaccaaagacgatgccttgtcctttgtcccctcccagaaggaaaagggtacggccacacccgaattacatacggcaaccgactatagagacggcccagatgggaattctaatgagcctgataccagacccctggaagacagagcagtgggccttagtactagctcaactgccgccgaactccagcatgggatgggtaacacaagcctgactggcctcggcggtgagcatgagggacctgcaccccccgccattcccgaggccctgaatattaaaggcaatacagatagtagtctgcagtcagtgggcaaggctacgcttgccttggactctgtgctgacggaggaaggcaaactactggtggtgtcagagagctcggccgcccaagaacaggataaggacaaggcagtgacatgcagcagcataaaagagaatgccttatccagcggaaccttgcaggaggaacaacggacacccccacccggccaggacacacagcagtttcacgaaaaaagcatcagcgccgattgcgcaaaggataaagccctgcaactgtcaaattcccccggagcttctagtgcgttcctgaaggcggaaacggagcacaacaaggaagtcgccccacaggtcagcctactcacgcagggtggagcagctcagtccctggtgccacctggagcgtcactggctactgagtcaaggcaggaggccctgggggccgagcataacagttccgccctccttccgtgcctcttgcccgacggttccgatggctccgatgctctgaactgctctcagccatcgcccctggatgtcggagtgaagaatacacagtctcagggaaagacctccgcttgtgaggtaagcggggacgtaacagttgacgtcactggcgtgaatgcccttcaggggatggcagaaccgcgtagggagaatattagtcacaacacacaggatatattaatacctaatgttcttctctcccaggagaaaaatgccgttctaggactgccagtcgcactgcaggataaagccgttactgatccccaaggcgttggcacgcctgagatgattccgctggactgggaaaagggcaaactggaaggtgcagaccactcctgcactatgggggacgcagaggaggcccagattgatgatgaggcccatcctgtcctgctgcaacccgtagcaaaagagctccccaccgatatggagctttcggctcacgatgacggggcccccgctggggtgagggaggtcatgcgcgctcccccatcagggcgcgagcgtagcacccctagtcttccatgcatggtgagcgctcaggatgcacccctcccaaagggcgctgacttgattgaggaagcggcctctagaattgtcgatgccgtgatcgagcaggtcaaagctgctggagcacttctgaccgagggcgaggcctgccatatgtccttgagctctcccgagcttgggccgctgacgaagggcctggaaagtgccttcactgagaaggtgagcacgttccctcctggtgagagcctgcctatgggatctactcccgaggaagcgactggctcactggccggctgctttgctggccgcgaggagcctgaaaaaatcatattacctgtccaggggcctgagcctgctgctgaaatgcccgatgtgaaagcagaggatgaggttgattttcgcgcctcttccataagtgaggaggtcgccgtcggttcaattgccgcaaccctgaaaatgaaacagggacccatgacgcaggccatcaacagggaaaattggtgcacaattgaaccctgtcctgacgctgcttccctcctcgcttccaaacagtcaccagagtgcgaaaatttcctcgacgtgggtctgggaagggagtgtactagtaaacaaggcgtgcttaagagggagtcaggtagcgattccgacttgtttcattctccctcagacgacatggactccattatatttcccaaacccgaggaagagcacctcgcctgtgatataactggcagttcatcctccactgatgatacagcctccctcgaccgccattcaagccatgggagcgacgtcagtctctctcagatactcaagcctaatcggtcacgggatcgccagtcactggacgggttttactcacatggcatgggggccgagggccgagaaagtgagagtgaacctgccgaccctggggacgtcgaggaagaggagatggatagcattacggaggtgcctgccaactgcagtgtgcttcgttccagtatgcgatcactctctccctttcgccggcacagctgggggccaggcaaaaacgctgcctccgacgctgagatgaaccatagaagcttttctctggaagggcttacagggggagctggagtcgggaacaagcccagcagcagcctagaggtgagctcagcaaatgcggaggagctcaggcatcctttttcaggagaggagcgggtagactccctggtgtcattaagcgaagaggatctggagagcgaccagcgtgagcaccggatgtttgaccagcaaatctgtcatcgcagcaagcagcagggatttaattattgtacgtcagccattagttcgcctctgacgaaaagtatttcactgatgactattagtcatcctgggctggacaactcccgcccctttcacagtacttttcacaacactagcgccaatctcacagagagtatcactgaagagaactacaatttcctgccacacagcccctcgaagaaagactcagagtggaagtccggaactaaggtctccagaacgttctcttatatcaaaaacaagatgtctagttcaaagaagagcaaggaaaaagaaaaggaaaaagacaagataaaagagaaagagaaagactcaaaggataaagaaaaagataagaagactgtaaatggccacactttctcttccatccctgttgttggtcctatcagctgttcacaatgtatgaaaccatttactaacaaagatgcttacacttgtgccaattgcagtgccttcgtgcataagggttgtagagaatccttggcctcttgtgccaaagtcaaaatgaaacagcctaaaggctcactgcaggcccacgacacttccagtctgcccacggtcattatgcgaaataaaccttctcaaccaaaggagaggccacgctctgcggttctgctggtcgacgaaacagctacaacacccatcttcgcgaatcggcggagtcagcagtcggtatccctgtcaaagtcagtcagcatccagaatattactggggtgggaaatgatgagaatatgtctaacacgtggaagttcctctcccatagcaccgattcactgaacaagatctctaaagtgaacgaaagtactgaatccttaactgatgaagggactgatatgaatgagggccagctcctcggagattttgaaattgagagcaagcagctggaggctgaatcatggtcgcggatcattgattctaaatttcttaagcagcagaagaaggatgtcgttaagagacaggaggtgatctacgaactgatgcagactgagttccatcacgtgcgaacccttaagataatgagtggcgtttactcacagggtatgatggctgacctgctatttgagcagcaaatggtagaaaagctattcccatgtcttgacgagctcatcagtatccacagtcaattttttcagcgcatcctcgagaggaagaaggagtctcttgtggacaagtctgaaaaaaactttctgataaagcgtattggggacgtgctggtgaatcaattttcgggagagaatgctgagagactcaaaaagacgtatgggaaattctgcggccaacataaccagagcgtaaactattttaaggacctatatgctaaagataaaaggtttcaagcgtttgttaagaagaagatgagctcttccgtggtgcgccgcctggggatcccagagtgtatactgctcgtcacccagcgtatcacaaaataccctgtccttttccagagaatactccagtgcactaaggacaatgaagtggaacaagaggacctggcacagtcccttagcctagttaaggacgtaattggagccgtggattcaaaagttgcaagctatgagaaaaaggtgcggctgaatgagatctacactaaaaccgacagcaaaagtatcatgcggatgaaatccggacagatgttcgccaaagaggatcttaaacgaaaaaagctggttcgggatggatccgtgttcctcaaaaatgctgcgggccgcctgaaggaggtgcaggcggtcctgctcacagatatcctggtgtttctccaggagaaagatcagaagtatattttcgccagcctggaccagaagtcaactgtaataagtttgaagaagctcattgtgagggaggtagctcatgaagagaaaggcttattcttaataagtatgggtatgacagatccagagatggtggaagttcacgctagctccaaggaagaacggaatagctggattcagataatccaagacaccataaataccctaaaccgcgacgaggacgaaggcattccatccgagaatgaggaggagaagaagatgctggacacacgcgcgagagagctgaaggagcagctgcaccagaaggatcagaagatcctccttctgctagaggagaaagagatgatatttcgggacatggcagagtgcagtaccccgttgccggaggattgttccccaacgcactctccaagggtcttgtttcgatcaaatacagaggaagccttgaaaggaggccccctgatgaaatcagctattaatgaggtcgagatccttcagggcctcgtctccggaaatctgggcgggacacttggacctactgtgtcttcacctatcgagcaggatgtagtaggtcctgtgtccttgccaagacgagccgagacattcgggggatttgattctcaccagatgaacgcaagcaagggtggcgagaaagaagagggcgatgatggtcaggatctacggcgaacagaatctgacagcgggctgaaaaaaggaggaaacgctaatctcgtattcatgctgaagcgcaattctgaacaggtcgtccagagtgtggtacacctttatgaactcctttctgctctccagggcgttgtgctacagcaggatagctacatcgaggaccaaaagctggtcctaagcgagcgggcactcactcgctcactttcgcgaccttctagcctgatcgaacaggaaaaacagagatccttggaaaaacagagacaggatctcgccaacctgcagaagcagcaagcacagtacttggaggagaaacgcaggcgagaaagagaatgggaggctcgtgagagagagctcagagaacgtgaagctctcctggctcagcgcgaagaggaagtacaacaaggtcagcaagacttagagaaagagagagaagaattgcagcagaagaaagggacttaccaatacgatctggagaggttgagagcagcacagaagcagctggaaagggagcaggaacagctccggagagaggccgaacgcctgagccagaggcaaacagaacgtgatttgtgtcaggtgagtcatccgcacacaaagctaatgagaataccttcgttcttcccctcacccgaggaacccccctctccaagcgccccttctattgcaaaatcaggcagcctggactccgaactgagtgtgtctcctaagcgaaatagtatctcaagaacgcataaggacaagggaccctttcacattctctcctctacctctcaaaccaacaaagggcccgaaggccagtcacaggcccctgcatcaacgtccgcctcaacccgattatttggactgaccaagcccaaggagaaaaaggagaagaagaagaaaaataagacctctcgatcacagccaggcgacggtccagcatcagaggtttccgccgaaggggaagagattttttgttag

SEQ ID NO: 177473 - DNA, 5238 bp, synthetic construct
  misc_feature 1..5238: note = Description of Artificial Sequence: Synthetic coding sequence
  source 1..5238: mol_type = other DNA
atgaagctgaacccccagcaggcccccctgtacggcgactgcgtggtaaccgttcttttggcagaggaagacaaagccgaagacgacgttgtcttttatctggtgtttctcgggtctaccctccggcactgcacatcaactaggaaggtgtcctccgatacactcgaaactattgctccaggccacgactgctgtgaaactgtgaaagtgcagctgtgcgcatccaaagaaggccttccggtttttgtggttgccgaggaggatttccattttgtgcaggacgaggcctacgacgctgcgcagttcctagcaacatccgcaggcaaccagcaggctctcaacttcacacgatttctagatcagtccgggcctccctcaggagatgtaaacagtttggataagaaactggtgctggctttcaggcaccttaaacttcctacagaatggaatgtgctggggaccgatcagtccttgcacgatgctggacctcgtgaaaccctgatgcacttcgctgttcgtctgggattgctcaggctcacctggttcctgctacagaagcctggaggcaggggcgcgctgtcaattcacaaccaggagggggctacccccgtctctctggcactggaacgtggttaccacaaattgcaccagctgctgacagaggagaatgcgggggagcctgatagctggagcagcctgtcttacgagatcccatacggagattgctcagtgcggcaccaccgtgaactcgacatctatacactgacctcagagtccgattctcatcatgagcatccattcccaggcgacggctgtactggaccaatctttaagctgatgaacattcaacagcagctcatgaagaccaatctgaagcagatggatagcctgatgcccctgatgatgactgcccaagatccctccagcgccccggagacagacggccagtttcttccctgtgcccccgagccgacggacccccagcgactgagctcctccgaagaaactgagagtacccagtgttgtccagggtctccagtcgctcagacagagtccccctgcgacctctcctctatcgtggaggaggaaaatacagatcgctcctgtcggaagaagaataaaggcgtggaaaggaaaggcgaggaggtggagccagcaccgattgtggatagtggcaccgtctctgatcaggatagctgtctgcagtcactgccggactgcggcgtcaaagggacagaagggctctcctcttgtggcaacaggaacgaggagacgggaactaagtctagtggaatgccaaccgaccaagagagtctaagcagcggtgatgcggtgttacagcgagatcttgtgatggagccaggaaccgcacaatatagcagtggtggcgagctgggaggcatctccacaactaatgtttccacccccgacactgcgggcgagatggaacacgggctgatgaaccctgacgcgacagtttggaaaaacgtactccaaggcggcgagtcaaccaaggagaggtttgaaaacagcaacatcgggacagctggtgcatctgatgtccatgtgacaagcaagcctgtcgacaaaatcagcgtgccaaactgtgctcctgcagcctctagtctggatggcaataagccagcagaatcttctctcgccttttccaacgaagagactagtacagagaaaaccgccgagaccgagacatcccgcagcagggaggagtcggcagatgctccggttgatcagaacagcgtcgtgattccagccgctgcgaaggataagatatcagacggtttagagccgtatacccttctcgccgccggtataggcgaggctatgagtcccagcgacttggctctcctaggcttagaagaggatgtcatgccccatcaaaatagcgagaccaattcctcacatgcccagtcgcagaagggcaaatcttcgccaatttgcagtactacgggggatgacaaattatgtgcagacagcgcatgccaacaaaacaccgtgacgtcttctggcgatcttgtagccaaactctgcgataacatcgtctcggaatctgagtcaaccactgctagacagcctagctcacaagatcccccagatgcaagccattgtgaagacccacaggctcataccgtcacctccgaccccgtcagggacacacaggaacgagccgatttctgcccatttaaagtagtagacaacaagggtcaacggaaggacgtgaaactggataaacccctcaccaacatgctggaggttgtcagccacccccaccctgtggtgcccaaaatggaaaaagaactcgtacccgaccaggccgtgatctcagactccactttctccctggctaactcacccggatccgagagtgtgacgaaagacgatgcactaagctttgtgccttcacagaaagagaaaggtaccgcaacacctgaattgcacaccgcaacagactaccgggacgggcctgatgggaatagcaatgagcccgatacaagaccgctggaagacagggcagttggtttgagtacgtcttccacagcggccgagcttcagcacggtatggggaacacctctctgacggggctcggaggggaacatgagggccctgctccccccgccatccctgaagctcttaacatcaaaggtaatacagactcatccctgcagtccgtcggaaaggcaacacttgccctcgactccgtgctcaccgaggaggggaagcttctggtagtgtcagaatcgtccgccgcgcaggagcaggacaaagataaagcggtcacgtgctcttctattaaggagaacgcattgagctccggcacactccaggaggagcaacgtacacccccccccggacaagacacccaacagtttcacgaaaagtccatctctgccgattgtgccaaggacaaagcccttcagcttagtaattctcccggagcttcttctgctttcctgaaggccgagactgaacacaacaaggaagttgctcctcaggtgagcctgttgacccaggggggagcggctcagtctttagtgccacccggtgcgtccttggcgacggaatcgcgacaagaagccctgggcgcggaacataatagctcagccctcttaccttgcctgctccctgatggatcagatggcagcgatgcgctgaattgtagccagccatctcccctagatgtcggggtgaagaatacccagagtcagggaaagacctctgcatgtgaggtgagcggcgacgtcacggtcgatgtgaccggtgtgaatgcactgcagggtatggctgagcctcggcgggagaacatcagccataacacccaggacatccttattccaaacgttctgctctcccaggaaaaaaatgctgtgctcggcctgccggtcgcattacaggacaaggcggtcaccgatcctcagggtgtcggcacccctgagatgatcccactggactgggaaaaaggtaagctcgagggggcggatcacagttgtaccatgggagacgccgaggaagctcagatcgacgatgaagctcatcccgtgcttctacagccggttgctaaagaacttccaacagatatggagctatccgctcacgacgacggcgctcccgccggggtgagagaggttatgcgggcaccgccttcaggcagggaaaggtcaaccccatcattaccatgtatggtgagcgcccaggacgcacccctgccgaaaggcgccgatctgatcgaggaggcagcctcccgcatcgtggatgctgttatagaacaagtcaaggcagcaggagcgctgctaacagaaggcgaggcgtgtcacatgagcctgtcttcccccgaacttggcccacttacaaagggcttggagagtgctttcacagagaaggtcagtacttttccacccggggagtctttacccatgggaagcacaccggaagaggctaccgggtccttggccgggtgcttcgccggccgtgaggagcccgagaaaatcatcctgccggtacagggccctgagccagccgcggagatgccagacgtgaaggctgaggatgaagtggattttcgcgcgagcagtatcagcgaggaagtggccgtgggctccattgctgcaaccctgaaaatgaagcagggccctatgacgcaggcaatcaatagggaaaattggtgcactatcgagccatgcccggacgcagcatcactattggcctcaaaacagagtcccgagtgcgagaacttcctggacgtcggtctgggccgcgagtgtacgtctaaacagggcgtcctcaagcgagaatcaggcagtgatagcgaccttttccacagtccttccgatgacatggattcaattatcttccctaaacctgaggaggaacatctagcttgtgacatcaccgggtccagctcctctacagacgacactgcttctctggatcggcacagttcccatgggtccgacgtaagcctatctcagatcctgaaacctaataggtcccgtgatcgtcagtctttggacggcttctactcccatggaatgggcgctgaaggcagagaatcggaatccgagcccgcagatcccggtgacgtggaagaggaagagatggattccatcacggaggtgccagccaattgcagtgtgttgaggtcgtcgatgcgttccctgtccccctttcgcaggcactcgtgggggcctgggaagaacgctgcatctgacgctgagatgaatcatcgtagcttctccctcgaagggctcactggcggagcaggcgtcggtaacaaaccctcatcttcgctggaggtcagcagcgccaatgctgaggagctaagacaccccttctccggggaagagcgggttgactctttggtctctctcagcgaagaagacctggaaagcgaccagagagaacataggatgttcgatcagcagatttgtcatcgcagcaagcagcagggatttaattactgcaccagtgcaatctcctcccctttaactaagtccattagcctgatgacaatctcacatcctgggttagataattcaagaccgttccatagcacatttcacaacacaagcgctaacctgactgaaagtatcacagaggagaattacaatttcctgccgcactccccctcaaagaaggacagtgagtggaagtctggaaccaaagtgtcacgcacttttagctacattaagaataagatgtctagcagcaagaaatcaaagtag

SEQ ID NO: 177474 - DNA, 828 bp, synthetic construct
  misc_feature 1..828: note = Description of Artificial Sequence: Synthetic coding sequence
  source 1..828: mol_type = other DNA
cccagcgacgacatggacagcatcatcttccccaagcccgaggaggagcatttagcttgtgacatcacaggatcctcaagcagcacggatgacacggcttctttggacagacattcttctcacggttctgacgtgagtctgagccagattcttaagcctaataggtcaagagacagacaatccttagatggcttttactctcatggaatgggagcagaagggcgggagtccgaatctgaacccgcagatcccggcgatgtggaagaagaggagatggactctattactgaggttcccgccaactgtagcgtcctcagatcctccatgcggtccctgagccccttccggagacacagctgggggcctgggaagaacgctgcctctgacgccgagatgaatcatcgaagctctatgagggtgctcggagacgtggtacggcgcccccccatccataggcgcagcatgtcttggtgtccctctggagtgcagtattcagccggcttgagcgctgacttcaactatcggtcattttccctagaagggctgacaggcggggcgggcgttggaaataaaccaagtagttccctcgaggtaagctcagccaatgcagaggaactccgacatcccttctccggggaagaacgtgtggatagcctggtgtctttgagcgaggaggatctggagtcggaccaacgtgagcaccggatgttcgaccagcagatctgtcaccgctcgaagcagcaaggcttcaactactgcacctccgccatctcatcaccgttaactaaatccattagcctcatgaccatcagtcacccaggcctctag

SEQ ID NO: 177475 - DNA, 117 bp, synthetic construct
  misc_feature 1..117: note = Description of Artificial Sequence: Synthetic coding sequence
  source 1..117: mol_type = other DNA
atgaagctgaacccccagcaggcccccctgtacggcgactgcgtggttaccgtcttgttagcagaagaggataaggccgaagacgatgtggtgttctatctggtgttcctgggctag

SEQ ID NO: 177476 - DNA, 540 bp, synthetic construct
  misc_feature 1..540: note = Description of Artificial Sequence: Synthetic coding sequence
  source 1..540: mol_type = other DNA
atgaagctgaacccccagcaggcccccctgtacggcgactgcgtggttacggtgttgctcgctgaagaagataaggccgaagatgatgtggttttctacttggtttttctgggatcaacacttcgacattgcactagcaccagaaaagtgtcctcggatacattagagactatcgctccaggtcatgattgctgcgagacggttaaggttcagctgtgcgcctctaaggaaggacttccggtttttgtggtagctgaagaagactttcactttgttcaggacgaagcttatgatgcggcccagtttctggcaacctctgctggcaaccagcaggctctgaactttacccgatttttggaccagtcaggaccaccgagcggagatgtgaacagtttggataagaaactagttcttgcttttagacatttgaagctccccaccgagtggaatgtgctcgggacggaccaatccctgcatggcgaaaatttatatgacctgcagacccatttcaagtttgtcatctttctcctgttcttttag

SEQ ID NO: 177477 - DNA, 414 bp, synthetic construct
  misc_feature 1..414: note = Description of Artificial Sequence: Synthetic coding sequence
  source 1..414: mol_type = other DNA
atgagcgagacccagaacagcaccagccagaaggccatggacgaggacaataaagctgcatcccagacaatgccgaatacacaagacaaaaattatgaagacgaactgactcaggtggctctggcactcgtcgaagatgtgatcaactatgctgtgaagattgtcgaggaagagagaaaccctctgaagaacatcaagtggatgactcacggcgagttcactgtcgagaagggattgaagcagattgatgagtattttagcgacgcccccatagtcgtttcctacgttggcgatcaccaggctctggtgcaccgccccggtatggtgaggtttagagaaaactggcagaaaaaccttaccgatgctaaatactccttcatggagtcctttccctttctgttcaaccgagtctag

SEQ ID NO: 177478 - DNA, 270 bp, synthetic construct
  misc_feature 1..270: note = Description of Artificial Sequence: Synthetic coding sequence
  source 1..270: mol_type = other DNA
atgagcgagacccagaacagcaccagccagaaggccatggacgaggacaataaggccgcttcccagaccatgccaaatactcaggataaaaattacgaagacgaactgacccaggttgccctcgctttggtggaggatgttattaactatgccgtgaagatagtcgaggaagagcgaaatcccctcaagaacatcaaatggatgactcacggggagttcaccgtggaaaagggtcttaaacagattgatgaatacttttcagtgtcatag

SEQ ID NO: 177479 - DNA, 417 bp, synthetic construct
  misc_feature 1..417: note = Description of Artificial Sequence: Synthetic coding sequence
  source 1..417: mol_type = other DNA
atgagcgagacccagaacagcaccagccagaaggccatggacgaggacaacaaggctgcatctcagactatgccaaacactcaagacaagaattatgaagacgaattaacccaggtggcactagctttagtagaagacgttataaactatgccgtcaagatcgtggaagaagagaggaacccgctcaagaacatcaaatggatgacccatggagaatttaccgtagaaaagggacttaagcagattgacgaatatttctcccccgatgctccgattgtggtatcatacgtaggggaccaccaggccctagtccatcgcccaggcatggtgcggtttcgagaaaattggcagaaaaacctcaccgacgctaagtatagtttcatggagagctttccctttttgtttaacagagtgtag

SEQ ID NO: 177480 - DNA, 414 bp, synthetic construct
  misc_feature 1..414: note = Description of Artificial Sequence: Synthetic coding sequence
  source 1..414: mol_type = other DNA
atgagcgagacccagaacagcaccagccagaaggccatggacgaggacaataaagccgcctcacaaacaatgcctaatacgcaggacaaaaactatgaggacgaattgactcaggttgcactcgctctggttgaggacgtgatcaactacgctgtgaagattgtggaagaggaacgaaatcccctgaagaacataaagtggatgactcacggagagttcactgtagagaaaggcctcaaacagattgatgagtatttcagcgacgcgccaatcgtggttagttacgtgggggatcaccaggcactggtgcataggccagggatggtgagatttagggagaattggcagaaaaacctgactgacgccaagtattcttttatggagtcattcccattccttttcaaccgtgtctag

SEQ ID NO: 177481 - DNA, 594 bp, synthetic construct
  misc_feature 1..594: note = Description of Artificial Sequence: Synthetic coding sequence
  source 1..594: mol_type = other DNA
atgagcgagacccagaacagcaccagccagaaggccatggacgaggataataaagcagcctcccagaccatgccaaacacacaggacaaaaactatgaggatgagttgactcaggttgctctggccctggtggaagatgtcattaattatgccgtgaagatagttgaggaggaaagaaaccccctcaagaacattaagtggatgacccacggtgagttcacagttgaaaagggtcttaaacagatcgacgaatacttctcaaaatgtgtgtccaaaaagtgttgggcccatggtgttgagtttgtggagcgaaaggatctgatacattccttcctttacatatactacgtgcattggtccataagcaccgccgatctgcccgtcgccaggatctcggccggaacttacttcacaatgaaggtatccaaaactaagcccccagacgccccaattgtggtctcatatgtgggggatcaccaggccctcgtgcaccggcctggcatggtgcggttcagagagaactggcagaagaaccttacagatgcaaagtacagttttatggagtcatttccgttcctgttcaatcgcgtgtag

SEQ ID NO: 177482 - DNA, 270 bp, synthetic construct
  misc_feature 1..270: note = Description of Artificial Sequence: Synthetic coding sequence
  source 1..270: mol_type = other DNA
atgagcgagacccagaacagcaccagccagaaggccatggacgaggacaacaaagctgcaagccaaacaatgcctaacacccaggacaagaattacgaggacgagctgacccaggtcgcgctggccctcgtggaagatgttattaactacgccgtcaaaatagttgaggaggagcggaacccactgaaaaatattaagtggatgacccatggggagtttacagtagagaaaggtctgaagcagatagacgagtatttcagcgtttcttag

SEQ ID NO: 177483 - DNA, 2088 bp, synthetic construct
  misc_feature 1..2088: note = Description of Artificial Sequence: Synthetic coding sequence
  source 1..2088: mol_type = other DNA
atggccgccgccaccatcgtgcacgacaccagcgaggccgtggagctgtgtccggcctatggattgtacctgaaacccatcaccaaaatgacgataagcgttgcgctgccacagttgaagcagccaggaaaatccatttccaattgggaggtaatggagcgactcaagggcatggtgcagaaccatcagttttcaacgttacgtattagcaagagtacaatggattttatccgctttgaaggggaagttgagaataagtccctggtgaaatcttttctggcttgcctggacggcaagaccattaagttaagtggtttctccgatattctgaaagtgcgcgccgccgaatttaaaatagatttcccaaccagacacgactgggactcctttttccgggatgcaaaggacatgaatgaaaccctgccaggcgaaaggcctgacaccattcatctggagggccttccctgtaagtggtttgcgctcaaggaatccggatccgagaaaccgtcagaagacgtcctggtgaaagtctttgagaagtttggagagattcgtaacgtggacatcccaatgctcgacccttaccgggaggagatgacaggccgcaactttcatacattctctttcggcggacatctgaactttgaggcctacgtacagtacagagaatatatggggtttatccaggctatgtctgcactgaggggaatgaagctaatgtataagggtgaggatggcaaagctgttgcttgcaatatcaaagttagttttgactctactaaacatctgtcagacgccagcatcaaaaagagacagcttgaaagacagaaattgcaggagcttgaacaacagagggaggagcagaagcgaagagagaaggaagccgaagagcgacagcgtgctgaggaaagaaagcagaaagaactggaggagctggaaagagagcgcaaacgggaagagaaactgcgaaaaagagagcagaagcagcgggatcgagaactccgtagaaaccagaaaaagttggagaagctgcaggctgaagagcagaagcagctacaagagaaaatcaaattagaagaaagaaagcttctgcttgctcagcgcaatctgcagagcatccgtcttatcgctgaattattgtccagggcgaaagccgttaagctgcgcgagcaagagcaaaaagaagaaaagctgaggcttcagcaacaggaagagcggcgtagactgcaggaagcagaacttcgcagggtggaagaggaaaaggagcgtgctctgggcttgcagcgaaaggagagggagttgagagagcgcctgctgagcattttgctgtccaagaagcctgatgacagccacacacatgacgagctgggcgttgcccacgccgatctcctgcagcctgtactcgacatactacagaccgtatcctccggttgtgtttccgcaaccaccctgcacccgctaggcggccagccacccgcgggggccccaaaggagtcacccgcgcatccagaagcagacggagctcctaagtccgtgaatggatcagttgccgaagaggcaccctgcaaggaggtccagtctagttgtcgcgtagtacccgaggatgggagtcctgaaaagcgctgtccagggggagtgctgagttgtatccccgataacaaccagcagcccaaaggaatcccggcttgcgaacagaatgtaagcagaaaagatacccgcagtgagcaggataaatgcaatcgagagccttcaaagggccgaggtcgcgctactggcgacggcctggccgaccgccacaaacgcgagcgaagccgggcccgtcgcgcttcctcccgcgaagacggccggccccgcaaggagcgccgcccccacaaaaaacacgcctacaaggacgactccccaaggagaagatcaactagcccagatcacacccgatcgcgtaggagtcattccaaagataggcatcgacgggaacggagccgggagcggcgcggttccgcaagtagaaaacattcaagacataggaggaggtccgaacgatctcggtctcgttccccatcccggcacagatcaacttggaataggtag

SEQ ID NO: 177484 - DNA, 1341 bp, synthetic construct
  misc_feature 1..1341: note = Description of Artificial Sequence: Synthetic coding sequence
  source 1..1341: mol_type = other DNA
atggccgccgccaccatcgtgcacgacaccagcgaggccgtggagctgtgtcctgcgtatgggctgtacctgaaacctatcaccaagatgacaattagtgttgctttgcctcaactgaagcagcccggaaaatccatctctaattgggaggtgatggaacggttgaagggaatggtgcagaatcaccaattcagtactttgcgcatcagcaagtctacaatggattttatacgctttgaaggagaagtcgagaacaagtccctggtcaagagcttcctagcttgtttagacgggaaaactattaaactctccggattcagcgatatcctaaaagtccgggcagccgaattcaagattgatttcccgactcggcacgactgggactcattctttcgcgatgccaaggacatgaatgagacccttcctggcgagagacccgacactattcatctggaagggctgccatgcaagtggttcgcccttaaggagagcgggtctgaaaagccaagcgaagacgtgctggtcaaggtgtttgaaaagtttggagaaattcggaatgtcgacattccaatgctcgacccataccgggaagagatgaccggaagaaactttcacactttttcctttggcggccacctgaacttcgaggcctacgtgcagtatcgcgaatatatggggtttattcaggctatgtcagcactccgcggtatgaagctgatgtacaagggcgaagatggcaaggctgtcgcgtgcaacatcaaggtctccttcgattctactaagcacctttcagacgcaagcattaagaagcggcagctggagaggcaaaaactccaagagctcgagcagcagagagaggaacagaaaaggcgcgagaaggaagctgaagagagacagcgggccgaagagaggaagcaaaaggagctggaagaactggagagggaacggaaacgagaagaaaaattgcggaagcgcgaacagaagcagagagaccgggaattaaggcgtaaccagaagaagcttgagaaacttcaggctgaagaacagaagcagttgcaagagaagatcaagttagaggaacgaaaactgcttctcgcccaacgcaacctgcagagcattcgactgatcgcagagttgctaagtcgcgcaaaagtccccggaggcagcctgtgctcgagacagccaaggcccgggtgtccccagtgcccccccctgaaatgcggaaggcggcatggtgcagttagtccgcccgccgccgccgtggccaccaaacctgccctcatgccacgcatgactgccccatctagagagggcgtggccctggtctgtcgaagcaggtag

SEQ ID NO: 177485 - DNA, 2580 bp, synthetic construct
  misc_feature 1..2580: note = Description of Artificial Sequence: Synthetic coding sequence
  source 1..2580: mol_type = other DNA
atggagatcgaggtgagcgtggccgagtgcaagagcgtgcccggcatcacatctacaccccacccaatggatcacccttctgccttctactcacctccccataacgggctattgaccgaccaccacgaatcgctagacaacgacgtggctagggaaatcagatatctcgacgaggttcttgaagcaaattgctgtgatagcgccgttgacggcacctacaacggcacctccagtccagaaccaggagccgtcgtactggtggggggactcagcccccccgtccacgaggcaacacaacccgaacctactgagcggacagccagccgccaagccccaccccacattgaactgtccaatagttcccccgacccaatggccgaggctgagagaaccaatggacacagcccatcccagcccagagacgctctgggcgactccctgcaggtccccgtgtcaccaagctccacgacctcctctcggtgctccagtcgtgatggcgaattcacacttaccacactgaagaaggaagcaaaatttgagttgcgtgcgtttcacgaagacaagaaacctagcaagttgttcgaggacgacgagcatgagaaagagcagtattgtattcggaaggtgcggcctagtgaggaaatgctagagctagagaaggaaagacgggaactgataaggagtcaggccgttaaaaagaacccaggcatcgcagcaaaatggtggaacccaccccaagagaaaaccatcgaagagcaacttgatgaggagcatctcgagtctcataaaaagtacaaggaacggaaagagcgacgtgcacaacaggagcagctactcctacagaagcagttacagcagcagcagcagcagcctccatcccagttgtgtactgctcccgccagctcacatgagagggcatcgatgatcgacaaggcaaaagaggatatcgtcacagaacagatcgacttctctgcagctaggaagcagtttcagctaatggagaattccaggcaggccgtagcgaaagggcaatccaccccacggctgttcagtattaaacccttctatcgccccctgggaagtgttaattcagataagcctctgacaaatcctaggccaccatcagtgggcggaccgcccgaggatagtggggcttcagccgccaaaggacagaagtccccaggcgcactggagactccgtcagctgctgggtcccagggaaatactgcttctcaggggaaggagggtccatacagtgagccgtccaagagaggccccctctcgaaactgtgggctgaagacggcgagttcacttctgctcgcgctgtgctgacggttgtgaaggatgacgatcatggaattttggatcagttttcccgctcagttaacgtgtccctcactcaggaggagctcgatagtgggttggacgagctcagtgtgcgatcacaggatactacagtactcgaaaccttgtcgaatgacttctccatggataatatctctgatagcggtgcatcaaacgaaacaactaacgccctccaagagaactcactggccgatttctccctgcctcagacccctcagacggataatccttccgagggtcgtggggagggcgtcagcaaaagcttcagcgaccacgggttctactctcccagcagcacattaggggactcccccctggttgatgaccctttagagtaccaggccggcctcctcgtgcagaacgccattcaacaggccatagccgagcaggtggacaaggctgttagtaaaacatcgcgggacggggccgagcagcagggaccggaagcaaccgtcgaagaggcagaggcagcggccttcgggagtgagaaaccccaaagtatgttcgaaccgccgcaggtttccagccctgtgcaggaaaagcgagatgtcctccctaagattctgcccgctgaggacagggctctgcgagaacggggccctccccagcctttgccggcggttcagcctagtggacccattaatatggaggagacccgccctgaggggagctatttttctaagtactcagaagccgccgagctgcggtcaaccgcctcgctgctagctacccaggagtctgatgtgatggtgggcccgttcaagctgcggtctaggaagcagagaactctgtcgatgattgaggaggagattagggcggctcaggaacgcgaggaggaacttaaacggcagcgacaagtgctgcaaagtactcaatctcctcgcacaaagaacgccccttccctccccagtaggacgtgctataaaaccgctccgggcaagattgaaaaggtgaaacccccgccgtcacccactaccgaggggccctctctccaacccgatctggccccggaggaagcagcagggactcagaggcccaagaatcttatgcagactctaatggaagattatgagacccataaaagtaaacgccgcgaaaggatggatgattcttccgttttagaggctactcgggtaaacagacgaaagagcgccctcgcgcttcgctgggaggcgggcatctacgctaaccaggaagaggaggataatgaatag

SEQ ID NO: 177486 - DNA, 2847 bp, synthetic construct
  misc_feature 1..2847: note = Description of Artificial Sequence: Synthetic coding sequence
  source 1..2847: mol_type = other DNA
atgcggtggccccagcccggcgccgccgcccggctgccccccgagtctcccggaccccccgaatctccaggtccaccagaacgggaggcagctgccgcgcgcagatggactggagctgagccgcaggattgtgcacctgggtccggccgacccgaaaaacctccccagctgagtgaggacgatatctggctgaaatcagagggagacaactactcggccaccctactagaacccgcggcaagctcattgagtcctgaccacaaaaacatggagatcgaggtgtcagtggccgaatgcaagtcagtgccagggattacttcaacacctcatccgatggaccatccctctgccttttattcaccccctcacaatggtcttctgacagaccatcacgaatctctggataatgatgtggctagagaaatcaggtatcttgatgaggtccttgaggcgaattgctgtgatagcgccgtagacgggacctacaacgggaccagttctcccgagcctggagccgtggttctcgtgggtgggctgagccctccagtgcacgaagccacacaacctgaacctaccgaaaggacagcatctcgacaggcccccccacatattgagttgtccaactcctcccccgaccccatggctgaagctgaacgtaccaacggacacagcccatctcagccaagagatgctctaggcgacagcctacaggtgccagtctcgcccagttctacgacttctagtagatgctcatctcgagatggcgaattcaccctgactacactgaaaaaagaagcaaaattcgagcttcgggcctttcacgaagataagaaaccatctaagttgttcgaagatgatgaacacgaaaaggagcagtactgtattcggaaggtccggccatccgaagagatgctcgagctggagaaggagaggcgggagctcataagatcacaagcagtgaagaagaatccaggcatcgccgctaagtggtggaaccctccccaggaaaaaacaatagaagagcagctggatgaagaacatctggaaagccacaaaaaatacaaggaacggaaggagaggcgggcgcaacaagagcagctacttctccagaaacagctacaacaacagcaacagcagcccccctctcagctgtgtactgcccccgcatcatcgcacgaaagagccagtatgatcgacaaagccaaagaagatattgtgacagagcagattgattttagcgccgcgagaaaacagtttcagctgatggaaaactcgcggcaggcggttgcgaaagggcaatccacccctagactcttttccataaagcctttctaccggccattgggtagtgtcaactcggacaagccactcaccaatcctcgtccacccagtgtgggcggacctcccgaagattctggggcgagcgcagctaaaggacagaagtctccgggtgccctagagacaccatccgccgctggatcacaaggcaatacggcttcacagggaaaagaaggaccttatagcgagccgtctaaaagaggaccactgagcaagctgtgggctgaggatggcgagtttacttccgcacgcgcggtcttaactgtggtaaaggatgacgaccacggcatccttgatcagttttcccgaagcgttaacgtaagcctgacacaagaagaactcgatagcggtctggacgaactttcggtccgctcccaggacaccactgtgctggagaccttgtctaacgacttttcgatggacaacattagcgactccggagcatcaaacgagaccactaatgcactccaggagaatagcctcgccgactttagtctgccccagacaccccagacagacaatccatctgaaggtaggggggagggagtctctaaatccttttccgaccatggtttctacagtccatccagtacacttggggacagcccccttgttgacgatcccctggaatatcaggctggtttgctcgttcagaatgccatacagcaagctattgcggagcaagtggacaaagctgtgagtaaaactagcagggacggcgccgagcaacagggacccgaagccacagtggaggaggccgaagccgccgccttcggtagcgagaagccccagagtatgttcgaaccacctcaagtgtcttctccagtgcaggagaaaagggatgtcttgccaaagatccttcccgccgaggatcgggctctgcgagagaggggcccgccacaacccctgcctgctgtgcagccttccggaccaataaatatggaggagacaagaccagaggggagctacttcagcaagtactcggaagctgcagagctgagaagcacagcgtcacttctggctacccaggagagcgacgtgatggtgggaccttttaagctccgctctagaaagcagcgaactttgtctatgatcgaagaggagatccgcgctgcacaggaacgggaggaagagctgaaacgtcagagacaagtgctgcaaagtactcagagtccacgcacgaaaaatgcgcccagtttgccatcacgaacatgctacaaaaccgccccaggcaaaatagagaaggtgaaacccccaccttcgccaaccaccgagggaccttctctgcagccggatctagccccagaagaggccgccggaacccaacgacctaagaatctgatgcagacactgatggaggactacgagacgcacaaatccaaaaggcgtgagcgcatggacgacagcagtgtgcttgaggccacaagggtcaacagaaggaaatcagctctcgccctacgttgggaggcggggatctatgcaaaccaagaagaagaggataatgaatag

SEQ ID NO: 177487 - DNA, 3273 bp, synthetic construct
  misc_feature 1..3273: note = Description of Artificial Sequence: Synthetic coding sequence
  source 1..3273: mol_type = other DNA
atggccgaggccgagctgcacaaggagcggctgcaggccatcgccgaaaaaaggaaaagacagacagagatcgaagggaagagacagcagctggacgagcagatcctcctgttacagcatagcaagtcaaaagttctgcgggagaaatggctcttgcagggcattcctgccggtactgcagaggaagaggaggcccgccgccggcagagcgaggaggatgaatttcgggtcaaacagctcgaagataacatccagagactggagcaagaaatacagactcttgaaagcgaggagagtcagatttcagctaaggagcagattatcctagagaaactcaaggaaactgagaagtctttcaaggatttccagaaaggcttttcctcaactgatggcgacgctgtaaattatatcagcagtcaactccccgaccttcctattctgtgctctaggacagccgagccaagtcccggccaagacggtacctccagggcagccggcgtaggctgggagaacgtgttactaaaggaaggggagtccgcatctaatgctacagagacctcgggacccgatatgacaatcaagaagcctccacagttgagtgaggatgacatctggctaaaaagcgaaggggataattacagtgctacccttcttgaaccggccgccagctcgctttcccctgaccacaaaaacatggagatagaggtgtctgtggctgaatgtaagtccgtgccagggattacaagcacccctcaccctatggatcacccgtcagcattctactctccaccccataacggcctcctaaccgatcatcatgagtcgttggacaacgacgtggcgagggagattagatacctcgacgaagtgctggaagcaaactgctgtgattctgccgtggatggaacctacaacggaacgagcagtcctgaacctggagctgttgtactggtcggcgggctctccccaccggttcacgaggcgacacagcctgaacccactgagcggaccgcgtcgcgccaggcgccaccacacattgaactgtctaactcctcgcccgaccctatggccgaagcggaacgcaccaatggccactccccctcacagcctcgggacgcattaggagatagcttgcaggtgccggtatccccatcctccacaacatcctcacgctgttcttcgagagacggagagttcactctcacgacattgaaaaaggaagcgaaattcgaactgagggcctttcatgaagataaaaagccaagcaagcttttcgaggatgacgaacatgaaaaggaacagtactgtattcgaaaggtaagaccgtctgaggaaatgcttgagctggagaaggaacgccgggagctcattaggtcacaggccgtaaagaaaaatccaggcatcgcagcaaagtggtggaacccgccccaggaaaagacaatcgaagagcagctagatgaggagcaccttgagagccacaaaaagtacaaggagagaaaagaaaggcgtgcacaacaagagcagctgcttctgcagaagcagttgcaacagcagcaacaacaaccacccagccagttatgtacagctcctgctagcagccacgagcgtgcgtctatgattgataaggccaaagaggatatcgtgaccgagcaaattgacttttccgctgcccggaaacagttccagctgatggagaattcaagacaggcggtcgcaaaaggccagtcaaccccccggctgttcagcattaagcctttttacaggccactcgggtcagtgaactcagataagccactgacaaacccgagaccaccctccgtcggcggtcctcctgaggatagtggcgcatccgccgctaagggccagaagtctcccggcgcattagagactccaagcgctgctggatcacaaggtaacacagcgtctcaaggcaaagaaggcccatatagcgagcccagcaaaaggggcccgctgtccaaattatgggcagaggacggggagtttacgtccgcacgcgctgtattgacagttgtgaaggacgacgaccacggcatcctcgaccaattttcccgcagcgtgaatgtgtccctcactcaggaggagctggattctggtctggacgagttaagtgtccgcagtcaggatactacagtgctggagacactgtctaatgacttttctatggataatattagcgacagcggcgcttcgaatgaaaccactaacgccctgcaggaaaacagtctggcagactttagcctcccccagacccctcaaacggacaatccaagtgagggaaggggcgagggggtgtcgaagagcttttcagaccatggattttacagtccatcttcgactctgggagacagcccactggtggatgatccactggagtatcaggccgggctgctggtgcagaacgctattcagcaggcaattgctgaacaagtggataaggctgtcagcaaaacttccagggacggcgccgagcagcagggtccagaggcaaccgtcgaagaagccgaggctgctgccttcgggagcgaaaaaccccagtctatgtttgaacctccccaggtgagtagtcccgtgcaagagaaacgcgatgtcttgcctaaaatcctacccgctgaggatcgggctttgcgggagcggggacctcctcagccgcttcccgccgtccagccaagtgggcctattaacatggaagagacgcggcccgaggggtcttactttagcaaatatagcgaggcagctgagctccgatcgaccgcttccctactggcgacgcaggaatccgacgtgatggtagggccgtttaaactccggtcccggaaacaaaggactttgagtatgattgaagaggagattcgggcggctcaggagcgagaagaggagctaaaacggcagcgccaggtcctccaatcaactcagtccccacggactaagaacgcccccagcctgccctcccgcacttgctacaagaccgcaccaggaaagatagaaaaggttaaacctcctcccagtcctactacagaaggcccttcgctgcagcctgatttggctcccgaggaagcagctggaacgcagagaccaaagaatttgatgcaaacacttatggaagattatgagacacacaagtctaaacgacgcgagaggatggatgatagtagtgtcctcgaggccacaagggtgaataggcggaagtcggccctcgcattgcgttgggaggcaggaatctatgccaatcaggaggaggaggacaacgagtag

SEQ ID NO: 177488 - DNA, 3312 bp, synthetic construct
  misc_feature 1..3312: note = Description of Artificial Sequence: Synthetic coding sequence
  source 1..3312: mol_type = other DNA
atggccgaggccgagctgcacaaggagcggctgcaggccatcgccgagaaaagaaaaaggcagaccgagattgaggggaagaggcagcagctcgatgagcagatattgctcctccagcactcaaagtctaaggtgttgcgcgaaaaatggcttctacagggcattcccgccggaaccgccgaagaggaggaggctcgacggcgccagtccgaggaggacgaatttcgcgtgaaacagctggaggataatattcagcggctagagcaggagattcaaacactggaatcagaggaatctcaaatttctgctaaggaacaaattatacttgaaaaattgaaagaaaccgagaaatctttcaaggattttcagaaaggcttctcatccacagacggtgacgctgtgaactacataagttcccaactgcccgatcttccaattttatgttccaggacagcggaaccgagccctgggcaagatggaacgagccgtgcagcgggtgtgggctgggaaaacgtattgctaaaagagggtgagagtgcatccaatgcaaccgagactagcgggcctgatatgactataaaaaaacctcctcagctgtccgaggacgatatctggttgaagagtgaaggggataactactccgcaaccctgcttgagcccgccgcaagctccctgagtccagaccataaaaatatggaaatcgaggttagcgtcgccgaatgtaaatcagtacctgggattacaagtacaccccacccaatggaccaccccagtgcattctactcacctccacacaacgggttgttgactgaccaccacgagtctttggataacgacgtggcaagggagattagatacctggacgaggtccttgaggccaattgttgtgatagtgccgtcgacggcacttacaatgggacatcttcccccgaacccggagccgtcgtgctggtgggcggattgagcccacctgtgcatgaagccacccagccagaaccaaccgagcggacagcctctagacaagctccacctcatatagagttgtccaactcctcccccgatcccatggctgaggctgagagaaccaatgggcatagtccttctcagccacgggacgccctgggagactccttgcaagtgccagtctctccaagctctacgacatctagccgctgctccagccgcgacggagagttcactctgaccaccttaaagaaggaggccaaatttgaactacgagcttttcatgaagacaaaaagccctccaaactcttcgaggatgatgagcatgaaaaggaacaatactgtatacgcaaagtgagaccatccgaagagatgctggagctggagaaggagcgccgcgaactgatcagaagtcaagcggtgaaaaaaaatccgggcatcgccgccaagtggtggaatcccccccaggagaagaccattgaagagcaactggatgaagaacacttagaatctcacaaaaagtacaaggagcgaaaggagagacgggcccagcaagaacaattattgctgcagaagcaactacagcagcagcaacagcagcctccttcacagctgtgcaccgcccctgcttcatcccacgagcgcgcttccatgatagacaaggcaaaggaagatatcgtaactgaacagatcgatttcagtgccgctagaaagcagtttcaactaatggagaattctcgccaggctgttgctaagggccagtcgactcctcgcttattttccataaagcccttctatcgcccactgggatccgttaacagcgataagccgctgacaaaccctcggccaccttctgttggaggccccccagaggattctggcgcctccgccgctaagggtcagaagagccctggagcactggagaccccatccgccgcaggaagccagggcaatacagcgtcccagggcaaggaaggtccatattcagagccttccaagcggggaccactgtctaagttgtgggccgaagatggggagttcacctccgcccgggccgtattaactgtggtaaaggatgacgatcatgggattctggaccagttctcccgctccgtaaatgtttctttaactcaagaggagttggactcaggccttgacgagctatcagtccggagtcaggacactaccgtgctagagacgctctcgaacgattttagcatggataatatttcagatagcggggcctctaacgagactacaaacgcgctccaggaaaatagcctcgcagatttttctctcccacagactccccagactgacaatccgtcagaagggcgaggcgagggtgtgagtaaatcattttctgatcacggcttctacagtcccagctctaccctgggggattctccacttgttgatgacccgttggagtatcaagccggtctcctggtgcagaacgctatccagcaggccattgccgagcaggttgacaaggcagtgagtaaaacatcaagggacggtgctgagcagcagggccctgaggccacagtagaagaagccgaagccgcagccttcggctccgaaaaaccccagagcatgtttgagcctccacaggtatcctcccctgttcaggaaaagagagatgtgttaccaaagatactgccagccgaagatcgcgcactaagggaacgcggcccaccccagcccctgcccgcagtccagcctagcggcccgataaatatggaagagactcgtcccgaggggtcatatttttctaagtactctgaagccgccgaactccgctcaactgcaagcctattggcgacccaggagtccgacgtgatggtgggccctttcaagctccggagtcgcaaacagaggaccctgagcatgattgaagaagaaattcgggccgcccaagaaagggaggaagaactgaagcgtcaacggcaggtcctgcagagtacccagtctcccagaacgaaaaacgctccaagcctcccaagccgcacctgctacaagacggcacccggcaaaatagagaaggtaaagccccctccttcccctaccactgagggacctagcctccagcccgatttagcccctgaagaagccgccgggactcaacgaccaaaaaatttaatgcagactctcatggaagactacgaaacccacaaaagcaaacggcgcgaaaggatggacgattctagctatactagcaaactcctgtcttgcaaggtaacctccgaagtcctggaagcaaccagagttaaccgccgcaaatccgcactggccctgagatgggaggccggcatctacgcaaaccaggaggaagaagataatgaatag

SEQ ID NO: 177489 - DNA, 2886 bp, synthetic construct
  misc_feature 1..2886: note = Description of Artificial Sequence: Synthetic coding sequence
  source 1..2886: mol_type = other DNA
atgcggtggccccagcccggcgccgccgcccggctgccccccgagagtcctggacccccagaatcccccggaccccccgaacgagaggcagccgcggcacggaggtggactggcgccgaaccgcaggactgcgcccctgggagtgggcggcccgaaaagcctccgcagctgtccgaagacgacatctggttgaagagcgagggtgataattattccgctacactgcttgagcctgctgcatcaagcctctctccggatcacaagaacatggaaatagaggttagcgttgccgagtgcaagagcgtgccaggtatcacttcaacaccccacccgatggaccacccgtccgccttctactcgccgccccacaatggactcctgaccgaccaccatgaaagcctcgacaatgatgtggcccgtgaaattcggtatctggacgaggtcttggaagccaattgctgtgacagtgctgttgacgggacttataacgggacatcttctcccgagccgggagctgttgtgctagtgggaggtctgtcccctcccgtgcacgaggcaacccagcctgaacccaccgagaggactgcatccaggcaggcccccccgcacatcgaattatcaaactctagccctgacccaatggccgaagccgagaggactaacggccattcaccatctcagccccgggatgcattgggggattctctccaggttcccgtgagcccttcaagcaccacctctagccggtgctcatctcgggatggcgaattcaccctgactactctaaaaaaagaagcaaagtttgagctgagggctttccacgaggataaaaaaccgtctaaactgttcgaggatgatgagcacgagaaggagcagtactgtattagaaaggtgagaccctctgaagagatgttggaactggagaaggagaggcgagaactcatccgctcacaggcagtgaaaaagaatccaggaatcgcagctaagtggtggaaccccccacaggagaagactatcgaggaacagctggatgaagagcatctcgagagtcacaaaaaatacaaggaacggaaggaacggcgggcccagcaagaacagttgctgctccaaaagcagctacagcagcaacagcagcagccaccctctcaactctgcaccgctcccgcatcttcacatgaacgcgcgtctatgattgacaaggctaaagaagacatcgtgaccgaacagatagatttctcagccgctcgaaagcagttccagctgatggagaattcccgccaagctgtcgccaagggtcaaagcacccccagactcttcagcatcaaacccttttataggcctctgggatctgtgaattcagacaaaccattgactaacccccggcctccatccgtgggtggacccccagaggattccggcgcctctgccgccaaaggacaaaagagtccaggcgcccttgaaaccccctccgccgcggggagccagggcaacactgcctcccaaggtaaggagggcccttacagtgaaccatccaagaggggtcctctctctaagctgtgggcagaagatggagagttcacctcggctcgagccgtgctgaccgtcgtgaaggacgatgaccatggcatcctggaccagttttcccggagcgttaacgttagtcttacacaggaggagctggacagcggcttagacgaactgagtgtgaggagtcaggacactaccgttctcgagacgctgtctaatgacttctccatggataatatcagcgactccggcgcatctaacgagacaacgaacgccttgcaggagaacagtctggcagatttttccttgcctcagaccccacagacagataatccaagtgaggggcgtggagaaggagtatcaaagagcttcagcgatcacggcttttatagtccatccagtactctgggcgattcacctttggtcgatgatcccttggaataccaggctggtctcctggtgcaaaatgccatccagcaggcgatcgccgaacaggtcgacaaggccgtctccaagacttctagagacggagcggaacaacaggggccagaagccacagtggaggaggcagaagctgctgcctttggcagcgaaaagccccagagcatgttcgaacctccacaggtgagctcccccgttcaggaaaaaagagatgtgctgccaaaaatcctgccagcagaagatagggctttgagggagcgtggcccgccccagccactccccgcagtgcagccttcgggacccattaacatggaggagactaggcccgagggctcatatttctcaaaatactctgaggccgcggaactgaggagtactgcttcgctgctggctacacaagaaagtgacgtgatggtggggccttttaagctcagatcaagaaagcagcggactttaagtatgatagaggaagagattagagccgctcaggagcgtgaggaagaactgaagcgccaacggcaggtccttcagtcaacacaaagtcctcggaccaaaaatgcccccagtctgcccagcaggacctgttataaaactgccccgggaaaaattgagaaggtgaagccccccccgagtcctactacggaaggcccttctctacagccggacctggccccagaggaggccgccggcactcagaggcctaagaatttgatgcagaccctcatggaggactacgaaacacacaagtcgaagcgacgcgaacggatggacgattcctcatatactagtaagttgctctcttgtaaggtgacgagtgaagttctagaagctacccgcgtgaaccgcagaaaatccgcattggctctacgatgggaagctggaatttacgctaaccaggaggaagaagataatgagtag

SEQ ID NO: 177490 - DNA, 2565 bp, synthetic construct
  misc_feature 1..2565: note = Description of Artificial Sequence: Synthetic coding sequence
  source 1..2565: mol_type = other DNA
atgatggcctacagcgacaccaccatgatgagcgacgacatcgactggcttagatcccatcggggggtgtgcaaggtggacctctacaatcccgaggggcagcaagatcaggataggaaggtcatttgttttgtagacgtaagcactcttaatgtggaagacaaggattacaaagatgccgcgtcaagttctagtgagggtaacctgaacctgggatccctggaagaaaaggagattatcgtcatcaaggatacagagaaaaaggatcaaagtaagacagaggggtctgtttgcctctttaagcaggctcccagcgatccagtgtctgtactgaactggctcctttccgacctgcagaaatacgccctcggcttccagcacgccctcagcccttctacgagtacctgtaagcacaaagtcggcgacactgagggtgaataccatcgagctagctctgagaattgttattccgtgtacgcggatcaagtgaacattgactacttgatgaatcggccccagaacctgagactcgagatgaccgctgcaaaaaatacgaataataatcagagtccgtccgcccccccagccaagcctcctagcacccaacgggccgttatcagccctgatggggagtgcagcatagacgatcttagtttttatgtaaaccggctctctagtctggtgatccagatggcccataaggagataaaagagaagctcgagggcaagtccaagtgcctccatcactccatctgccccagccccggaaacaaagaacggatatccccccggacgcccgcaagcaaaattgctagcgagatggcttatgaggccgtagagctcactgcggctgagatgcgcggcacgggggaagagtcaagggagggcggccagaagtccttcctgtactctgagctgtctaataagagtaagtctggcgataaacagatgtcccagcgggagtccaaagaatttgctgactccatttccaaaggcctcatggtgtatgctaatcaagtcgcaagtgatatgatggtcagcttgatgaagacactgaaagtccactcttccggcaagcccatacctgccagcgtggttctgaagcgtgtgctcctccgacacaccaaagaaatcgtgtcagatctgattgacagttgtatgaaaaacctgcacaacatcaccggcgtattgatgactgatagtgacttcgtctctgcagtgaaacggaacctgttcaatcaatggaagcagaatgcaacagacatcatggaagccatgttgaagcgccttgtgagtgcacttatcggcgaagaaaaggaaacaaaatctcagtcactcagctatgccagtttgaaggccggatcacatgatcctaaatgccggaaccagtcactagaatttagcactatgaaggcagaaatgaaagaacgagataagggaaaaatgaagagcgatccatgcaagagcctgacaagcgctgaaaaggtgggtgaacacattttaaaggaggggttgaccatttggaaccagaaacagggcaatagctgcaaagtcgcaacgaaggcttgctccaataaggacgagaagggcgagaagattaacgcttcaacagactcacttgctaaagacctgatcgtgtctgcactgaaattaatccaatatcacctcactcagcagacaaagggaaaagatacatgcgaagaagattgtcctggctcgaccatgggatacatggcacagtctacacaatacgagaagtgcgggggcggtcagtctgctaaagcactgtctgttaaacagctggagtcccatagggcaccaggaccctccacttgccagaaagagaaccagcacttagactcccagaagatggacatgtctaatatcgttcttatgctcattcaaaaattgctcaatgaaaacccattcaagtgcgaggacccttgcgagggagaaaacaagtgttcagagcccagagcttctaaagctgcctctatgtctaaccgttccgataaggctgaagagcaatgccaggagcatcaggagctggactgcacctccggtatgaaacaggcgaatggacagttcatcgacaaattagtggagtctgtgatgaaactctgtctgatcatggcaaaatactccaatgatggggcggccctcgccgaacttgaggagcaggcggcgagcgccaacaagcccaacttccggggaactcgctgcatccactctggggccatgccccagaattaccaggacagcctgggccacgaggtgatagtcaataatcaatgcagcactaacagcctccagaagcagctccaagcggtcctgcagtggatcgcggccagccagttcaatgttccaatgctgtattttatgggggataaggatgggcaactggagaaattacctcaggtgtcagctaaggcggccgaaaagggatatagtgtgggagggctgctccaggaggttatgaagttcgctaaggaaagacagccagacgaagcggtgggcaaagtagctcggaaacagcttctggactggctgttggctaatctttag

SEQ ID NO: 177491 - DNA, 2538 bp, synthetic construct
  misc_feature 1..2538: note = Description of Artificial Sequence: Synthetic coding sequence
  source 1..2538: mol_type = other DNA
atgagcgacgacatcgactggctgcggagccaccggggcgtgtgcaaggtcgatctgtacaatcctgaaggccagcaggatcaggaccgcaaggtaatctgctttgtcgatgtgagcactttaaatgtcgaagataaagattataaagatgccgcatcttcctcctcagagggcaacctgaacctggggtcccttgaggaaaaagaaataattgtcatcaaggacaccgagaaaaaagaccagtctaagacagagggatctgtctgtttgtttaagcaggccccctccgatcctgtctctgtgctcaactggctgctgtctgatttacaaaagtacgccctcgggtttcagcacgcactgtctccatccaccagcacctgcaagcataaggtgggggatactgaaggtgaataccatcgggcttcatccgagaattgttattcggtctacgctgatcaagtgaatatcgactacctgatgaacagaccccagaatttgagactcgagatgaccgccgccaaaaataccaataacaatcaaagtccgtctgctccgcctgcgaaacctccctctacccagcgagcagtaatatccccggacggagagtgcagcattgacgacttaagcttttacgtgaacaggctgtcgtcgctcgtaatccagatggcgcacaaggaaataaaggaaaaacttgagggtaagtctaagtgcctccaccacagcatttgtcccagccctggaaataaagaaaggatcagccctcgaacacctgcctctaagatcgcttccgaaatggcgtacgaagccgttgagcttacagctgccgagatgcggggaactggagaagagtcacgggagggcggacagaagagctttttgtactcagagttgagtaataagtctaagtctggcgataagcagatgtcgcagcgggagtccaaagagttcgcagatagtatttccaagggccttatggtctacgccaaccaggtggcctctgacatgatggtttctctcatgaaaaccctgaaagtgcacagcagtggaaagcccattcctgcctccgtggtcctgaaacgggtgctattaagacacacgaaagagatagtgagtgatctgatcgattcctgcatgaaaaacctgcacaatatcactggagtcttgatgacggattctgacttcgtgtctgctgtgaagcgcaacctcttcaatcagtggaagcaaaacgcgactgacatcatggaagccatgctgaaacgcctggttagcgctctgatcggtgaagaaaaagagacgaagagccagagtctttcatacgcttccttaaaagcggggtcacatgaccccaagtgccgcaaccagtctctggagtttagcaccatgaaggcagaaatgaaagagagggacaagggcaagatgaagtcggacccatgcaagtctctaacctccgctgagaaagtgggtgagcatatcctcaaggaggggcttacaatctggaaccagaaacagggcaatagctgtaaggtggcgaccaaggcctgcagcaacaaagacgagaagggcgagaagattaacgcttcaacagacagtttagctaaggacttgattgtgtctgcactgaagctgattcagtaccaccttacacagcagacgaagggcaaggatacctgcgaggaagactgcccaggtagcaccatgggttacatggctcagtctacccaatatgagaagtgcggcgggggacagagtgccaaagcactctcagtcaaacagttggagtctcacagggcacccggaccctccacctgccaaaaggagaaccagcatttggattcacagaagatggacatgtctaacatcgtgcttatgttgattcagaagctcctgaacgagaatccattcaagtgtgaggatccgtgcgagggggagaataaatgctccgaaccgcgcgccagcaaggcagcaagtatgtccaaccgctctgataaggctgaagaacagtgccaggaacatcaggagctggactgcaccagcggcatgaagcaggctaatgggcagtttattgataagctagttgaatccgtaatgaagctttgtctgatcatggctaagtacagcaatgatggggctgccctcgctgagctggaagaacaggcagcctccgccaacaaaccaaacttccggggaacacgctgtattcacagcggcgctatgccacagaattatcaggattccctgggacatgaagtcattgttaataaccaatgtagcacaaactcactccagaagcaactgcaagcggtcctgcagtggattgctgcaagccagtttaacgtgccaatgctttacttcatgggtgacaaagacggccagcttgagaaactgccccaggtctctgccaaggctgcggaaaagggttactccgtgggcggcctacttcaggaagtgatgaagttcgccaaagaaagacaacccgacgaggccgttggaaaggttgcccgtaaacagctactcgattggcttcttgccaatttatag

SEQ ID NO: 177492 - DNA, 1416 bp, synthetic construct
  misc_feature 1..1416: note = Description of Artificial Sequence: Synthetic coding sequence
  source 1..1416: mol_type = other DNA
atgagcgacgacatcgactggctgcggagccaccggggcgtgtgcaaagtggacctctacaatcctgaaggtcagcaagatcaagatagaaaggtgatctgttttgtggacgtgtccaccctgaatgtggaggataaggattataaggacgccgcttcaagcagcagtgagggcaacctgaaccttggttcattagaggagaaagagatcattgttattaaagacaccgaaaaaaaagaccagagtaagacggagggctctgtctgcttattcaagcaggccccctcagaccctgtgagtgtactgaactggctgttgtcagatctgcagaagtatgcactgggttttcagcacgcgctgtctcctagtacaagcacctgtaaacacaaagttggtgacactgaaggcgaataccaccgcgcaagctcagagaattgctatagcgtctacgctgatcaggtgaacattgattatctgatgaatcggccacaaaatctccgcctcgaaatgacagcggctaaaaacaccaacaacaaccagaacacatgcgaggaggactgtccaggatctacaatggggtacatggcacaatcaacccagtacgaaaaatgtggtggaggccagagcgccaaggcgttatcagtgaagcaactggaatcccaccgggctccgggaccttcaacttgccagaaagagaatcagcatctagactcccagaagatggacatgtcgaacatcgtgctcatgcttattcaaaagctcctcaacgagaatccttttaaatgtgaggatccgtgcgagggagaaaacaaatgctccgagccgagagctagtaaggccgccagcatgtcaaacaggtctgataaagccgaggagcagtgtcaagaacatcaggagctggattgcacctccggaatgaagcaggctaatggccagtttatagacaaacttgtggaatcagtaatgaagctgtgtctcattatggccaaatattctaatgatggcgcagcgctggcagaactagaagaacaggctgcaagcgccaacaagccaaactttcgggggacgcgctgtatccactcaggtgctatgccccagaactaccaagattctctgggacacgaggtgatcgttaataatcagtgctcaacaaactctctccagaaacaactccaagctgtgctgcagtggatcgccgcctctcagttcaacgtcccaatgctgtacttcatgggcgacaaggacggccaactggaaaagctgccccaagtgtccgccaaagccgctgaaaagggatactccgtgggagggctgctgcaagaggtgatgaagttcgcaaaagagagacagccagatgaagccgtaggtaaggtggctcgaaaacagttactggactggctcctggccaacttatag

SEQ ID NO: 177493 - DNA, 2538 bp, synthetic construct
  misc_feature 1..2538: note = Description of Artificial Sequence: Synthetic coding sequence
  source 1..2538: mol_type = other DNA
atgagcgacgacatcgactggctgcggagccaccggggcgtgtgcaaggtcgatctctataacccagagggacagcaggaccaagaccggaaagttatctgttttgtggacgtctccacactgaatgtagaggataaagattataaggatgccgccagctcctcctcagagggtaatctcaatcttggttccctcgaggagaaggagatcatcgtgataaaagacacagagaagaaagaccagtccaagaccgaggggtccgtctgtctgttcaagcaggctccctctgatccagtaagcgttctgaactggcttctgtcggatctgcagaagtacgcattagggtttcagcacgcactctcgccatccacatccacgtgcaaacacaaagtgggcgacactgagggagagtaccaccgcgcttcaagtgaaaactgctattccgtttacgcagatcaggttaatatcgattatctaatgaatcggccacagaacctaaggttggaaatgacggcggctaaaaatacaaacaacaaccagtccccgtccgctcctcccgcaaagccgccgtccacacagcgtgcagtgatcagccctgacggggagtgcagcatcgacgatctctctttttatgttaaccgtctcagctccctggttatccaaatggcccataaggagataaaagagaaactagagggcaaatccaaatgcctgcatcattcaatttgcccctctccaggcaacaaagagagaatctccccaagaactccagcatcaaagatcgcttccgagatggcctacgaagccgtcgagctcacagccgcagaaatgcggggtaccggagaggagagcagagagggcgggcagaaatcattcctctactctgaactcagcaacaaatctaagtctggcgacaagcaaatgtcgcagagagagagcaaggagttcgcggatagtatcagtaagggccttatggtttatgcgaaccaggttgcctctgatatgatggtgagtctgatgaaaaccctcaaggtccactcctcaggcaaaccgattcccgccagcgtggttctgaagagggtgcttctccggcatactaaggagattgtttccgacctgatcgactcatgtatgaagaatctgcataatatcacaggagtgctgatgacagattccgactttgtctccgctgtgaagaggaacctgtttaaccagtggaaacagaacgcaacggatatcatggaggctatgttaaaacgtctggtcagtgcactcatcggggaggagaaagaaactaagtcccagagcctgtcctacgcctccctgaaggctggttcccacgatccgaaatgcaggaatcaatccttagagttcagcactatgaaggctgagatgaaagagcgtgataagggtaagatgaagtccgacccttgtaaaagcctgactagcgccgaaaaggtcggggaacatattctgaaggaaggtctgactatttggaatcagaagcaggggaatagttgcaaagtcgcaacaaaggcatgctccaacaaggatgagaagggcgagaagatcaatgcctcgacagactcactcgcaaaagacctaatcgtgtcggccctgaaactgattcagtaccacctcacacagcagaccaagggaaaggatacctgcgaagaggattgccccggctctacgatgggatacatggcacagtccacccaatacgagaaatgcggcggagggcaatccgctaaggccttgagcgttaagcagctagaatcccaccgcgcacccggcccttctacttgccaaaaggagaatcagcacttggattcccagaagatggacatgtccaatatcgtgctcatgctgatacaaaaactgcttaatgagaatccctttaagtgcgaggacccgtgcgagggggagaataagtgctctgagcccagggccagtaaagcagcttccatgtctaatcgctcagataaggccgaggagcagtgccaggaacatcaggaactggactgcacgtctggaatgaaacaggctaacggccagtttatcgataaactggtagaatctgtgatgaaattgtgccttataatggcaaaatactctaacgacggtgctgctctggcggagttggaggagcaggccgcttccgccaataagcccaatttcagaggaacacggtgcatccattcgggcgcaatgcctcagaactaccaggacagcctggggcacgaggttatcgtgaacaaccaatgctcgaccaactcactgcagaagcagttgcaagcagtgctgcagtggattgccgctagccagtttaatgtaccaatgctttacttcatgggcgataaagacgggcagcttgaaaaactgccgcaagtgtcagctaaagccgcagaaaaagggtatagcgtggggggcctcctgcaggaggttatgaaatttgccaaagaacgacagccagacgaagctgtgggtaaagtggctcggaaacagctgctcgattggctgttagctaacctatag

SEQ ID NO: 177494 - DNA, 765 bp, synthetic construct
  misc_feature 1..765: note = Description of Artificial Sequence: Synthetic coding sequence
  source 1..765: mol_type = other DNA
atgagcgacgacatcgactggctgcggagccaccggggcgtgtgcaaagtagacctctacaacccggagggccagcaggaccaggatcggaaggtcatatgctttgtggacgtctctacgctgaacgtggaagacaaggattacaaggacgcagctagcagttcatctgaaggaaatctaaatcttgggtccctggaggagaaagaaatcattgttattaaggacactgagaagaaagatcagtccaagactgaaggctcagtgtgtctgttcaaacaagctcctagcgaccccgtgagtgtcctcaactggttgctgtctgatcttcagaaatatgcactcggcttccagcatgctctatccccatccacctcaacctgcaagcacaaggtgggcgataccgaaggcgagtatcaccgggcatcaagcgaaaattgctattccgtgtatgcagaccaggtcaatatagactacctcatgaaccggccccagaatctccggctggagatgaccgcagccaagaatactaacaataaccagtctccttcagcgccacccgccaaacctcctagtactcagcgggccgtaatttcccctgacggggaatgttctatcgacgacctgtccttttacgtgaaccgactgagttccctcgtgatccaaatggcccacaaggaaattaaagaaaaactggaaggcaagagcaagtgccttcatcactcgatatgcccctctcccggtaacaaggagcggatcagcccttag

SEQ ID NO: 177495 - DNA, 642 bp, synthetic construct
  misc_feature 1..642: note = Description of Artificial Sequence: Synthetic coding sequence
  source 1..642: mol_type = other DNA
atgagcgacgacatcgactggctgcggagccaccggggcgtgtgcaaagtggatctatacaacccagagggccagcaagatcaggatagaaaggtgatctgctttgtcgacgtatctactctcaacgtggaagataaggattataaggacgccgctagttcttcgtccgagggaaatctcaacctggggtccctcgaggagaaggaaatcatcgtcattaaagatacagaaaagaaagatcaatccaagaccgaaggtagtgtgtgtctcttcaagcaggctccgtccgacccagtgtctgttcttaactggctgttaagcgacctgcagaagtacgctctagggtttcagcatgccctctcccctagcacttcaacatgtaagcacaaagtgggggacacagaaggggaataccatcgtgctagctcggagaactgttactccgtctatgccgatcaggtaaacatagactacctgatgaatcgccctcagaatcttcgactcgaaatgactgccgccaagaacaccaacaacaaccaaaatacctgcgaggaagactgcccaggatctaccatggggtatatggcccaatccactcaatacgagaagtgcggaggaggccaatctgccaaggccttgtag

SEQ ID NO: 177496 - DNA, 552 bp, synthetic construct
  misc_feature 1..552: note = Description of Artificial Sequence: Synthetic coding sequence
  source 1..552: mol_type = other DNA
atggacaactgcctggccgccgccgccctgaacggcgtggaccggcgatcactccagaggtcggccagactcgccttagaagtgctcgagcgagctaaacggcgcgcggtggactggcacgctttggagcggcctaaaggatgcatgggggtgctggctcgagaggcaccgcatctggagaagcagcctgccgccggtccccagcgcgttctgcctggggagaaatattatagcagcgtccccgaggagggcggtgcgacccatgtgtataggtatcaccgcggggagtccaaacttcacatgtgcttggatatcggaaatgggcagcgaaaggacaggaaaaagacgtctctcggtcctggcgggtcttaccagatctccgagcacgccccagaagcatctcagccagccgagaatatctcgaaggacctgtacatcgaggtttacccaggcacatattccgttaccgtaggctccaatgacctgacaaaaaaaacacacgtagtggcagtcgacagcgggcaatcagtggaccttgtatttcccgtgtag

SEQ ID NO: 177497 - DNA, 552 bp, synthetic construct
  misc_feature 1..552: note = Description of Artificial Sequence: Synthetic coding sequence
  source 1..552: mol_type = other DNA
atggacaactgcctggccgccgccgccctgaacggcgtggaccggcggagtcttcagcgttcagcgcggctggcactggaggtgctcgaaagggcaaaaaggcgagcggtcgattggcacgctttggaacggcctaaagggtgcatgggagtgcttgcacgcgaggcaccccacctggagaaacagcctgccgctggaccacagagggtgctgccaggcgaacgtgaagagagaccccctaccttatcggcttcatttcgcacaatggctgagttcatggactacacaagctcacaatgtggcaaatattactcatccgtccctgaagagggcggcgctacccatgtctatcggtaccatcgcggggaaagcaagctacacatgtgcttggatattgggaacggacaagctgaaaacatatccaaagacctatatatcgaggtttatccaggcacgtattcggtgacagttggaagtaatgacctgaccaaaaaaacacacgtggtagcagtcgactcgggtcagtcagtagatctggtctttccagtgtag

SEQ ID NO: 177498 - DNA, 633 bp, synthetic construct
  misc_feature 1..633: note = Description of Artificial Sequence: Synthetic coding sequence
  source 1..633: mol_type = other DNA
atggacaactgcctggccgccgccgccctgaacggcgtggaccggcggagcttgcagcggtccgcacgcctggctcttgaggtgctggagagggccaaaagaagggcagtggactggcatgccctcgagcgccctaaagggtgtatgggagtcttggctcgagaagcaccccacctcgaaaaacagccagcagcaggccctcagcgcgttctgccaggcgaaagagaggagaggcctcctacactatcagcatctttccgaaccatggctgagtttatggactacacctccagccagtgtgggaagtattacagctcagtgcccgaagaggggggagcaacgcatgtctacagataccaccggggcgaatccaagctacacatgtgcttggacatcggcaatggacaacgtaaggatcgtaagaaaacatccctggggcctggggggagctatcaaatttcagagcacgctccagaggcctctcagcccgccgagaacatcagcaaagatctctatatcgaggtatatcccggcacctacagtgttaccgtggggtccaacgatttgactaaaaaaacccacgtcgttgcagtggactcaggccagagcgttgatctggtgttcccagtgtag

SEQ ID NO: 177499 - DNA, 552 bp, synthetic construct
  misc_feature 1..552: note = Description of Artificial Sequence: Synthetic coding sequence
  source 1..552: mol_type = other DNA
atggacaactgcctggccgccgccgccctgaacggcgtggaccggaggtcgttacaaagaagtgcccggctggctctcgaagtgcttgagagagccaagagaagggctgtcgactggcacgccctggagcgcccgaagggctgtatgggcgtgctggccagggaggcccctcacctggagaaacagccagccgcagggcctcaaagggttctccctggcgaaaagtactactcatctgtgccagaggaaggcggggccacccacgtgtatcgttaccatcgcggagagtcaaaactccatatgtgcttggatatcggtaacggtcagcgcaaagaccgcaagaagacttcactcggccctggtggtagctaccaaatctctgaacatgctcctgaggcatcccagccagccgaaaatatttctaaggacttgtacattgaggtctacccgggtacctattcagtgaccgtgggtagtaacgatctcaccaaaaaaacacacgtggtggcagtggattctggtcagtcagtggacctggtgtttcccgtgtag

SEQ ID NO: 177500 - DNA, 633 bp, synthetic construct
  misc_feature 1..633: note = Description of Artificial Sequence: Synthetic coding sequence
  source 1..633: mol_type = other DNA
atggacaactgcctggccgccgccgccctgaacggcgtggaccggcgtagcttacaacgtagcgctagactcgctctcgaggtgttagagagggccaagcgccgtgcagtggactggcatgccttagagcgaccaaagggatgtatgggcgtcctggcacgagaggcgccgcacttggaaaaacagccagctgcgggaccacagcgcgtccttccaggcgagcgggaggagcgcccgccaactctatccgcctcattcagaactatggctgagttcatggactataccagcagccagtgtggcaagtactactcttcagttcctgaggagggaggtgccacccatgtgtataggtaccaccgcggggagagtaagttgcacatgtgtctagatatcgggaatgggcagaggaaggaccgcaaaaaaaccagtctgggccctggggggtcttatcagatttcggagcacgctccagaagcttcccagcctgccgagaacatctcaaaagacttgtacattgaagtgtaccctgggacctatagtgttactgtaggcagcaacgacctgaccaaaaaaacccatgttgtggctgttgatagtggacaaagcgtggacctggtgtttcctgtttag

SEQ ID NO: 177501 - DNA, 1479 bp, synthetic construct
  misc_feature 1..1479: note = Description of Artificial Sequence: Synthetic coding sequence
  source 1..1479: mol_type = other DNA
atgggcttccagcggcggttcttccaccaggaccagagccccgtggggggcctaacagctgaagatatagagaaagcccggcaggctaaagctcggcccgagaacaagcagcacaagcagaccctgtcagagcacgctcgggaacgaaaggtgccagtcacacgaattgggaggctggccaatttcggtggcctggctgtggggctcggctttggcgctttggccgaagtggccaaaaagtctctgcgcagcgaggacccatctggaaagaaagcggtcctcggctcttcacccttcttgagcgaagcgaacgccgagcgaatagtccggaccctgtgtaaggtgcggggtgccgctctcaaactggggcagatgcttagtatacaggacgacgcattcatcaatccacacctggctaagattttcgagcgggtgcgtcagtctgccgattttatgcccctgaaacagatgatgaaaactttgaacaatgaccttgggcccaactggcgtgataagcttgagtattttgaggagaggcctttcgctgcggcctctatagggcaggtccacttagccagaatgaaggggggcagggaagtcgcaatgaagatccagtaccctggcgtggcacagagtataaatagtgacgtcaacaacctgatggctgtcctcaacatgtctaacatgctgcctgaaggtctcttcccagaacatctaattgacgtgctccgcagagaactggctctagagtgcgattaccagcgcgaggcggcatgcgcaagaaagttcagggacctgctgaagggccacccgttcttctacgtgccggaaattgttgatgagttatgttcacctcatgtcctgaccactgagctggttagcggtttcccgcttgaccaggcagagggactgtcccaggagattcggaatgaaatttgttacaacatcctcgttctctgcctccgcgaattgtttgagtttcacttcatgcagacggacccaaactggtccaattttttctatgatcctcagcagcataaggtcgcccttctagatttcggagctaccagagagtatgataggagcttcacagatctgtacatccagattatccgggcagcggctgatagagatcgggagaccgtgagggctaaatctatcgaaatgaagttcctcactggctatgaggtcaaggtaatggaagacgcacacctggacgccatcctgatccttggagaggccttcgcgtcggatgagcccttcgatttcggcactcagtctacgacagaaaaaatccacaatctcatcccggtcatgctgcgccacaggctggtgccaccaccagaagaaacctatagcttgcatcggaagatgggcgggagtttcctgatttgcagcaaattgaaggctcgttttccttgcaaggcaatgtttgaggaagcatatagtaactattgcaagaggcaggcgcagcagtag

SEQ ID NO: 177502 - DNA, 1719 bp, synthetic construct
  misc_feature 1..1719: note = Description of Artificial Sequence: Synthetic coding sequence
  source 1..1719: mol_type = other DNA
atggccgccatcctgggcgacaccatcatggtggccaagggcctggtgaagctaacccaggcagcagttgaaactcatttgcagcaccttggaataggtggcgagctgataatgggccccgccccagcttatgttgcttccgggccgttcagggaggcgggatttcctggccaggcttcttctcctctgggaagagcaaacggccgactctttgctaatcctcgagacagcttctctgcaatgggattccaaagaaggttctttcatcaagatcaaagtcctgtgggcggcttgaccgctgaagacatcgagaaggctcggcaggccaaggcgagacccgagaacaagcaacacaaacaaacgctgagcgaacacgcccgggaacgtaaagttccagttacgcgtattggacggctggccaactttggaggtctcgcagttggattgggcttcggcgctctggctgaagtggcaaaaaaatctctgcgatctgaagatccttccggcaagaaggccgtattgggttcctccccttttttgagtgaagctaacgctgagcggatcgtaagaacattatgcaaggtgcgcggcgccgctttaaagctgggccagatgctgagtatacaagacgatgcttttatcaacccccatctcgccaagatattcgaacgagtgaggcagtcagccgatttcatgccgcttaagcaaatgatgaaaactctcaataacgacctgggccctaattggagggacaaactggagtattttgaggaaaggccgttcgccgcagctagcatcggccaggtgcatcttgcacggatgaaagggggtagggaggtggctatgaagatccagtatccgggcgtggcgcagagcattaattccgatgtgaataacctgatggccgttttaaacatgagcaacatgttacccgagggactgttccctgagcatctaatagacgttctgcgtcgcgagctggctctggaatgtgactaccaacgcgaggctgcttgcgctcgcaagttcagagatctgctcaaaggacatccgttcttctatgtgcctgaaattgtggacgaactgtgttcaccccacgtccttacgaccgagctagttagcgggttccctctggatcaggctgagggactgtcccaggagatccgcaacgaaatctgctataatatcctagtcctgtgtctgagggaactcttcgaattccactttatgcagaccgacccaaactggtctaattttttctacgatcctcagcaacataaggtggctttgttggatttcggagctaccagagagtatgatcggagctttactgatctgtacatccagataattagagccgcagccgatcgcgaccgcgaaaccgtgcgggccaagtctatcgagatgaagttcctgacaggatatgaggtgaaagtcatggaggatgcacacctggatgcgattctcattctgggagaagcttttgccagcgacgaaccatttgatttcggaacacagtccactaccgaaaagattcataatcttatacccgtgatgctccgccaccggctcgtccccccccccgaggagacgtacagcctgcatcgcaaaatgggtggtagcttcctgatttgcagcaagctaaaggcaagatttccttgtaaagcaatgtttgaagaagcgtattcaaattactgcaagcgccaggcacagcaatag

SEQ ID NO: 177503 - DNA, 1944 bp, synthetic construct
  misc_feature 1..1944: note = Description of Artificial Sequence: Synthetic coding sequence
  source 1..1944: mol_type = other DNA
atggccgccatcctgggcgacaccatcatggtggccaagggcctggtcaagcttacccaagccgctgtggagactcacctacaacacttgggaattggtggcgaactaattatggccgccagagctctccagtcaactgctgtggaacagatcggaatgttcctgggcaaggtgcagggacaggataagcacgaggagtacttcgcagaaaacttcggtggacctgaaggggaatttcatttctctgtacctcacgccgccggcgcaagtaccgatttttcatccgcttcggccccagaccaatctgccccaccctcgctgggtcatgcccattcagaaggccctgcgcctgcatacgtggcgtctggtccattcagggaggccggcttccctggacaggcctcttctccactgggacgggccaatggtaggctctttgcaaaccccagagatagcttttccgctatgggctttcagcgccggttcttccaccaggatcagtcccctgtcggaggtttgaccgcagaagacatcgagaaggcaagacaggctaaagccaggccagagaataaacaacacaagcagaccttgagtgagcacgcccgcgaaagaaaggttccagtcaccaggataggcagactagccaacttcggagggcttgcagtgggcctcggtttcggcgcactcgccgaagtggccaagaaatcgctgcgatccgaagacccgtcaggaaagaaggctgtactgggtagctcccccttcctgagcgaagcaaacgctgagaggattgtgaggaccctgtgtaaggtgagaggcgcagcgttgaagctcgggcagatgctctctattcaggacgacgcctttataaacccacacctggccaagattttcgaacgcgtaagacagagtgctgatttcatgccactgaagcagatgatgaagactctgaacaacgacctgggccccaattggcgcgacaagttggaatacttcgaggagcggccattcgcggcagcttcaataggccaggtccatttggctcggatgaaaggggggcgcgaggttgctatgaaaatccagtatccaggcgtagcacagagtatcaacagcgatgttaacaacctgatggcagtgctgaatatgtccaacatgttacctgagggcctattccctgaacacctaatcgacgtgttacgccgagagttggccctggaatgcgactaccagagggaggccgcctgtgcccgcaagtttcgcgacctgctcaaggggcatccatttttctacgtgcctgagatcgtggatgagctgtgttcgcctcacgttctgaccacggagctcgtcagtgggtttcccttggaccaggctgaaggcctatcccaagaaattaggaacgaaatctgctacaacatcctcgtgctgtgcttgcgcgagttgtttgagtttcacttcatgcagactgatccaaattggtcgaacttcttctacgatcctcagcaacacaaggtcgctctcctggactttggagcaacaagagaatatgatcgcagtttcaccgacctctacatacagataattagagctgctgcggaccgagaccgggagacggtgcgagcaaaatctatagaaatgaaattcctgaccggctatgaggtgaaggttatggaggacgcccacctggacgccatccttatactgggggaggcctttgcttcggatgaaccgtttgatttcggcacacagtcaactaccgagaagattcataatctaataccggtgatgcttcgacacagacttgtgcctcctccagaagagacctactctcttcatcgaaaaatggggggtagcttcttaatctgctcgaaactgaaggcgagattcccttgcaaggctatgtttgaagaggcatactccaattactgtaaacggcaagcacagcaatag

SEQ ID NO: 177504 - DNA, 1788 bp, synthetic construct
  misc_feature 1..1788: note = Description of Artificial Sequence: Synthetic coding sequence
  source 1..1788: mol_type = other DNA
atgttcctgggcaaggtgcagggccaggacaagcacgaggagtacttcgcagagaacttcggaggcccggaaggagagttccacttctcagtaccgcacgcagctggggcctccacggattttagctccgcgagtgccccagaccagagtgcccctccaagtcttgggcatgcgcatagtgagggcccggccccagcctacgtcgcttctggcccctttcgggaggcagggttcccgggacaggcatctagtccactcggtcgtgccaatggacgcttgttcgctaacccgcgagactccttcagcgcaatgggcttccagaggcggttttttcaccaagaccagtctccagtgggcgggctcaccgcggaggatatcgaaaaggctaggcaggcaaaagcccgtcccgagaacaagcagcacaagcagaccctgtccgagcatgccagagagcgcaaggtaccggttactcggatcgggcgcctggcaaattttggcggtcttgccgtcggacttggatttggagccctggcagaggtggccaagaaatctctccggagcgaggatccgtccggcaagaaagcagtactaggtagctctccgtttctgtccgaggctaatgccgaacgcatagttaggacactttgcaaggtgaggggagccgcccttaaactcgggcaaatgctgtctatacaggacgacgcttttatcaatccgcatttagccaagatcttcgagcgtgtccgacagtcagcggatttcatgcccctcaagcagatgatgaaaacgctgaacaatgaccttggccccaattggcgggacaagctcgaatacttcgaagagcggccctttgcagccgcgagcataggccaggttcacctagctcgcatgaagggcggaagggaggtggctatgaaaatccagtaccccggcgtggcccaaagcatcaactccgatgtgaataatctgatggcagtactcaatatgagtaacatgctaccagagggtctgtttcctgaacatctgatcgatgtgctgcgtcgcgagctggccttggagtgcgattaccagcgtgaggcagcctgtgctagaaagtttcgagatctgcttaaggggcacccattcttctacgtgcctgaaattgtggacgaactttgcagcccacacgtactaaccacagaactggtttctgggtttcctctggaccaggccgaggggctttctcaggagatcagaaatgagatatgctacaacatcttagtcctctgcctgagagagcttttcgaattccacttcatgcaaacggaccctaattggtcaaactttttttatgacccccagcagcataaagtggcgctgcttgacttcggcgcaaccagagagtacgaccgctcatttactgacctatatatacaaatcatacgggcagccgcagaccgagatagagaaaccgtaagggcaaagtcaatcgagatgaaatttctgaccggatatgaggtgaaagtaatggaagacgcacacctagacgctatcttgatcctcggagaagcctttgcctccgacgaaccctttgatttcggtactcagagtaccacggaaaaaatacacaatctgataccagttatgttacggcaccgtttagttcctcccccagaagagacatattctctgcacaggaagatgggcgggagtttcctcatatgctctaaactgaaagcgcggtttccttgcaaggcaatgtttgaggaagcatattctaactactgtaagcgccaagctcaacagtag

SEQ ID NO: 177505 - DNA, 1944 bp, synthetic construct
  misc_feature 1..1944: note = Description of Artificial Sequence: Synthetic coding sequence
  source 1..1944: mol_type = other DNA
atggccgccatcctgggcgacaccatcatggtggccaagggcctggtgaagctgactcaggccgccgttgagacacacttacagcatcttggaattggtggcgaattgatcatggcagcacgagcgctgcagtcaaccgccgtggagcagattgggatgtttctggggaaagtccaaggtcaagataagcatgaggaatatttcgcagaaaacttcggggggcccgagggtgagttccacttcagcgttcctcacgccgctggagcctcaaccgactttagttccgcgtccgcccccgaccagtcagccccgccctccctcggtcacgcccactcagaaggtccggcaccggcctatgttgcgtccgggccgtttagggaggcaggttttcctggccaagcgtcatccccgcttggacgggccaatgggagactcttcgccaaccctcgcgacagcttctccgcaatggggttccaacggcggttcttccaccaggaccagtctcccgtgggaggcctgactgccgaagatatagagaaggctaggcaggcgaaagctagaccagaaaacaaacaacataagcagacgctgtccgagcatgctagagaacgcaaggtaccagtgacccggattggaagactggccaactttggaggtctggctgtaggcctcggcttcggggcgttggccgaggtagctaaaaagagtctgaggagcgaggacccttccggcaaaaaggctgtgctgggaagcagtcctttcctctccgaagctaatgctgagcgtattgtcagaactctgtgtaaggtgcgcggtgccgcgcttaagctgggacagatgctttcaatacaggatgacgcttttatcaatcctcacttagctaaaattttcgagagggtcagacagtccgctgattttatgcctttaaagcagatgatgaagacactgaacaatgatctgggcccaaactggcgcgacaagcttgaatactttgaagaacgccctttcgccgccgcctcgatcggacaggtccatctggcgcggatgaaagggggaagggaggtcgccatgaaaatccagtatcctggggtggcccagagcatcaacagcgatgtcaacaatttaatggctgtcctgaatatgagcaatatgttgcctgagggtcttttcccggaacacctcatcgatgtccttcgaagggagttggcactggagtgtgattaccaaagggaggccgcatgcgctcgtaagtttcgggatctgttgaaaggtcacccctttttctatgtgcctgaaatagtggacgagctttgtagcccccacgtcctcacaactgaattggtttctggattccctctagatcaggctgaagggctttctcaagagattaggaatgaaatatgctataatatactggttctgtgccttcgcgagttgtttgagttccactttatgcagacggatccgaactggtcgaacttcttttacgatccacaacagcataaggtcgccctgttggattttggagccactcgggagtatgatcgatcatttacagatctttatattcagatcatacgggcagctgctgatcgtgatcgtgagacagttagagcaaaatctatcgaaatgaaattcctcacaggatatgaggtgaaagtgatggaggacgcacaccttgacgctattcttatcttaggcgaagcattcgcatccgacgagcccttcgattttggcactcagagtacaactgagaagatccacaatttgatccctgtcatgctgcgccatcgactggtgcctccccccgaggaaacctactccctccatcggaaaatgggtgggtcattcttaatttgttccaagcttaaagcccggttcccctgtaaagcaatgtttgaagaggcctattcaaactattgcaaacgacaggcacagcagtag

SEQ ID NO: 177506 - DNA, 1797 bp, synthetic construct
  misc_feature 1..1797: note = Description of Artificial Sequence: Synthetic coding sequence
  source 1..1797: mol_type = other DNA
atggccgcccgggccctgcagagcaccgccgtggagcagatcggcatgtttttaggtaaggtgcagggccaggacaaacatgaagaatactttgccgaaaatttcggggggccagaaggggaattccatttctccagtgcaagcgctccagaccaatcagctcccccttcccttggccacgcccatagtgagggcccagccccagcctatgttgcctcggggccattccgagaggccggcttccctgggcaggcaagctcaccactgggccgtgcaaatggccgcttgttcgcaaatccaagggactcttttagtgcgatggggttccagcgcaggttcttccaccaggaccaaagccccgtcggcggactgacagccgaggacattgagaaagcacgccaggcaaaagctcgcccggaaaataaacagcataaacagactctcagcgaacacgcccgggagagaaaagtcccagtcacccgaattggtagactagctaattttgggggactcgctgttggccttggcttcggcgcgttggccgaagtggctaaaaagagcctacggagtgaggacccttctgggaagaaagccgtccttggttcatcacctttcctttccgaagcgaacgcggagagaatcgtacgtaccttgtgcaaggtgagaggggctgcgcttaagcttgggcagatgctcagtatccaggatgacgcgtttattaatccccacctggctaaaatatttgaacgcgtccgccagtctgccgactttatgccgctgaagcagatgatgaagacgctaaacaatgatctgggtccaaactggagggataagttagagtactttgaagaacggccctttgctgccgccagcataggacaggttcatctggccaggatgaagggagggcgcgaagtggctatgaagattcaatacccgggcgtggcccagagcattaattccgatgtgaataatctgatggctgtgctgaatatgtcgaatatgttgcctgagggcttgtttccagaacacttaatcgacgtgcttcgcagggagctcgctctggagtgcgactaccaacgggaggcagcatgtgcccggaagttcagggacctccttaagggccacccgttcttctacgtgcccgaaattgtggacgaactgtgctcaccccacgtgctgactactgaacttgtatcaggatttccgctggatcaggcggagggcttgtcccaggaaattaggaacgaaatttgctataacattttggtgttatgtcttcgtgaactgttcgaattccactttatgcagacggacccaaactggagtaattttttctatgaccctcagcagcacaaggtggcactcctggactttggagctacgcgggaatatgaccgaagctttactgacttatacatccagattattagggcggccgctgatcgcgatcgcgaaactgtaagagcgaagagcatcgagatgaaattcctcacagggtacgaagtaaaggtcatggaagatgctcacctggacgctatcctcatcctgggggaggcttttgcttctgacgaacccttcgatttcggtacgcagtcaaccactgagaaaattcataacttgatccccgtcatgctgagacatcgcttggtcccaccccccgaggagacatattcgcttcataggaagatgggtggctccttccttatctgctctaaactgaaagctcgctttccatgtaaggctatgtttgaagaagcgtacagtaactactgtaagcggcaggcccagcagtag

SEQ ID NO: 177507 - DNA, 966 bp, synthetic construct
  misc_feature 1..966: note = Description of Artificial Sequence: Synthetic coding sequence
  source 1..966: mol_type = other DNA
atgctgagcatccaggacgacgccttcatcaacccccacctggccaagatcttcgaaagagtgagacagtcagccgacttcatgcccttaaagcagatgatgtaccccggcgtagcgcaatcgattaattccgatgtgaacaacctgatggcggttctcaacatgtcaaacatgctgcctgaggggctgtttcctgaacacctcatcgacgtactccggagggaactggcattagaatgcgactatcaacgggaggccgcctgtgcaagaaaattccgagatctgctcaagggtcaccccttcttctatgtccccgaaatcgtggacgagctgtgcagccctcatgttctaactacagagttggtctccgggtttcccctcgaccaggctgagggcctgtctcaggagatccggaacgagatctgctacaacatcttggtcctgtgcttaagagagctgtttgagtttcactttatgcagacggaccccaattggtcgaatttcttttacgatcctcagcaacataaagtagctttgctggatttcggcgctaccagggagtacgataggtcctttacagacctgtacatccaaattattcgggccgcagcagacagggatcgcgagacagtgagggcaaaatctattgagatgaaattcctcacaggctatgaggtgaaagtaatggaggatgcacatctggacgctattcttatcctgggcgaggctttcgccagtgatgagccgttcgactttggcactcaatctacaaccgagaaaattcacaacctaatcccggtcatgcttaggcacagactcgtgccacctcccgaagaaacatactctctgcaccgtaaaatgggcggatcatttctgatttgctccaagctcaaagcaaggtttccttgcaaggccatgtttgaggaggcatatagcaattactgtaaacgccaggctcagcagtag

SEQ ID NO: 177508 - DNA, 1107 bp, synthetic construct
  misc_feature 1..1107: note = Description of Artificial Sequence: Synthetic coding sequence
  source 1..1107: mol_type = other DNA
atgctgagcatccaggacgacgccttcatcaacccccacctggccaagatctttgagcgagtccgtcagtctgccgacttcatgcctcttaagcagatgatgaagacattaaacaacgatctgggccccaactggcgcgacaagttggagtattttgaggaacggccatttgcggctgcctccatcggacaggtgcatcttgcaaggatgaagggcggaagagaagtcgcaatgaaaattcagtaccctggggtagcccagtccatcaattccgatgtcaataacctaatggctgtcttgaacatgtctaatatgttacccgagggtctttttcctgaacacctcatcgacgtattgcgcagagagctcgcactcgagtgcgactaccagagggaagctgcctgcgcccgtaagtttcgcgatctgctcaaaggccatccatttttctacgttcctgagattgttgacgagctgtgctccccccatgttctgacaaccgaacttgtatcaggttttccgctcgatcaggcagagggactttcacaggagataagaaacgaaatttgctataacatcctcgttttgtgtctccgagagctgttcgaattccactttatgcaaacggatccaaactggtccaatttcttttatgacccgcagcagcacaaagtagccctcctggattttggagccacccgtgagtacgatcgctctttcactgatctgtacatccaaatcattcgcgccgcagcagatagagatagggagacagtccgggcaaagtccatcgaaatgaagttcctgactggatacgaagtcaaagtgatggaggatgcccacctggacgcgattctgatcttgggcgaggcatttgccagcgacgagccctttgacttcggtacccaatccacaacagagaaaatacataacctgattccagtgatgctgaggcatagacttgtgcctcctcccgaggagacttacagcctgcatagaaaaatgggtggcagcttcctcatttgttctaagctcaaggccaggttcccatgcaaagctatgtttgaggaagcctacagcaattattgcaagcggcaggctcagcaatag

SEQ ID NO: 177509 - DNA, 3591 bp, synthetic construct
  misc_feature 1..3591: note = Description of Artificial Sequence: Synthetic coding sequence
  source 1..3591: mol_type = other DNA
atgcccaccgccgagagcgaggccaaggtgaagaccaaggtgcggtttgaggaactcctcaaaacgcattcagacctaatgcgtgaaaagaagaaactcaagaagaaactggtgcgcagtgaagagaacatctcgcccgatacaatacggtcgaacctacactacatgaaggaaacaacttccgacgatcccgataccattcggagtaacctgccccacattaaagagactacgagcgatgatgttagcgccgctaatactaataatctcaaaaagtctaccagagtgaccaaaaacaagctgaggaatacgcagctggctacagaaaatcccaacggagatgcttctgttgaagaggataaacaggggaagcctaataagaaggtaattaagacagtacctcagttaacaactcaggaccttaagcctgagactcccgagaacaaagtggattccactcaccagaagactcacaccaagccgcaaccaggggtagatcaccagaagtccgagaaagccaacgagggcagggaagaaacagacctcgaggaagacgaggaattgatgcaggcatatcaatgccatgtgaccgaggagatggcaaaggagatcaaacggaaaatcaggaaaaagttaaaagagcagctgacctacttcccatcagatactttgttccacgacgacaaactgtcatccgagaagcgaaagaagaaaaaggaagtgccagtcttttccaaggcggagaccagtaccttaaccatttctggggatacagtcgagggcgagcagaagaaggaatctagcgttcgatctgtgagttcagacagccatcaagacgatgaaatctctagtatggaacagagcactgaagatagcatgcaggatgataccaaaccaaagccgaagaagaccaagaagaaaacaaaagccgtcgccgataacaacgaggacgtcgatggcgacggagtgcacgaaattaccagccgagatagccccgtttaccctaaatgcctgcttgacgacgatctggtgcttggcgtctacatccataggactgaccggctgaagtctgactttatgattagccacccaatggtgaagatacacgttgtcgacgaacacacaggtcagtacgtgaagaaagacgattcaggcaggccagtctctagctactacgaaaaggaaaacgtggactatattctgccaattatgactcagccatatgatttcaagcagcttaagtcgcgactccctgaatgggaagaacagatcgtctttaacgagaactttccataccttctgagagggtctgatgagagtcccaaagtgatactgttttttgaaattctggacttccttagcgtcgacgagatcaaaaataactctgaagttcagaaccaagaatgcggattccggaagatcgcttgggcctttttgaaactgctgggagcaaatggaaatgccaacattaattctaagctgaggcttcagttatattaccctccaaccaaacccagatctcccctctccgtcgtcgaagcctttgagtggtggtcgaagtgtcccaggaatcattaccccagcaccctgtatgttaccgtgcgtggcctaaaagtgcctgattgcatcaaacccagttacaggagtatgatggccctgcaggaggagaagggcaaacccgtgcattgcgaacgacaccatgagagctcgtcagtggacaccgaacctggactggaagaatccaaagaagtgatcaagtggaaacggctccctgggcaggcctgtcgaataccaaataagcatctatttagtctcaacgcaggcgagcgcgggtgcttctgtctcgatttcagccacaatggacggatcctggcggctgcgtgtgcttcccgagacggttacccaatcattctatatgaaatcccaagcggaagattcatgcgcgaactctgtggtcacttgaacatcatctatgacctgagctggtctaaggacgaccattatattttgacatcctcaagcgacggcaccgcgcgcatctggaaaaatgaaatcaacaacaccaacacatttagagtgctcccccatccttcattcgtatacacggccaaatttcaccctgcagttagggagctggttgtcacagggtgttacgacagcatgatccggatatggaaggtggagatgcgcgaggacagtgctattctcgtccgccagttcgacgttcacaagtcttttatcaattctctgtgcttcgatacagagggccatcacatgtattccggagactgcaccggcgtcatcgtggtgtggaatacctacgtgaagataaatgatctcgagcatagcgtgcatcattggaccatcaataaggaaatcaaagagacagagtttaaaggtatccctatcagctatctcgagatccatcctaacggaaaaaggctcctgattcacacgaaagattctaccctcagaatcatggatttgagaatccttgtagccagaaagttcgttggtgcagctaattaccgagaaaagatacactctactttgaccccatgtggtacttttctttttgccgggtccgaggacggcattgtgtatgtctggaatcccgagactggcgaacaggtggcgatgtattctgatttacccttcaaaagtcccatccgagatatcagttatcatccattcgagaacatggtggccttctgtgccttcggccagaatgaaccaattctcctctatatatatgactttcatgtagctcagcaggaagctgaaatgtttaaaagatataacggaacctttccgttacccgggattcatcagtcccaggacgcactgtgcacctgtcctaagctaccacatcaggggagcttccagatagatgaatttgttcacacggaatcatcttcgacaaagatgcagttggtgaaacagcggctcgagacagtcacagaggtgataaggagttgtgcggccaaggtgaacaaaaatctatcctttacttcaccaccagctgttagttcccagcagagcaaactcaagcagagcaatatgctcacagctcaagaaatactccaccagttcggctttactcagactggaatcatcagtatcgagcgtaagccttgcaaccaccaggtcgatacagcacccactgtcgtagccctttatgactatacagcgaataggagcgatgagcttaccattcaccgcggggacatcattcgggtcttcttcaaggataatgaggactggtggtacgggtctattggtaaaggccaagaaggatatttccccgcaaaccatgtcgctagtgaaacattgtatcaggagctcccacctgagattaaggagcgctcacccccgctgtctccagaggaaaagaccaagatagagaaaagcccagcaccccagaagcagagtatcaacaaaaacaaatcacaggactttagacttggttccgagagcatgacccactctgaaatgaggaaggaacagagccatgaggatcagggacacataatggacactagaatgaggaagaacaagcaggccggccgaaaggtgaccctgatcgagtag

SEQ ID NO: 177510 - DNA, 3162 bp, synthetic construct
  misc_feature 1..3162: note = Description of Artificial Sequence: Synthetic coding sequence
  source 1..3162: mol_type = other DNA
atgcccaccgccgagagcgaggccaaggtgaagaccaaggtgcggtttgaggagttgcttaagactcactcagacctgatgcgcgagaaaaaaaagttaaagaaaaagttggtgagatctgaagaaaatatctccccagacacgataagatctaatctgcattatatgaaggaaaccacgagtgatgacccggatacaatccgctctaacctgccccatattaaggagacgacatcggacgacgtctccgctgctaatacaaacaatctgaagaagagtacaagggtgaccaagaataagctcaggaacactcagttggctactgagaatccaaacggcgacgcctctgtggaggaagacaagcagggtaagccgaacaagaaggttattaaaacggtgccacaacttactacccaggatttgaagccagagacccctgagaacaaagtcgattctacccaccagaagacacacaccaaacctcagcctggggttgatcatcagaagagcgagaaggccaacgagggccgagaagagacggacctggaggaagatgaagagctcatgcaggcgtaccagtgccacgtgacggaggaaatggccaaggaaattaaacgtaagattagaaaaaaactgaaggagcagctaacctacttcccttctgacaccctatttcacgacgacaagttaagctccgagaaaagaaagaaaaaaaaggaggtccccgtgttcagcaaagctgagactagcacactgacaatcagcggggatacagtagagggagagcagaagaaggagtctagtgtgaggagcgtgtcatctgactcccaccaagacgacgaaatcagttccatggaacagtcaactgaagattctatgcaagatgatactaagcctaagccgaaaaagacaaagaaaaaaacgaaagccgttgctgacaataacgaagacgtggacggtgacggagtgcacgaaattacttccagagacagcccggtataccctaaatgccttctggacgatgacttggttctgggtgtctacatccatcgcaccgataggcttaaatcggattttatgatctcccatcccatggtcaagatccatgtggtggatgaacacaccggccaatatgtcaagaaggatgactcgggacgacctgtatctagttactacgaaaaggagaacgtagactacatcctgcctattatgactcagccttacgacttcaagcagctgaaatcgcggctaccggagtgggaggagcaaatcgtgttcaacgagaactttccttacctgctgcgtgggtccgatgaaagtcccaaggtcatcttgttctttgaaatacttgacttcctgtctgttgacgagattaaaaacaattctgaagtccagaatcaagagtgtggtttcaggaagattgcctgggcctttctcaaactcctaggtgccaatggaaacgccaatatcaattctaaactgcgcttgcagttgtattatccaccaacaaaacctcggagtcccctctctgtggtagaagcatttgagtggtggagcaaatgccctaggaatcattatcctagcacgttatacgtgacggtccgcggtctcaaggtgcccgattgcattaagccatcatataggtccatgatggcactgcaagaggagaagggcaagccagtgcattgtgagcggcatcacgaaagcagctcagtggataccgagcccggcctggaggagtcaaaagaagtcataaaatggaagagattgccaggccaggcatgtcgaatacctaacaaacaccttttctcgctgaacgcaggggagcggggatgcttttgtctcgacttctcacataacggcagaatccttgccgccgcttgcgccagccgggacgggtaccctatcatcctatacgagatccctagcggcagatttatgagagagttgtgcggccacctaaacattatctacgacctgagctggtctaaagatgatcactatatcttgacctcgtcctcagacggtactgcgcgcatctggaagaacgagattaataacacgaacacattccgggtgctgccacaccctagctttgtgtacacagccaagttccatcccgccgtcagggaactcgttgtaaccggctgctacgacagcatgattagaatttggaaagttgagatgagggaggattctgctatattggtgagacagtttgatgttcataagtcttttattaactccctgtgtttcgatactgaaggccaccatatgtatagcggcgattgtacaggagttatcgtggtgtggaatacctacgtgaaaattaacgacctggaacactctgtccaccattggaccatcaacaaagagattaaagagaccgagtttaaaggaatcccaatttcctatcttgagattcacccaaatggcaagagattgttgattcacaccaaagattcaactctgcgcataatggacctccgcattctagttgcacgtaaattcgtaggggcagccaattatcgcgaaaagattcatagtaccctgacaccctgtggcactttcctgttcgccggctccgaagacggaattgtttacgtttggaatccggagaccggcgagcaggtggccatgtactccgacctccctttcaagtctcctatcagggacatttcttatcatccttttgagaacatggtagcgttctgcgcattcgggcagaatgaaccaatcctcttgtatatttacgactttcatgtggcccagcaggaggccgagatgttcaagagatataatgggaccttcccgctgcccgggatccatcagagtcaggacgccctgtgtacctgccccaaactcccccaccagggctcttttcaaattgatgaatttgtccacaccgaaagctcaagtactaaaatgcaactcgtcaaacagagactggaaacggtgactgaggtgattcggagttgcgcagccaaagtcaacaaaaatttgagcttcacgagtccccctgccgtgtcatcacagcagtcaaagttaaagcaaagtaacatgctcaccgcccaggagattctgcaccagttcggcttcactcagacggactcacattttgcagagttcaacacgtgcattctctggtggaaaaagcattag

SEQ ID NO: 177511 - DNA, 165 bp, synthetic construct
  misc_feature 1..165: note = Description of Artificial Sequence: Synthetic coding sequence
  source 1..165: mol_type = other DNA
atgcccaccgccgagagcgaggccaaggtgaagaccaaggtgcggttcgaggaacttctcaagactcattcagacttgatgcgcgagaagaagaaacttaagaaaaagcttgttaggtccgaagagaacatttccaatcaggagaaaagcatggctgtgtggtag

SEQ ID NO: 177512 - DNA, 3591 bp, synthetic construct
  misc_feature 1..3591: note = Description of Artificial Sequence: Synthetic coding sequence
  source 1..3591: mol_type = other DNA
atgcccaccgccgagagcgaggccaaggtgaagaccaaggtgcggttcgaagaactactaaagacccacagcgaccttatgcgagagaagaaaaaactcaagaagaagctggttcggtcagaggaaaatattagtcctgatacaattagatccaacttgcactacatgaaggagaccactagtgacgaccctgacacgatccgaagtaatctcccacacattaaagagactacctcagacgatgtgagcgctgcaaatactaacaaccttaagaagagcacacgagtgaccaaaaataaactgaggaatactcagctagcaactgaaaatcccaacggcgacgccagtgtggaagaagataagcaggggaaacctaacaagaaagttatcaaaaccgttccccaactgacgactcaggatttaaaaccggagacacctgagaacaaagtggactcaacccatcagaagacacacaccaagccacagcccggcgtggaccatcagaagtcagagaaggccaacgagggacgggaagaaaccgacctcgaagaggacgaggagctcatgcaggcctatcagtgccacgtgaccgaggagatggctaaagaaataaaaaggaagattaggaaaaagctcaaggaacagctcacgtacttcccatccgataccctctttcacgacgacaagctgtcatccgaaaagcgaaaaaaaaagaaagaggtacctgtgttctctaaggccgaaacttcaactctgacaattagcggagacaccgtggagggggagcaaaagaaagagagttcagtccggtccgtgtctagtgacagccaccaggacgatgaaattagctctatggagcagtcaacggaggactccatgcaagatgatactaagccgaagccaaaaaaaacaaaaaaaaagactaaagcggtggccgacaataatgaggacgtggacggagacggagttcatgaaatcacctcgagggatagtcctgtctatcccaaatgcttactcgatgacgacttggttctgggagtatacattcacagaaccgacagattgaagtcagatttcatgatctcgcaccccatggtgaagattcatgtggtcgacgaacacaccggccaatatgtgaagaaggacgactcaggccgtccggtttctagttattacgagaaagagaacgtagactatattctgcccattatgacccagccctacgactttaagcagctgaagagccgcctgcctgaatgggaggagcaaatcgtgttcaatgagaactttccatacctcctacggggttccgatgagtctccaaaggttatcctgtttttcgagatcctggacttcctctccgttgacgagattaagaacaactccgaggtgcagaatcaggagtgcgggttccgtaaaattgcatgggccttccttaaactgttgggagccaatgggaacgctaacatcaattctaaactcagactgcagctttactacccaccaactaagccacgcagcccactgtccgtggtggaggcattcgagtggtggtctaagtgccctcgaaatcattaccctagcactctttatgtgactgtccggggactcaaggtgccagattgcatcaaaccttcttaccggtccatgatggccctccaagaagagaaggggaaacctgtacattgcgaaagacatcacgaatctagcagtgtcgacaccgagcctggccttgaagagtctaaagaagttattaagtggaaaaggttgcctggacaggcctgccggataccaaataaacatttattctccttgaacgcgggggaaagaggctgtttttgtctcgacttctctcataacggccgaatcttggctgccgcatgcgcttcacgcgacggatatccaattattctctatgagatcccgtccggtagatttatgagggagctgtgtggtcatcttaacataatttatgacctcagctggtctaaggatgatcattacatactgacctctagcagcgatggcacggcaaggatctggaagaatgagattaacaacaccaacacattccgagtgctcccgcacccgtcctttgtctataccgctaagttccaccctgccgtgagagagttagtggtcacaggctgctacgatagcatgatccgcatatggaaagtcgagatgagggaggattccgcaatcttagtcaggcagtttgacgttcacaagagcttcataaacagtctgtgctttgacacggaggggcaccacatgtactcaggcgattgcacaggtgtgattgtcgtatggaacacctacgtaaaaataaacgatctggaacatagcgtacaccactggacaattaacaaggaaatcaaggagaccgagtttaagggcattccaatctcctatcttgaaattcacccaaatggtaaaaggttgcttatccacacgaaggattccaccctaaggatcatggacctgcgtatcctggtggcaaggaaattcgtcggagcggctaactatcgagagaagatccactctaccttgaccccttgcggaacattccttttcgccggcagtgaggatggcatagtctacgtgtggaacccagagactggggaacaggtcgctatgtattctgacttgccgtttaagagcccaattcgagatataagttatcaccctttcgaaaacatggtcgcgttttgcgcctttggccagaatgagcctattctcctctacatttatgacttccacgtggcccagcaggaggctgaaatgttcaaacgctataatggcactttccctctaccaggcatccaccagtctcaggatgctttatgtacctgtcctaagctgccccaccagggtagtttccagatcgacgagttcgtccatacagaaagttctagcactaaaatgcagctcgtgaagcagcggttggagacagtgacagaagtcatccgcagttgtgctgccaaagtgaataagaatctgtcgtttacgagtccacccgcagtgtcgagtcagcagtccaagcttaagcaatcaaacatgctcaccgcccaagagattttacatcagtttggcttcacacagacagggatcatctccatcgagaggaagccttgtaatcaccaggtggataccgcccccacagttgtggccctgtacgattatactgctaatagatctgacgagctaacgatccataggggcgacattattcgcgtgttttttaaggacaatgaggactggtggtacggaagcatagggaaggggcaggagggctatttccctgcaaaccacgtcgcgtctgaaacgctgtaccaggaactgcctcccgaaataaaagaacgaagtcccccccttagtcccgaagaaaaaacaaagatcgagaaatctcccgcccctcagaagcagtctatcaacaagaacaagagtcaagatttcagactgggatccgagtccatgactcattctgaaatgcgaaaagagcagtcccacgaggaccaaggccatataatggatacgaggatgcggaaaaacaagcaggctggcagaaaagtgactttaatcgagtag

SEQ ID NO: 177513 - DNA, 3162 bp, synthetic construct
  misc_feature 1..3162: note = Description of Artificial Sequence: Synthetic coding sequence
  source 1..3162: mol_type = other DNA
atgcccaccaccgagagcgaggccaaggtgaagaccaaggtgcggtttgaagaacttctgaaaactcactctgatctcatgcgagagaaaaaaaaactaaagaaaaagctcgtgcggtccgaggagaacatatcccccgacactatacggagcaacctccactatatgaaggaaactacatccgacgatccagacactattcgctcaaacctcccacatataaaagagacaactagcgatgacgtctctgctgcaaatactaataatctgaagaagtcaaccagagtcacaaagaacaaattgcggaatacccagctggctaccgagaacccaaatggggacgcttcggtcgaggaagacaagcaaggaaagcctaataagaaagttattaaaaccgtccctcaactcaccactcaggacttgaagcccgagacacctgaaaacaaagtggatagcactcatcaaaagacccataccaaacctcagccgggggtggaccatcagaagtcggagaaggctaatgagggaagggaggaaacagatctggaggaagatgaagagttaatgcaggcgtaccagtgtcacgtgactgaagagatggccaaggagattaagagaaaaatacgcaaaaagcttaaggagcagctgacatacttccctagtgacacattgtttcacgacgataagctctcatccgaaaaaagaaagaaaaagaaggaggtacctgtatttagtaaagcagaaacatccacactgactatcagcggggacacagtggagggtgaacagaagaaggagtcctccgttcgctcagtctcaagcgatagtcatcaggatgacgagatcagttcaatggaacagtccaccgaagattctatgcaggacgatacaaagcctaaacctaagaaaactaaaaagaagacaaaggccgtcgcggacaataacgaagatgtcgacggggatggtgtgcacgagatcacctctcgagacagtcccgtgtatcctaagtgtcttttggacgacgatctggtgctgggggtgtacatccatcggaccgatcgcctgaagagcgactttatgatcagccacccgatggtgaagatccatgtcgtcgatgaacatacgggtcagtacgtgaaaaaagacgactctggacgtcctgtgagctcctattacgaaaaagaaaatgtggactatatcctgcctattatgactcaaccttacgactttaagcagctaaagagccgcctgccagagtgggaggagcaaattgtgtttaacgaaaacttcccttatctgctgcggggcagcgatgagagcccaaaggtcatcctcttcttcgagattctggactttctgtccgttgacgagatcaagaacaactcagaagtgcagaatcaggagtgtgggtttcgcaaaatagcctgggccttcctgaagctgctcggagcaaacggcaacgctaacattaacagtaaactccgtctgcagctttactacccacccaccaagccccgctcccccctgtcggtagtcgaagccttcgaatggtggtccaagtgtccaaggaatcattacccctccactctatacgtgaccgtgcgtggcctgaaggttcccgactgcataaaaccgagctaccggagtatgatggcattacaggaagaaaaggggaaacctgttcactgcgagcgccaccatgaatcttcaagtgtagatacagagcccggcctcgaggagagcaaggaagtgattaaatggaaacgccttcccgggcaggcctgtaggattccgaacaagcatcttttctccctcaatgctggagaaaggggttgtttttgtctggatttcagtcacaacggcagaatcttggccgcagcatgcgcaagtcgtgatggataccctataattttgtacgaaattccatcgggccggttcatgcgggagttgtgcggccatctgaacatcatctatgatttgagctggagcaaggacgaccactacattctaacatcgagctccgacggaacagccaggatttggaaaaatgaaatcaataatacaaacacttttcgcgtactgccccacccaagttttgtctatacggctaagttccaccccgccgtccgcgaactggttgtgaccggctgctacgattctatgatccgtatttggaaggtggagatgagagaagattccgctatacttgtccgacagttcgatgtacataagtctttcatcaatagcttatgttttgacacagagggccaccacatgtattccggagattgtaccggagttatcgttgtgtggaatacctatgtgaaaattaacgatctcgagcacagcgtccaccactggactatcaacaaagaaatcaaagagactgagtttaagggtattccaatatcttacctggaaatccacccaaacggcaaacgccttctgattcacacgaaggacagtacgctgcgcataatggacctgagaattttggtggctcgcaaattcgtcggcgccgctaactatagagaaaagattcatagtacactcacaccttgtggaacttttctcttcgctggtagcgaagacgggattgtatatgtttggaaccctgaaacaggcgagcaagtcgccatgtactcggatctcccgtttaagtcccccatcagggatatttcatatcaccctttcgagaacatggttgcattctgcgctttcggacaaaatgagcccatccttctttacatctatgatttccacgtggctcagcaagaggcagagatgtttaagcgatacaatggtacattccccctccccggcattcatcagagccaagacgccctttgcacctgccctaagctcccccaccaaggatccttccaaatcgatgagtttgtacataccgagtcatccagtacaaagatgcagttagtcaaacagcggctggaaacagtcaccgaggttatccggagctgcgccgccaaggttaataagaatctctcctttacctctccacccgcggtgtcaagccagcagtccaagctgaagcaaagcaatatgctgactgcacaagagatcttgcaccagtttggattcacacagacagactcccattttgcagaatttaatacttgcatcctgtggtggaagaaacattag

SEQ ID NO: 177514 - DNA, 1497 bp, synthetic construct
  misc_feature 1..1497: note = Description of Artificial Sequence: Synthetic coding sequence
  source 1..1497: mol_type = other DNA
atgcgggagctgtgcggccacctgaacatcatctacgacctgagctggagcaaggacgatcactacattcttaccagttccagcgacggcaccgctagaatttggaaaaatgaaattaataacacgaacacctttcgtgtgctgccacatcccagcttcgtctacacagcaaagttccatccggccgtccgggaactagtagttacagggtgctacgacagcatgataagaatttggaaggtcgagatgcgcgaggattcagccatcctcgtgcggcagtttgacgttcacaaatcattcatcaattccttatgctttgacactgaagggcaccatatgtactctggggattgtaccggtgttatagtggtgtggaacacctatgtcaagatcaacgatcttgagcactctgtacatcattggactatcaataaggagatcaaagagactgagtttaaggggatccctatatcctacctggaaattcaccctaacggcaagagactgctgattcacaccaaagactcgactctaagaatcatggacctgcgtatactagtagcaagaaaatttgtgggggcggctaactatagggagaagatccactcaactctgactccctgtggaacctttctattcgctgggagtgaagacggaattgtctacgtctggaaccccgaaaccggggagcaggttgccatgtacagtgatctccccttcaagtcccccattagagatatctcctaccatccattcgaaaatatggtggcattctgcgccttcggacagaacgagccaatcctcctgtatatttacgacttccacgtggcgcaacaggaggcggagatgtttaaaagatataacgggaccttcccactccccggcatccaccagagtcaagatgctctgtgcacctgtccaaagcttccacatcagggatcttttcagattgatgaattcgtgcacactgagagctcctcaaccaagatgcaactggtcaaacaacgattggagactgtaactgaagtcatccgcagctgtgcagcaaaagttaacaagaatctgagctttactagcccgcctgcagtgtcctcacagcagtctaagctgaaacaatccaacatgcttacagctcaggaaatcctacatcagttcggctttacacaaacaggcatcatctcaattgagcggaagccatgcaatcatcaggttgacaccgcacccacggtagtagctctctacgactataccgccaaccgatcggatgaattgaccatccatcggggggatatcatcagggtgttcttcaaggacaatgaggactggtggtatggatcaatagggaagggtcaagagggctatttcccagcgaatcatgtcgcatcagagaccctctatcaggaactgccgccagaaattaaagaaaggagtccaccattgtctccagaggaaaaaactaaaatcgaaaaatccccagcacctcaaaaggttaaatag

SEQ ID NO: 177515 - DNA, 3591 bp, synthetic construct
  misc_feature 1..3591: note = Description of Artificial Sequence: Synthetic coding sequence
  source 1..3591: mol_type = other DNA
atgcccaccgccgagagcgaggccaaggtgaagaccaaggtgcggtttgaggaattactgaaaactcactccgacctgatgcgggaaaagaaaaaactgaaaaaaaaactggtgaggtcagaagagaacattagcccagatacgatcagatccaacctccattatatgaaggaaaccacatccgatgatcccgacaccatcaggtctaatttaccgcatatcaaagagaccaccagcgacgatgtgtctgctgctaatactaacaacctgaaaaagtctactcgggtaaccaaaaacaagcttaggaatacacagttggcgaccgaaaatcctaatggcgacgcgtctgtcgaggaagataagcagggaaaaccaaataagaaagtcataaagactgtcccgcaactgactacccaggacctcaaaccagaaactcctgagaataaggtcgattccacacaccagaagacacataccaaacctcagccgggggtggatcaccagaaaagcgaaaaggcgaacgagggtagggaagaaacagacctggaagaggacgaagaactgatgcaggcataccagtgtcacgttaccgaagaaatggccaaagaaattaaaagaaaaatccggaagaaactgaaagagcaattaacatattttccttctgacaccctgtttcacgatgataaattatcatcagaaaagaggaagaaaaaaaaagaggttcccgttttttccaaggccgagacaagcactctgacaatctcaggagatacagttgaaggcgaacagaaaaaggagtcatctgtacggtccgtgtccagtgattctcaccaggacgatgagattagcagcatggagcagagcactgaggacagcatgcaagacgacacaaaaccaaaaccaaagaaaactaagaaaaagacaaaagctgtcgcggacaataatgaagatgtcgatggggacggagtacacgaaatcacatctcgggatagtcccgtgtacccaaagtgtcttctggacgacgatctggtgctgggggtttacatacatagaaccgacaggctcaaatctgactttatgatctcgcaccctatggtcaagatccatgtggtggacgagcacactgggcagtatgtcaagaaagatgactctggacgacctgtttcatcttactacgagaaggagaatgttgattatattctgccaatcatgactcaaccatatgattttaagcagttaaaatccaggctgccagagtgggaagaacagatcgtattcaatgagaattttccgtacttgcttcggggaagcgatgaatcacccaaagtcattctcttcttcgaaatactcgactttctgagtgtcgatgaaattaaaaataactccgaagtgcaaaatcaggaatgtggcttcagaaagatagcctgggctttcctcaagctactgggggccaacggcaacgctaatattaactcgaagctgagactccaattgtattacccgccaacgaaacccagaagtcccctgtccgtggtcgaggcctttgagtggtggtctaagtgtccccgcaaccattacccttcaacactgtatgtgaccgtaagaggattaaaagtgcctgattgtatcaaaccatcgtatcgaagcatgatggccctgcaggaggagaagggtaagccagtgcattgtgaacgccaccatgagtcaagttcagtggacactgagcctggtcttgaggaatctaaggaagtgatcaagtggaagaggcttcctgggcaagcttgtaggatcccaaacaaacacttatttagtttaaatgccggggagcgaggctgtttctgcctcgacttcagccataatgggcgtatacttgccgcagcctgtgcttcccgcgatgggtatcccataatcctctacgagatcccatcaggccgattcatgcgggagctctgcggccatcttaatataatctacgatctctcttggtcaaaggacgatcattacatcctgacatcgtcctccgacggcactgctcggatatggaaaaacgagatcaataataccaacaccttccgggtgctgccacaccccagttttgtttatactgccaagttccatccggctgtgagggagctagtggtgaccgggtgctacgactccatgatccgcatctggaaagttgagatgcgcgaagactctgcaatactggtacggcagttcgatgtgcacaagtcctttatcaacagcctatgtttcgatactgaggggcaccacatgtatagcggcgactgtaccggagtgatcgtggtttggaacacctacgtgaaaatcaatgacttagaacacagcgttcaccactggacaattaataaggagatcaaggagactgagttcaagggaatccctatttcctacctcgagatccacccaaacggcaaacgtctgttgattcacacaaaggacagcacgctgcgcatcatggacctgcgcattttggttgcccgcaagttcgtcggggcagcgaattacagggagaaaatacatagtacgctgactccttgcggcaccttcctgtttgccggctcagaagacggtatcgtgtacgtctggaacccagaaacaggcgagcaagtggccatgtatagcgacctgccttttaaatctccaatccgagatatcagctatcacccttttgaaaatatggtggccttctgcgctttcggtcagaatgagcccatattgctgtacatatacgactttcatgtagcccagcaagaggccgaaatgtttaagagatacaatggcaccttccctcttccggggattcatcaaagtcaagatgcattatgtacgtgtccgaaactcccccaccaggggagcttccaaatcgacgagttcgtgcatacagagtcatcttctaccaagatgcagctcgttaagcaaaggctggaaacggtaacagaagtgatccggtcttgtgcagctaaagtaaataaaaacctcagtttcacttcaccccccgctgtatcctcacaacaatccaaactgaaacagtcgaatatgttgactgcccaggagatcctgcaccagttcggattcacacaaactggcattatttcaatcgagaggaaaccttgcaaccaccaggtcgacacagcccctaccgtggtggccctgtacgattacaccgcgaaccggtctgacgaactaaccattcaccgcggggatattatccgggtatttttcaaggataacgaagactggtggtacggcagtattggcaaagggcaggaggggtactttccagccaaccacgtggcatctgagacgttataccaggagcttcctcctgagattaaggagcggagccccccactaagtcccgaagaaaagaccaaaatcgagaaatcccctgcccctcagaaacagagcattaacaaaaataagtctcaagactttcggctgggcagcgagtccatgacgcattctgagatgagaaaggaacagtcgcatgaggaccaggggcatatcatggatacccgcatgcggaaaaataagcaggctggacggaaggtgaccttgattgaatag

SEQ ID NO: 177516 - DNA, 1218 bp, synthetic construct
  misc_feature 1..1218: note = Description of Artificial Sequence: Synthetic coding sequence
  source 1..1218: mol_type = other DNA
atgctgagcagcttcctgagcccccagaacggcacctgggccgacaccttttccttgctgctagctctcgcggtggcactgtacttaggctactattgggcctgtgtgctgcaacgcccccgcctggtggcaggtcctcaattcctggcgttccttgagccccattgttccattacgacagagaccttctaccccaccctatggtgtttcgagggtagactgcagtcaatatttcaagttttattgcagtcccagcccctcgttttgtatcagagcgatattttgcaaacacctgatggcggccagctcctactggattgggcaaaacagcccgactcctcacaggatccagacccaacaactcaacccatagtgctcctccttcctggaatcacagggtcaagtcaggacacatatgtgctgcacctagtaaatcaagcccttcgagatgggtatcaggctgtggtcttcaataataggggctgccggggcgaggaactgcgcactcatagagccttctgcgcttccaatacagaagacctggagacagtagttaaccacattaaacatcggtacccccaggccccgctgctggcagtggggatctcttttggcggcattctggtactgaatcaccttgcccaggcccggcaggctgctgggctcgtcgccgccctgaccttgtctgcctgctgggacagcttcgaaactaccagatctttagagacgcctctgaactccctcctgtttaatcagccccttaccgccggcctgtgtcaactcgtcgagaggaacaggaaggtcattgaaaaggtcgtggacatcgattttgtgctgcaggcgaggactatcagacagtttgatgaacgctatacttccgtcgccttcggctatcaagattgcgtcacatactataaggccgcgtcgcctagaactaaaatcgacgcaattcggatccctgtactttacttgagtgccgcagacgaccccttcagccctgtgtgtgctctgcctattcaagcagcccagcactctccttacgtcgcactgttgattacagctcgcggcgggcatatcggcttccttgagggccttctgccctggcagcattggtacatgtctagacttctgcatcaatacgccaaagctattttccaggacccggagggcctgcctgacctgcgagccctgttgccatccgaggaccggaattcgtag

SEQ ID NO: 177517 - DNA, 1197 bp, synthetic construct
  misc_feature 1..1197: note = Description of Artificial Sequence: Synthetic coding sequence
  source 1..1197: mol_type = other DNA
atgcggaagcggaccgagcccgtggccctggagcacgagcggtgcgctgccgctggatcttcctctagcggttccgcagcggccgccttagatgcagattgccgcctgaaacaaaacctgcgtctgaccggcccagctgctgctgagccacgatgtgccgccgatgctggcatgaagcgggctctcggcaggcgaaagggagtgtggttacgtttaaggaaaatactgttttgcgttttgggactgtatatcgccatcccctttctgataaaactgtgcccaggcattcaggcgaagctgatcttcctgaactttgtgcgcgttccttacttcatagacctgaaaaaaccccaggaccagggtcttaatcacacctgcaattactacctgcagcctgaggaagatgtcaccattggagtctggcatacggtccctgccgtttggtggaagaatgctcaaggcaaggatcagatgtggtatgaggacgcccttgccagcagtcaccctatcattctctacctccatgggaacgctggtacccggggcggggatcatagggtggaactctacaaggtgctaagttctttaggctatcacgtggttactttcgattaccgcggctggggtgattccgtgggcacaccctccgagagaggaatgacatatgatgccctccacgttttcgactggattaaggcgcgatctggagacaaccccgtgtacatctggggtcactccctcggaacaggcgtcgctactaacctggtaagacgtctgtgcgagagggagacgcccccagatgctctgatattggagagcccctttacgaatattagggaagaagctaaatcgcacccattctcagtgatctaccgctactttcccggtttcgattggttctttttagaccctatcacttcaagcgggattaaattcgccaacgatgagaatgtcaagcacattagctgccccctcctcattctacacgctgaggatgaccccgtggtgccttttcagttaggtcgcaagctttatagcatcgctgctcctgccaggtcgttcagggacttcaaggtccaatttgttccgtttcattctgatctgggctacagacataaatatatttacaaaagccctgagcttcctcgcatcctccgcgaatttctgggcaaaagcgaacctgaacatcagcattag

SEQ ID NO: 177518 - DNA, 1215 bp, synthetic construct
  misc_feature 1..1215: note = Description of Artificial Sequence: Synthetic coding sequence
  source 1..1215: mol_type = other DNA
atgcggaagcggaccgagcccgtggccctggagcacgagcggtgcgcggcagctggatccagttcctctggctcagctgccgctgccctcgatgcggactgcaggctgaagcagaatctacgcctgactggtcccgccgcggccgagccccgctgtgctgctgacgcgggcatgaagcgtgcccttggccgacggaagggcgtctggctaagattgcgcaaaatcctcttctgcgtgctgggtttatacatcgcaatacccttcctgattaagctatgtcccgggatccaggcaaagctgatattcctgaattttgtacgcgttccatacttcatagatttgaaaaagccacaggaccagggattgaatcatacatgtaattactacctgcaacccgaggaggatgtgactatcggagtgtggcacaccgtgccggccgtgtggtggaagaacgcccaaggcaaagatcaaatgtggtacgaagacgccctagcttcaagtcaccccatcatcttatatctccacgggaacgccggaactcgtggcggggatcacagagtagagttatataaggttctctcctctctcggctatcatgtcgtcacgttcgattaccgcggatggggcgacagcgtgggaaccccttctgaaaggggcatgacatatgacgcgctccacgtcttcgattggatcaaggcacggtcaggcgataatcctgtgtacatttggggccacagcttggggaccggcgtggcgacaaatctagtccgtcgactttgcgaacgagaaacacctccagacgccctcatcctggagagcccctttaccaatattagggaggaggcaaagtcccatccttttagtgtgatatatcgctattttcccggattcgattggttctttctggacccaattactagttccggcatcaaatttgccaatgatgaaaatgtgaagcacatttcctgccccctgctgatcctgcacgctgaggatgaccccgtagtgccattccagctggggaggaagctctacagcatagccgcaccggcaaggtcctttcgggacttcaaagttcaatttgtcccttttcattcggacctgggatatcgacataaatacatatacaaaagtcccgagttgccccgaattctccgcccacagcagggacccggcagtagcccagacccatccatgtggagtgaattggtctag

SEQ ID NO: 177519 - DNA, 564 bp, synthetic construct
  misc_feature 1..564: note = Description of Artificial Sequence: Synthetic coding sequence
  source 1..564: mol_type = other DNA
atgagcggcggcggccacggcggcgtgtgcttcctgtgctgcatcctcctgcaggggaggaagggcgtttggctcagactgcgaaagatccttttctgcgttcttggtctgtacatcgctataccattcctgatcaaattgtgcccgggcatacaggccaagctgatctttctcaattttgtccgggtgccttattttatcgatctgaagaagccccaggatcaggggcttaaccatacctgcaattattaccttcaacccgaggaggacgtgactattggtgtgtggcacacagtgcctgctgtctggtggaaaaacgctcaggggaaagatcagatgtggtatgaagatgccttggcgagttcacatcctataatcctctatctccatgggaatgctggtacaaggggcggagatcaccgggtggagctctacaaggtgctgagttctctgggctatcatgtggtgacatttgactatagaggatggggtgactccgtggggaccccgtcagagagaggaatgacatacgacgcgctgcacgtctttgattggatcaaatag

SEQ ID NO: 177520 - DNA, 1083 bp, synthetic construct
  misc_feature 1..1083: note = Description of Artificial Sequence: Synthetic coding sequence
  source 1..1083: mol_type = other DNA
atgcggaagcggaccgagcccgtggccctggagccccggtgcgccgctgatgctggcatgaaaagagccctgggccgtcggaagggtgtgtggttgaggttgaggaagattctgttttgcgtgctgggcctttatattgctatcccctttctgatcaaactttgtccagggatacaggctaagctgatctttctcaacttcgtgagagtcccctactttatcgatctgaaaaagccacaagatcagggcttgaatcacacatgtaattactacttgcagcccgaagaggacgtgacaataggagtgtggcatacggtcccggccgtgtggtggaagaacgcccaagggaaggatcagatgtggtatgaggacgcgctagcttcctcacaccccattatcctgtatcttcatggcaatgcaggcacccggggtggtgaccatcgcgtggagctatataaggttctgagtagtctgggataccatgtagtaacttttgattacaggggctggggcgatagcgttggaaccccatcggagagggggatgacctacgatgcccttcatgtgtttgactggattaaagctcggtccggcgacaacccagtttacatatggggccatagcctgggtaccggcgtcgccaccaatctggtccgaaggctgtgcgaacgcgaaactcctcctgatgctttgatcttggagagcccgttcactaatatcagagaggaggcaaagtcccacccgttctccgtcatctaccgctacttccccggattcgattggttctttttagaccccataacatctagcgggatcaagttcgccaacgatgagaacgtgaaacatatcagctgcccactccttatcctgcatgctgaggacgatcctgttgtgccttttcagctggggcgcaagctctactccatagctgctccagctcgatcctttcgtgacttcaaggtccaattcgtgccctttcactccgacctagggtaccggcataagtatatatataagtccccagaactacccagaatcttgcgagagttcttaggcaaaagcgagccggagcatcagcattag

SEQ ID NO: 177521 - DNA, 1020 bp, synthetic construct
  misc_feature 1..1020: note = Description of Artificial Sequence: Synthetic coding sequence
  source 1..1020: mol_type = other DNA
atgctgtaccccggcagcgtgtacctgctgcagaaggccctgatgccggttcttttgcagggccaggcccgacttgttgaagagtgtaatggaaggcgtgcgaagctgctggcttgcgatggtaatgagatcgatactatgttcgttgacaggcgcggaacggccgagccgcaaggacagaaacttgtgatatgctgtgaaggaaacgctgggttctatgaagttggctgtgtgtccacacctttagaagccggatatagcgttttaggatggaatcaccctggctttgcgggatcgacgggtgtgcctttcccacagaacgaggccaacgccatggatgttgtagtgcagttcgctatacaccggctgggattccagccccaggatattatcatctacgcttggagcatcgggggcttcactgccacctgggccgctatgtcctaccccgatgtgagcgccatgatcctggacgccagtttcgatgatctggttccgcttgcgttgaaggtcatgccagattcttggcgtggcctcgttacaagaacagtgagacagcacctgaacctgaacaacgcagaacagctttgccgctatcaaggaccggttttgttgattagaagaacaaaagatgaaatcatcactaccactgttcccgaggatattatgagcaacagaggtaatgatctcctcctgaagctgcttcagcataggtatccccgggtgatggcggaagaggggttaagagtggtgcgtcagtggctagaagcctcttcacagctggaggaagcctcaatatactccagatgggaggtcgaggaggactggtgtttatctgtccttcgcagctatcaggctgagcacgggcccgactttccttggagtgtgggtgaagacatgtctgctgatggtcggagacagcttgccctgtttctggcacgcaaacatctgcataacttcgaggccactcattgcactccgctgcccgcccagaatttccaaatgccatggcacttgtag

SEQ ID NO: 177522 - DNA, 1677 bp, synthetic construct
  misc_feature 1..1677: note = Description of Artificial Sequence: Synthetic coding sequence
  source 1..1677: mol_type = other DNA
atggccaagctgctgagctgcgtgctgggcccccggctgtacaagatataccgggaaagggattctgagagagcacccgcgagcgtgccagagacccccacggcagtgacggccccccattcgtcctcgtgggacacttactaccagccccgcgctctcgaaaagcatgccgactccattcttgcactggcgtccgtgttctggtccatctcctactacagcagcccttttgcttttttttacctttataggaagggttatctcagtctctccaaagtcgtgccgttttcacactacgcaggtactctgcttctgttgttggccggcgttgcatgcctcaggggtatcggcagatggacaaacccacaataccgacaatttatcactattctggaagctacgcacagaaaccagtcgagtgaaaacaagcgccaactagctaactataatttcgactttagaagctggccagttgatttccactgggaagagcccagttcaagaaaagaatctcgggggggtccatcaaggcgaggggtcgctctgctgcggccagaaccactacatcgtggcaccgctgatactctactgaatagagtcaaaaagctgccatgtcagataacctcttacttggtggcccatactcttggacgcagaatgttataccccgggtcagtgtaccttctgcagaaggctctgatgcccgtgctcctccagggccaggcacgcctggtggaagagtgcaatggaaggagagctaagctgctggcatgtgacggtaacgagatagacactatgttcgtggatcgcagggggaccgctgagcctcagggacagaagcttgtgatttgctgtgagggcaatgctggcttctatgaagtgggctgcgtgtcaacgccattagaagctggttactctgtcttaggatggaaccacccggggttcgcaggaagtaccggtgttccattccctcaaaacgaggcaaatgcgatggatgtggttgtgcaattcgccatacatcgattgggattccagccccaagacatcattatatacgcgtggtctatcggtggcttcaccgctacatgggctgccatgtcttatcccgacgtgtccgccatgatattggacgccagcttcgacgacctggtacctctggctctgaaagtcatgccagactcttggagagggcttgtcacaagaactgttcgccagcatctgaacctcaacaacgccgaacaactttgccgctaccaagggcccgtcttgctcatcaggcggacaaaggacgaaataattacaacgaccgtgccggaagatattatgtcgaaccggggtaacgacctcctgctgaagttgttacagcatcgatatcctcgcgtcatggccgaggaaggcctgagagtggtaagacaatggctcgaggcgagttcccagttggaagaggcctctatttattctaggtgggaggtcgaggaagattggtgcctctccgtattgcgaagctaccaggccgagcatggacctgatttcccatggtcggttggggaggacatgtctgcagatggacgccggcagttggcattattcctcgctcgcaagcacttgcacaattttgaggccacccactgcacaccactgcccgctcaaaacttccagatgccctggcatctgtag

SEQ ID NO: 177523 - DNA, 1806 bp, synthetic construct
  misc_feature 1..1806: note = Description of Artificial Sequence: Synthetic coding sequence
  source 1..1806: mol_type = other DNA
atgagccagctggcccggcggcggagccggtacggcctgaccagccgggcgcacaataccagtgaagcaggccgggccgggcctgctggcggacctgcagccggacgagccgcggcgcgcgctggggccatggctaaactgctgtcatgcgtcctaggacccaggctctacaaaatctaccgagagagggactcagagagagcccccgccagtgttccagagactcccaccgctgtcacggccccacacagctcttcatgggacacatattatcagccaagggcgcttgaaaagcacgccgactctatattagcactggcctccgtattttggagcattagttactacagttcccctttcgcatttttttacctctaccgcaaggggtacctgtcactcagcaaggtcgtgcctttcagccactacgcaggaaccctacttctgctgctggccggcgtggcttgcctcaggggcattggcagatggaccaacccacaatataggcagtttatcactattctcgaagcaacccataggaaccaaagcagcgagaacaagcgccagttggcaaattataatttcgattttaggtcatggccggtcgacttccattgggaggagccaagtagccgcaaagagagccgaggagggccttctcgcaggggcgtggccctcttgcgcccggagcccttgcacagaggcacagccgacacactgctcaacagagtgaagaaactcccatgccagataacttcgtatctagtggcacatacactcgggaggagaatgctgtaccctggctccgtctacctcctccagaaggcacttatgccagtgctgttgcagggccaggcccgccttgtggaagagtgcaatgggaggagggctaagctactggcttgtgacgggaacgaaatagatacaatgttcgtcgacaggagggggaccgccgagccgcaagggcaaaagcttgtgatttgctgtgaagggaatgccggcttctacgaggttggttgcgtctccacaccgctggaagcgggatattcagtcctgggttggaatcaccctggcttcgcgggatcaaccggcgtgccctttccccagaacgaggccaatgccatggacgtcgtggtccagttcgcaatccacaggttagggttccagccccaggatattatcatatacgcatggtctattggcggcttcaccgcgacatgggcagctatgtcttatccagatgtttctgccatgatcctggatgcctccttcgatgaccttgttccattagccctgaaggttatgccagactcctggcggggcctggtgacccgaacagtgaggcagcacctcaacttgaacaacgcagagcagctttgtagataccagggcccggtgctgcttattaggcggacaaaagacgaaattattaccactaccgtgcctgaggacatcatgagcaaccgaggtaatgatctgctgttaaagcttttgcaacaccggtatccccgtgtcatggccgaagagggtttgagagttgtgagacagtggctggaagctagcagccagttggaagaagcttctatatactcccgttgggaggtcgaagaggactggtgtctctcggttctgcgaagctaccaggctgaacatggccccgacttcccttggtcagtgggagaggacatgtcagcggatgggaggcggcaattagccttattcctggccaggaagcatttgcacaactttgaggcaacacactgcactcccttgcctgcacagaatttccagatgccatggcatctgtag

SEQ ID NO: 177524 - DNA, 795 bp, synthetic construct
  misc_feature 1..795: note = Description of Artificial Sequence: Synthetic coding sequence
  source 1..795: mol_type = other DNA
atgcccccccccgccctgttcctgagcagcctgtacccccggctggagttccaaaacgatttctatcgatcttgtattcggcggagctccccccagccgccgccaaatctggcctggcggccagagagtctgtatagtggggaactggcagggggaggctacctatctctgtccaaagtcgtgcccttctcccactatgccgggactctgttgctgctgctggctggggtcgcatgtcttcgcggaattggaaggtggactaatccccaataccgacagtttattactattttggaggcaacacaccgcaatcagtcgtctgagaataagcggcagcttgccaattacaatttcgatttccgatcttggccagtagactttcattgggaagaacccagcagcagaaaggagtccaggggggggccttccaggaggggcgtggcccttcttcgccccgaacctcttcatcgaggaaccgctgacacattgttgaaccgagtgaagaagctgccttgccagattacatcgtacttagttgcccacaccttagggcgtagaatgttgtatccaggcagcgtttatctgcttcaaaaggccctgatgccagtactcctccaggggcaggcgcggctcgtcgaagaatgcaacggacggagggccaaactgctggcctgcgatggtaatgaaatcgatacaatgttcgtagatcgtaggggaaccgctgaaccacagggccagaagctcgtgatctgctgcgaaggtaatgctggcttttacgaagttggctgtgtgtag

SEQ ID NO: 177525 - DNA, 795 bp, synthetic construct
  misc_feature 1..795: note = Description of Artificial Sequence: Synthetic coding sequence
  source 1..795: mol_type = other DNA
atgcccccccccgccctgttcctgagcagcctgtacccccggctggagttccagaacgacttttatcgaagttgtattagaaggagttctccccaacctccacctaacctcgcatggcggcctgaaagcctctattcaggtgagctggccgggggagggtatctatctttgtccaaagtggtgcctttttcacattacgcgggtacactgctccttctgctggccggcgtggcctgccttagaggaatcgggcgctggaccaatccccagtatagacagttcattacaattttggaagccacacatcgtaaccagtccagcgagaacaaacgtcaattggcaaattacaatttcgacttcagatcttggcccgtggattttcactgggaagagcctagctccagaaaagagagccgagggggaccctctcgaagaggagtggctctgctgaggcctgaacccctacaccgaggcactgccgacacacttctgaatcgagttaaaaagctcccctgccagattaccagctacctggtggctcacacactgggaaggcggatgctgtatcccggctcggtgtacctactgcagaaagcgcttatgccggtcctgctgcaggggcaggccaggctggtcgaagagtgtaatggtcgccgagctaagctactggcttgcgacggtaatgagatcgacactatgtttgtggaccgcagaggcacagctgaacctcagggccagaaactggtcatctgttgcgaaggtaacgccggattctacgaagtcggatgtgtgtag

SEQ ID NO: 177526 - DNA, 795 bp, synthetic construct
  misc_feature 1..795: note = Description of Artificial Sequence: Synthetic coding sequence
  source 1..795: mol_type = other DNA
atgcccccccccgccctgttcctgagcagcctgtacccccggctggaattccagaatgatttttaccgttcctgtatacggcggtcctccccacagcctccaccaaatctcgcttggcgcccagagagtctttattccggggaactggcgggagggggctacctcagtctttccaaagtggtgccattctcacactatgcggggacactgctgctactgctggccggtgtagcatgcctgagaggaattggacggtggactaatccccagtaccggcaatttatcaccatcttggaagccacacataggaatcaatcctcagagaacaaacgtcagctggccaactacaatttcgatttcagaagttggcccgtagatttccactgggaggagccgtctagcaggaaagagtcacggggtgggccttcacgacgcggtgtcgccctccttaggcccgagccccttcatagagggaccgccgataccctactaaatagggtgaagaaattaccctgccaaatcacttcctacctggtggctcatacactaggcagaaggatgctctaccctggttccgtgtacttactgcaaaaggcactcatgcccgtgctcctccaggggcaggctcgtctcgtcgaggagtgtaacggccgccgggcgaaactcttagcttgcgatggcaatgagatcgataccatgtttgttgatcgtcgcggaacagcggagccccagggacaaaaacttgtcatttgctgcgaaggtaacgctggattctacgaagtgggctgcgtgtag

SEQ ID NO: 177527 - DNA, 1806 bp, synthetic construct
  misc_feature 1..1806: note = Description of Artificial Sequence: Synthetic coding sequence
  source 1..1806: mol_type = other DNA
atgagccagctggcccggcggcggagccggtacggcctgaccagccgcgcccacaacacatctgaggctggacgcgccggccccgcaggtggcccggccgctggacgagccgccgcccgggccggagcgatggctaagctgttgagctgtgttctaggcccacgactgtacaagatctatcgtgaaagagactccgagcgcgcacccgcgtcagtcccagagacccctactgccgttacagctccacattcctcctcctgggacacttattatcagccgagggccttggaaaagcatgccgactcgatcctcgctctggcaagcgtgttttggtccattagctactactcctctccctttgcctttttctacctatacagaaaaggctacctgtctctaagcaaagtggtgcctttctcacattatgctgggactctcctcctgctcctggcaggcgtggcgtgtctgcggggcattgggcggtggaccaacccacagtataggcagtttatcacaattctggaggctacacatagaaaccagagtagcgagaacaagcggcaattggccaactataactttgattttcgcagctggcccgttgactttcactgggaagagccctccagcaggaaagagtctcgcggaggacctagcaggcgcggcgtggcccttttacggcccgaacccctgcacagagggaccgccgacaccctactgaatcgggtgaagaagctcccctgtcagatcacatcttacctcgtcgcgcacaccttgggccggaggatgctgtatcccggatctgtgtatctgctgcaaaaggctctgatgccggtcttactccaaggacaggctagactcgttgaggagtgtaatggccgacgcgccaagctcctggcttgtgatggtaatgagattgataccatgttcgtggatagacgggggacagcagagcctcagggacagaaactcgtaatctgctgcgagggtaatgctggcttttatgaggtaggatgcgtgagcacccccctggaggcgggatatagcgtcctgggctggaaccatccaggattcgctggttcaactggagttccgttcccccagaatgaagccaatgctatggacgttgtggtacaattcgccatacacagattgggctttcaacctcaagatatcataatttacgcctggagtataggggggttcacagccacatgggcagcaatgtcatatcctgacgtgtcagctatgattttggatgccagctttgatgacctggttcctctcgccctgaaggttatgcctgactcgtggagaggcttggtcaccaggactgtgcggcagcatctgaacctgaataacgccgagcagttatgtcgctaccaggggcccgtcttgctgattcgacgaaccaaggacgaaatcattaccactactgttccagaggacatcatgagcaatagaggcaacgacctgctgttgaaactgcttcagcaccgctacccacgggttatggctgaagaaggtctccgggttgtgagacagtggctagaggcgagctcacagttggaggaagcatctatctattcccgttgggaagttgaagaggactggtgtctgagtgtgctgagaagttaccaggcagaacacggtcccgactttccatggagtgtgggcgaagatatgtccgccgacgggcggcgccaactggcactctttttggcccgcaaacacctgcacaactttgaagctacccactgcacccccctccctgctcagaatttccagatgccctggcacctctag

SEQ ID NO: 177528 - DNA, 795 bp, synthetic construct
  misc_feature 1..795: note = Description of Artificial Sequence: Synthetic coding sequence
  source 1..795: mol_type = other DNA
atgcccccccccgccctgttcctgagcagcctgtacccccggctggagtttcagaatgacttttaccgctcttgtatacggaggagttccccgcaaccacctcccaatcttgcttggcgccccgaatccttgtacagtggcgaactggcaggtgggggctacctgtccctgagtaaggtcgtgccattcagtcactacgctggtaccttgttacttctcctggcaggcgtagcctgcctgcgaggtattggaaggtggactaacccacagtacaggcaattcatcacgatcttagaagccacacaccggaaccagagtagtgagaacaagaggcaactcgctaattataactttgattttcgctcctggcccgtagacttccattgggaagagcccagcagccgcaaggaatctcgggggggtccctccagacgaggggtagctttgctgcggccagaaccattgcaccgggggacagccgacaccctgctgaatagggtaaagaaattgccttgtcagatcacttcctacctggtcgctcacacactcggacggaggatgctttatcctggttcagtgtacctgttacagaaagctctcatgccggtgttgcttcaaggtcaagctaggttagtggaagaatgtaatggaaggagggccaagctgctcgcctgtgacggtaacgagattgatactatgttcgtcgaccgccgggggaccgcagagcctcagggtcagaagctggtgatctgctgcgaaggaaacgctggattctacgaagttggctgtgtgtag

SEQ ID NO: 177529 - DNA, 1806 bp, synthetic construct
  misc_feature 1..1806: note = Description of Artificial Sequence: Synthetic coding sequence
  source 1..1806: mol_type = other DNA
atgagccagctggcccggcggcggagccggtacggcctgaccagcagagcacacaataccagcgaggccggacgggctggaccggccggcgggcctgccgcagggagagctgcagcacgcgccggagccatggctaaacttctgagctgcgttctggggccccggctgtacaaaatttatcgggagagggacagcgaaagagcccccgcctccgtgcctgagaccccaaccgccgtcaccgccccccacagttctagctgggatacgtactatcagcctcgggcgctcgaaaagcatgcggatagcattctggcgcttgcctccgtgttttggtccatctcatattactcctcacccttcgcgttcttctatttatatcgcaagggctatctttctctcagcaaagtggtgcccttttcacactatgccgggacgcttctgctgctcttggctggagttgcctgtctgcgaggtatcggaaggtggacaaacccccaatacaggcagttcataaccattctagaggcaacacacagaaaccagagcagcgagaacaagcggcagctggcaaattataacttcgattttagatcctggcctgtggacttccattgggaggagccatcctcaagaaaggaatcccggggggggccatctcggcgtggggtagcactactccggccagaacctctccatcgaggcacagccgacaccctgttgaatcgtgtcaagaagcttccgtgccagattacctcatacctcgttgctcacactctgggtcgaagaatgttgtatcctggttctgtttacttactgcagaaagctctgatgcccgttctcctgcaggggcaggccaggctggtagaagaatgcaatggcagacgcgcaaaactgctggcgtgtgacggtaatgagattgataccatgttcgttgacaggcgaggcactgcagagcctcaggggcagaaactggttatctgttgtgaaggcaacgccggattctacgaagtagggtgtgtaagtacccctctggaggcaggttatagtgtcttggggtggaatcatccaggatttgccgggtcaaccggcgtgccattcccgcagaatgaggcgaacgctatggatgttgtggtgcagttcgctattcatcggttgggatttcaacctcaggatattatcatatacgcctggtccattggcggattcacagccacttgggccgcgatgtcataccccgatgtctctgcaatgatcctcgacgcgtctttcgacgacctggtgccactggctttgaaagtcatgccggatagctggcgaggattggtgacccgaacagttcgacagcatttgaaccttaacaacgccgaacagctatgtcggtaccaaggtccagtgctcttaattcgcaggactaaagatgaaattatcacgaccacagtgccagaagatatcatgtccaataggggaaacgatctcttactcaagctgctacaacacaggtatccacgcgtcatggctgaagaagggctgcgcgttgtgagacaatggcttgaggcttcatcccaactagaggaggccagcatctatagtcggtgggaggttgaagaagactggtgcctcagtgtactcagatcgtaccaagcagaacatggccccgacttcccttggagtgttggggaggacatgtccgctgatggccgcaggcagctggccttgtttctggcccgtaaacacctacacaatttcgaggcaacgcactgtacccctctgcccgcccaaaacttccagatgccttggcacttgtag

SEQ ID NO: 177530 - DNA, 795 bp, synthetic construct
  misc_feature 1..795: note = Description of Artificial Sequence: Synthetic coding sequence
  source 1..795: mol_type = other DNA
atgcccccccccgccctgttcctgagcagcctgtacccccggctggagttccagaatgacttctaccgcagctgcataagaaggtctagtcctcaacccccccccaacttggcctggcggccagagtctctgtacagcggcgaactggccggaggcgggtacctgtctctcagtaaggtggtccccttctctcactatgcaggcactctgctcttattgctggccggcgtggcgtgcctgaggggaataggtcggtggactaatccgcaataccgtcagttcattaccattctggaggctacacacaggaatcagtccagtgagaacaagaggcagctcgctaactacaacttcgacttcagatcgtggcccgtggatttccattgggaggaacccagctctcggaaagaaagtagaggaggcccaagcagacgtggcgtggctctcctgaggccagagccactgcatcgtggcaccgctgataccttattaaaccgcgtgaaaaagttgccctgccaaatcacatcctatctcgtggcccacacgctcggcagaagaatgctgtaccccggaagcgtatacctactgcagaaggccctcatgcctgttctcctgcaggggcaggctagactcgtggaggagtgtaacggtcgcagggcaaagcttctagcctgtgacggaaacgagatcgacacgatgttcgtggaccgtaggggcacggcagagcctcaagggcagaaactcgtgatttgttgcgaaggtaatgcaggattctacgaggttggttgtgtatag

SEQ ID NO: 177531 - DNA, 1806 bp, synthetic construct
  misc_feature 1..1806: note = Description of Artificial Sequence: Synthetic coding sequence
  source 1..1806: mol_type = other DNA
atgagccagctggcccggcggcggagccggtacggcctgaccagccgagcccacaacacatccgaagcggggcgagccggccctgccggtggcccagcggcgggcagggcagcagcgagggccggcgcgatggctaaattgctcagctgcgttctgggccctcgtctgtacaaaatctacagggaacgggatagtgagagggctccagcctccgtgcctgaaacccccacggctgtaacagcccctcattcgagctcatgggatacatactatcaacccagggccctggagaaacatgccgactccatcctcgctctggccagcgttttctggagtatctcttattactccagtcctttcgcttttttttatctgtatcgaaagggctacctcagcctttccaaggtggtgcccttttcccactatgcgggaacacttttactactgcttgcaggggtcgcctgtcttcggggaatcggaagatggaccaatcctcagtacagacaattcatcaccatactggaggcgacccaccgcaatcaatccagcgagaacaagagacagctggcgaactacaacttcgatttcaggtcttggccagttgatttccattgggaggagcctagcagccgcaaggagagccggggtggcccctctaggaggggtgttgcactcctacggcccgagcccctccaccgcggtaccgcagacactctgttgaatcgagttaagaagttgccttgtcagatcacgagctatcttgtagcacacacactaggcagacggatgctgtaccctggcagcgtgtatctgttgcagaaagctctcatgccggttcttctgcaaggtcaagctagactggttgaggagtgtaatggccggcgagcaaagctgctcgcctgtgacggcaatgagatcgacaccatgttcgtagaccggcgcggcactgcggaaccccagggccagaagcttgtgatttgctgcgagggaaatgctggcttttatgaggtgggttgcgtaagcacacccttggaggccggatactccgtcttgggatggaatcatcctggatttgctgggtctaccggtgtgccctttcctcaaaacgaagctaatgccatggatgtggtcgtccagttcgccatacaccgactgggattccagccacaggatattattatttacgcctggtctataggcggtttcactgccacctgggccgcaatgtcctatcctgatgtatccgcaatgattcttgacgccagttttgacgatttggtgcccctcgcgctgaaagtgatgcctgattcctggcgcggattggtgacgcggacggtgcggcagcatctgaatttgaataacgcggagcagctgtgcaggtaccagggccccgtgctcttgatcaggcggacaaaagacgagatcattaccaccactgtgcccgaggatatcatgagtaaccgggggaacgatctgcttcttaaattgctgcagcacagatatcctcgagtgatggctgaagagggactaagggtggtccggcaatggctagaagcatcatctcaattagaagaggcttctatctactctcgttgggaggtagaggaagactggtgcctctcagtcctgcgcagctaccaggcggaacacggaccggattttccttggtcggtgggcgaggacatgagcgccgacggcagaaggcaactcgctctctttttagcccggaaacacctccataatttcgaggctacacattgtacccctctgcccgcccagaatttccagatgccctggcatctttag

SEQ ID NO: 177532 - DNA, 795 bp, synthetic construct
  misc_feature 1..795: note = Description of Artificial Sequence: Synthetic coding sequence
  source 1..795: mol_type = other DNA
atgcccccccccgccctgttcctgagcagcctgtacccccggctggagttccagaatgacttttaccggagctgcattaggaggtccagtccgcaacctccgccaaatttggcttggaggcctgagtccctgtactccggcgaactggctgggggcggctatctctcattaagcaaggttgtgcccttttcccactacgccggtaccctgctgcttctgctcgcgggcgtcgcgtgcctgagaggtatcgggcgctggactaatcctcagtacaggcagtttattactatcttggaagccacccatcggaaccagtccagtgagaacaagcgccagctggcaaactacaacttcgactttaggagctggccagttgactttcattgggaagaaccgagctctaggaaggaaagccgaggaggaccttcacgacgaggggtggcactcctgagacccgaacctttgcataggggcacagccgacactctgctgaaccgagtaaagaagctcccttgccaaatcacttcttatctcgttgcacatacactgggacgccggatgctgtacccaggatcagtctacctgctgcagaaagccctgatgcccgtcttgttgcaaggtcaggcacggctcgtggaagaatgtaacggaagacgtgcaaagctgctggcctgcgacggaaatgagatagacacgatgttcgtagacaggaggggtactgccgagccccagggccagaagctggtgatttgctgcgagggcaatgcgggcttttatgaggtgggctgtgtttag

SEQ ID NO: 177533 - DNA, 1677 bp, synthetic construct
  misc_feature 1..1677: note = Description of Artificial Sequence: Synthetic coding sequence
  source 1..1677: mol_type = other DNA
atggccaagctgctgagctgcgtgctgggcccccggctgtacaagatttatagagagagggactctgagcgtgctcccgcatctgtcccagagaccccgaccgcagtaacagcaccccatagctcttcctgggatacatattatcaaccacgcgctctggaaaaacacgctgattctatcttggcacttgcttcagtcttttggtccattagctattacagttcacccttcgcctttttctatctgtaccggaaaggctatctttccttaagcaaagtggtgccattttcccattatgcagggacactgcttctattgctcgcaggtgtagcttgtttaagaggaatagggcgctggacgaacccccaatacagacagtttatcacaattttggaggctacacatagaaaccagagctccgagaataagaggcaactcgccaactacaactttgactttaggtcatggcccgtggatttccattgggaggagccgagcagtcggaaggagtcacgcggcgggccgtctcgtaggggagtggcccttctcaggcccgaacccttacatcggggtactgcagacaccctcctcaaccgcgtcaagaaactgccgtgtcagataacctcttatctcgtggcccatacgctcggaaggcgaatgctctaccccggcagcgtttatctgctccaaaaagccctcatgccggtgctgctacagggccaggcacgcctcgtggaggagtgtaacgggcgtcgggctaaattgctcgcctgcgacgggaacgagatagataccatgttcgtggaccgcagggggacagccgaaccacagggtcaaaaactcgttatatgctgcgaaggaaacgctggcttctacgaggtgggttgtgtctctacaccactcgaagcagggtacagtgtgctcggttggaaccatcctggtttcgcaggcagcaccggggtcccctttccacaaaacgaagctaacgctatggacgttgtggtgcagttcgctatccataggctcggcttccagccccaagacatcattatttatgcttggtccatcggcggattcacagctacctgggccgctatgagctaccccgatgtaagcgccatgatcttggacgcctcctttgacgatctggtgcctctggctctgaaggtaatgcctgattcttggaggggactggtcacacgcacagtcaggcagcacctgaatttgaacaatgctgagcaattgtgtagatatcagggtccagtcttgttgatccggaggaccaaggatgaaattatcacaaccactgtgcccgaggatatcatgtctaacagaggaaacgatctgctcctcaagctgctgcagcatagatatccacgggtaatggcagaggagggattgcgcgtggttcgacagtggctggaagcttcatcccagctggaggaagcatctatttactcccggtgggaagtggaggaggattggtgcctctccgtcctgaggtcctatcaggctgaacatggtcctgactttccttggtccgtcggcgaagatatgtcagctgatggtagacgtcagctcgccctctttctagcaaggaaacacttacacaattttgaagcgacccactgtactcccctccccgctcagaatttccagatgccctggcacctgtag

SEQ ID NO: 177534 - DNA, 1806 bp, synthetic construct
  misc_feature 1..1806: note = Description of Artificial Sequence: Synthetic coding sequence
  source 1..1806: mol_type = other DNA
atgagccagctggcccggcggcggagccggtacggcctgaccagccgagcacacaacacgtccgaggcaggtcgagctgggccagcaggcggacctgcagccggccgtgccgcggcgagagctggcgcaatggccaagctgctcagttgtgtccttggacctcggctctacaagatctatcgggaacgcgatagcgagagagcgccggcttcagtgcccgaaacccctacagctgtgacagcgccccactccagcagttgggacacatactaccagcctcgtgctcttgaaaaacacgctgattctattttagctcttgcctccgtcttttggagcatatcctattattcaagcccgtttgctttcttctacctctacagaaaaggttatctctccctgagtaaggtagttccattctcgcactacgccggtacactcctcttactgctggcaggggtcgcgtgcttgcgcggtatcgggcggtggactaacccccagtaccgacaattcattaccattttggaggccacacaccggaatcagagctcagagaacaagcgtcagctggcaaactataacttcgattttagaagctggccagtcgactttcactgggaggagcctagctctagaaaagagtcccgcggtgggcccagtcgtcggggggtggctctgcttcgtccagaacctctccatcggggcactgccgatacactgctgaacagagtcaagaagctcccttgccagatcaccagttacctggtggcgcacactctcggacggcggatgctgtatcctggttcggtttacctgctgcagaaggccttgatgccagtgttgctacagggacaagcccggctggtcgaagagtgcaatggaagacgcgctaaactcttggcttgtgacgggaatgagatcgacaccatgttcgtggatcggcgaggcacagcagagccccagggccagaaactggtgatctgttgcgaaggtaatgctggattctacgaggtggggtgcgtgagcactcctctggaagccggatactccgtgcttggttggaaccatccgggattcgctgggtctacgggggtgcccttcccccagaatgaagccaatgccatggacgtggtcgtgcagtttgctatccaccgactaggatttcaaccacaggacattattatctatgcttggtcaattggcggctttactgcaacatgggccgcaatgagttaccctgatgtgagcgctatgatccttgacgcctcttttgatgacttggtccctctcgctctgaaggtgatgccagattcatggcgcggccttgtcaccaggactgtgcgccagcatttgaaccttaataacgccgagcagctctgccgttaccaaggccctgtgctccttattcgccggactaaggatgaaatcatcacaactacagtgcctgaggacattatgtcaaacaggggaaatgacttattgcttaaactcctgcagcatagataccctcgagtgatggctgaggagggtctgcgagtggtccgacagtggctcgaggcatcttcgcagctcgaggaagccagtatctacagtaggtgggaagtcgaggaagactggtgcttatcagtgttaagaagctatcaagccgaacacggaccagactttccatggagtgtcggggaggacatgtctgccgatggcagacgacaactggcgctgttcttggcacgcaagcatctgcataatttcgaggctacccattgtacacccctcccagcccagaactttcagatgccttggcatctctag

SEQ ID NO: 177535 - DNA, 438 bp, synthetic construct
  misc_feature 1..438: note = Description of Artificial Sequence: Synthetic coding sequence
  source 1..438: mol_type = other DNA
atgctgggccactgctgctacttctggcaggtgtggcccgccagcgaagccttggcagcaggcccaaccccctccacagggagcagttccccctcgtggaagcagcacataggaacttccctccagaaaaccagaggttctctgccaaccaccacactaacatcgggcgccgggcagtcaacaagcaccggcaagaatccagccgcaggacgctccttggagggggccctcccagctggagtctggccttgctttgcgcagtcaccatgtactggcggtcagcagaccccctcctctaccggcctccggtcttgcttagtcaggagcccaggcgggaagcaacagcgcggagaggcccactgggggggtggggcaatatcaggcgtgttatgggagtgggcccttcattgcaaaatcgcagtgacccactgggcctag

SEQ ID NO: 177536 - DNA, 1677 bp, synthetic construct
  misc_feature 1..1677: note = Description of Artificial Sequence: Synthetic coding sequence
  source 1..1677: mol_type = other DNA
atggccaagctgctgagctgcgtgctgggcccccggctgtacaagatctacagggagcgggactcggagagagcccccgcaagtgtccccgagaccccaaccgcagtgactgccccccactcaagctcgtgggatacctattatcagccgcgggctcttgaaaagcatgcggattcaattctggctctagccagcgttttttggtcgattagttactacagtagtccattcgccttcttctacctgtatcgaaagggatatctttcactgtctaaggtggttcctttttctcattacgctgggacgttgcttctcctgctggctggcgtagcctgtctaagaggtataggcaggtggacaaaccctcagtatcggcaattcatcacaatactggaggccacccaccggaatcagagttcagaaaacaagcgtcaattggccaattataacttcgattttagatcgtggcctgtggatttccactgggaagaaccttccagccgcaaggagagcagaggtgggccctcaaggcggggagttgccttgctgaggcctgaaccgctccacagaggaaccgccgacacgctgcttaacagagttaagaaacttccttgccagattacatcataccttgtggcccacacccttggcaggcggatgctatacccgggctctgtgtatctgctgcagaaggctctcatgcccgtcctgctccaaggacaggcacgactggtggaggaatgcaatggtagaagagcgaagctcttggcatgcgatggcaacgagatcgatacgatgttcgttgatagacgtgggacagcagagcctcaggggcagaaactggttatctgctgtgagggcaacgccgggttttatgaagtaggttgcgtctcgacaccattggaggctggttacagtgtcctcgggtggaaccaccccgggttcgcggggtctaccggggtgcccttccctcaaaacgaagcgaacgccatggacgtcgtggttcagtttgcaatccatcggctgggcttccagccgcaggacattatcatctacgcctggagcattgggggttttacggccacgtgggccgccatgagttatcccgacgtgagcgccatgatcctggacgcatccttcgatgacttggtgcctctagccctgaaagtgatgcctgactcatggcgaggtctggttacaaggactgtacggcagcacctgaatctgaataacgccgagcaactctgccggtaccagggcccagttcttcttatccggcggaccaaggatgagattataacaacaaccgtgcccgaggacatcatgagtaacagaggaaacgatttgctgctgaaactgctacaacataggtatccacgggtaatggctgaggaggggttgagggtcgtgaggcagtggctggaagcctcttctcaactggaagaggcatcgatttacagtcgttgggaggtggaggaggactggtgcctgagcgtgttgaggagttaccaggccgagcacggccccgacttcccatggagcgtcggcgaagatatgtcagcagacggccggcgtcagctggccttgttcctggcccgaaagcacctccacaacttcgaagctacccactgtactccactacctgcacagaactttcagatgccatggcatttgtag

SEQ ID NO: 177537 - DNA, 1677 bp, synthetic construct
  misc_feature 1..1677: note = Description of Artificial Sequence: Synthetic coding sequence
  source 1..1677: mol_type = other DNA
atggccaagctgctgagctgcgtgctgggcccccggctgtacaagatttatagagagcgggactctgaacgggccccggccagcgtgcctgaaactcccaccgcagtgacagctccccactctagctcgtgggatacttattaccaaccccgcgcattggagaagcacgcggattcaattttagccctcgcctccgtgttctggagcatatcctattactcctcaccatttgccttcttctacctttaccgaaagggctacctatccctgtcaaaagtggtgcctttcagtcactatgctggtacgcttctactgctactcgctggagtagcctgtctacgtggaatcgggaggtggacgaatccccaatatcggcagttcatcacaatattagaagctacacacagaaatcagagttcagaaaacaaaaggcaactcgcaaactacaatttcgactttcgcagttggcccgtggattttcactgggaagagccttcaagcagaaaggaaagccgtggcggcccttcgcgccgcggtgttgccctcctgaggccggagccgctgcaccgcggaacagccgatactctgctgaacagggtgaagaagttaccctgtcaaataacttcctacctggtcgcccatacattaggacggcggatgctataccccggaagcgtgtatctattgcagaaggcactgatgccagtcctcctgcagggacaggcacggctggtcgaagagtgcaatggcaggcgcgcaaagctactagcttgcgatggaaacgaaatagacaccatgtttgtggaccggcggggcaccgccgagccccaggggcaaaagctggttatctgttgcgagggcaacgctggcttctatgaagttggctgtgtgtccactcctctggaagccgggtacagtgtcttgggttggaaccatcccggattcgctgggagcactggggtcccttttccgcagaatgaagccaatgcgatggacgttgtggttcagttcgcgattcaccggttggggtttcagccacaggacattataatctatgcttggtccatcggggggttcacggcgacctgggcagcaatgtcttatcccgatgttagtgctatgattcttgacgcctccttcgatgatcttgtacccctagccctcaaggtgatgcccgattcctggcgagggctggttactcggacggtgcggcagcatctaaatctgaacaatgccgagcaactgtgccgctaccagggcccggtactgctcatcaggaggacaaaagacgaaatcattactaccacagttccagaagatataatgtcgaataggggtaacgacttgttgctaaaactgttgcagcaccggtatccaagggtgatggccgaggaaggattacgcgttgtacggcagtggctagaggctagcagccaattggaagaggcctcgatttatagtcggtgggaagttgaggaagattggtgtctgtctgttctgcgatcctatcaggccgagcatggtcccgattttccgtggtcagtgggggaagatatgtcggctgacggacgacggcagctcgccttattcctggcccgcaaacaccttcataacttcgaggcaacccactgtactccactcccagcacagaatttccagatgccatggcacttatag

SEQ ID NO: 177538 - DNA, 1677 bp, synthetic construct
  misc_feature 1..1677: note = Description of Artificial Sequence: Synthetic coding sequence
  source 1..1677: mol_type = other DNA
atggccaagctgctgagctgcgtgctgggcccccggctgtacaagatctatcgggaacgcgactccgaaagggcacctgcgagcgttcccgagactcccaccgcggttacggctccacattcctccagctgggatacctattaccaaccacgggccttggagaaacatgccgatagcattctggctttggcatctgtattctggtccatcagttactacagctctcccttcgctttcttttatctatatcgaaaaggctacctgtccctgagcaaggttgtccccttcagtcactacgccggaacactgctgcttctcttggccggggtggcttgcttacgaggcattggcagatggaccaacccccagtataggcagtttatcactattcttgaggccacacacaggaatcagtccagtgagaataagcggcagctggcgaactataattttgacttccgctcgtggcccgtcgatttccattgggaagagccatccagccgtaaagagtcccgcggtgggcccagtcgaagaggtgtagctctcctgcggcctgagcctttgcacagaggcacagctgacaccctgcttaatagagtaaagaagcttccttgtcagatcacttcataccttgtggcccatacactcggacgccgcatgctgtatcccggcagcgtgtacctccttcaaaaggctctcatgccagtcctcctgcagggacaggcgaggctggtcgaggaatgcaacggtcgccgcgccaaactgttagcttgtgatggcaatgagattgatacaatgttcgtggataggcgaggcacagcggaaccccaagggcagaagctggttatctgttgtgagggaaacgcgggcttctatgaggttggttgtgtgtccacgcctcttgaggcaggctactctgtcctgggctggaatcaccctggcttcgccggctccactggcgtgccatttccacagaatgaggcgaacgcgatggatgttgtcgtacagttcgccattcatcgattgggatttcagccccaggacataattatttacgcctggagtatcggaggatttacagcgacttgggccgccatgtcgtacccggacgtgagcgcaatgatcctggatgcaagcttcgatgacctcgtgccactggccttgaaggtcatgcctgatagctggagggggctggttacccgaaccgtcagacagcacctgaatctcaacaatgcagagcaattgtgtcgctaccagggccccgtccttctcatcagaagaaccaaagatgaaattatcactacgaccgtacctgaggatatcatgagcaatcgggggaacgatctgttgctgaaacttctgcaacatcgctaccctcgtgtcatggcagaggaggggctaagggtggtgagacagtggctggaggccagctctcagttggaagaggcttctatctattcacgttgggaagtagaggaagactggtgtctgagtgtgcttcgcagctaccaggcagagcatggacctgattttccatggagcgttggagaggatatgtcagctgatggcagaagacaactcgcactgtttctcgctcgaaagcatctgcacaacttcgaggccacccattgcacccccctgcccgcccaaaatttccagatgccctggcatctgtag

SEQ ID NO: 177539 - DNA, 438 bp, synthetic construct
  misc_feature 1..438: note = Description of Artificial Sequence: Synthetic coding sequence
  source 1..438: mol_type = other DNA
atgctgggccactgctgctacttctggcaggtgtggcccgccagcgaagctctggctgccgggcccacaccttccaccggtagctccagcccatcttggaagcagcacatcggaacaagcctccaaaaaacaaggggctccctgccgaccactacactcacaagtggagcgggacaatccacaagcaccggcaaaaatcccgctgcaggtcggtctctggagggcgccctcccagccggtgtttggccgtgctttgcacaaagcccatgcacaggaggccaacagacccccagctccaccggacttcgatcctgcttggtacgcagccctgggggaaagcagcagcgcggtgaggctcactggggcgggggagccatcagcggagtgctctgggagtgggccctgcattgcaaaattgccgtgacccactgggcctag

SEQ ID NO: 177540 - DNA, 438 bp, synthetic construct
  misc_feature 1..438: note = Description of Artificial Sequence: Synthetic coding sequence
  source 1..438: mol_type = other DNA
atgctgggccactgctgctacttctggcaggtgtggcccgccagcgaggccctggccgccggccctacccctagcacagggagcagttcaccaagctggaagcagcatattggcaccagcctgcaaaagacacgcgggtccttgcccaccaccaccttaaccagtggggctggccagagtacatctacagggaaaaaccctgccgctggtaggtcactggaaggcgcattaccagcaggcgtgtggccttgcttcgcacaaagtccatgtacgggagggcaacagactccctcatccacagggttacgttcgtgcttggtacgcagcccaggcggaaaacagcagaggggggaggcacattggggaggcggggccatttctggagtgctctgggagtgggctctgcattgtaaaattgcagtgacgcattgggcctag

SEQ ID NO: 177541 - DNA, 438 bp, synthetic construct
  misc_feature 1..438: note = Description of Artificial Sequence: Synthetic coding sequence
  source 1..438: mol_type = other DNA
atgctgggccactgctgctacttctggcaggtgtggcccgccagcgaagccctagccgcgggccctacccctagcaccggttcatcatctcccagttggaaacagcatatcggaactagcctccaaaaaacccggggtagcctcccaacaacaactctcaccagtggtgcaggtcagtcaacctctacaggcaagaatccggcagctggacgatccctagagggcgctttgccagctggggtctggccatgtttcgcacagtcaccatgtaccggaggccagcagaccccatcctcaaccggactgcgcagctgcctcgttcgctcccccggcggtaaacagcagcgtggagaggctcattggggggggggtgcaatctccggcgtgctatgggagtgggctcttcactgtaaaattgctgtgacacattgggcttag

SEQ ID NO: 177542 - DNA, 1578 bp, synthetic construct
  misc_feature 1..1578: note = Description of Artificial Sequence: Synthetic coding sequence
  source 1..1578: mol_type = other DNA
atgcccccccccgccctgttcctgagcagcctgtacccccggctggagtttcagaacgacttctacaggtcctgcataagacgcagtagcccccagccccctcctaacctggcatggaggcccgagagcttgtatagcggcgaattggctggtggcggctacctttcactttctaaggtggtccccttctctcactacgctggtacacttctgctcctgctggccggggtcgcttgtctccgcggtattggtcgatggaccaaccctcagtaccgtcagttcatcacaatcctggaggctacacacaggaatcaatccagtgagaacaagaggcagttagccaattataacttcgactttcgttcctggcctgttgacttccattgggaagagccaagtagccgcaaggagtcccgagggggtcccagcaggaggggtgtggctttgctgcggcccgagccccttcataggggcaccgcagatactctgctgaacagagtcaaaaagctaccatgccagattacctcctatctcgtggcccacactctcgggcggcgcatgctttacccgggatccgtctatctattacagaaagccctgatgcccgtgctcctccaaggccaggcccggcttgtggaggagtgcaacggacgaagggccaagcttctcgcctgcgacgggaatgagatcgacaccatgttcgtggaccggagagggaccgcagagccacagggacagaagttagtgatttgctgtgaaggcaatgctggtttttatgaagttgggtgcgtgtcaactcctctggaggccggatacagtgttcttggatggaatcacccgggtttcgccggttccaccggcgtaccctttccccaaaatgaggctaacgctatggacgtggttgtacagtttgctatccacagactcgggtttcagcctcaggatataatcatatatgcttggtctatcgggggcttcacagccacctgggccgctatgagctaccccgacgtgagtgcgatgatcctggacgccagttttgatgacctggttcccctcgctctcaaagtgatgccagactcttggcggggactagtcactagaacagtgcggcagcacctgaacctaaacaacgccgagcaactgtgtagatatcaggggccagtgttgttgattagaagaacaaaggatgagattattacaacaacggtgcccgaggatataatgtcaaacaggggaaatgatcttctgctgaaactgttgcaacacagataccctagagtgatggctgaggaggggctcagggttgttaggcagtggctcgaggcaagtagccaactcgaggaagcgagcatctactcacgctgggaagtggaagaggactggtgcctgtcagtgctacgatcttaccaggctgagcatggccccgacttcccctggtcggtgggggaagacatgtcagccgatgggagaagacagctggccctctttcttgctaggaaacatctccacaattttgaagccacccactgtacccctctgccggcccagaactttcagatgccatggcatctgtag

SEQ ID NO: 177543 - DNA, 1677 bp, synthetic construct
  misc_feature 1..1677: note = Description of Artificial Sequence: Synthetic coding sequence
  source 1..1677: mol_type = other DNA
atggccaagctgctgagctgcgtgctgggcccccggctgtacaagatatacagagagcgggactccgaacgtgccccagcgtcagtacccgagacacccactgcagtgacagctccgcactcgtctagttgggacacctactaccaaccgagggcgttagagaaacatgcagatagcatcctcgcgttggccagtgtgttttggtcgatttcttattacagcagtccgttcgccttcttctacttatacagaaaaggatacctgtccctttcaaaagtagtgccgttctcgcactatgccggaactctgctgctgttgctggctggtgttgcgtgtcttcgggggattggccggtggaccaacccacagtaccggcagttcatcaccattctggaagcgactcaccgcaatcagagttcagagaacaagcgtcagctcgccaactacaattttgacttcagatcatggcccgtggacttccattgggaggagcccagttcgagaaaggaatcgcggggcggaccatcccgaaggggcgttgccctgctcagacctgagccacttcacaggggcactgctgatacactactcaatagggttaaaaagctgccttgccaaatcacttcttacctggtggctcacaccctcggacggaggatgctttatcccggttcagtctacttgttgcaaaaggctctgatgcccgtactcctgcaaggccaggctagactcgtcgaggaatgcaatggacggagggccaagctgctcgcctgcgatggcaatgagattgacaccatgttcgttgatcggagaggtacagcagaaccccagggtcagaagctggtcatctgttgcgaggggaacgctgggttttatgaggtagggtgtgttagcactccccttgaagccggctatagcgtgctgggatggaatcatcccggtttcgcaggatcaacgggcgtgcccttcccccagaacgaggccaatgctatggatgtggttgtgcagttcgccattcaccgactggggttccaaccacaagatattattatctacgcttggagcatcgggggttttacagctacctgggccgccatgtcttacccagacgtgtcggcaatgatcttggatgctagcttcgacgatctggtgcctcttgcgctgaaagtgatgccagactcatggagagggctggtgactcggacggtccgtcaacacttaaatctgaacaatgcagagcagctgtgtcgttatcaagggcctgttctcctcatacgtcgaaccaaagatgagatcattactactactgtgccagaagatatcatgtcgaaccggggaaacgatctgctactgaaactcctgcagcatagataccctcgcgttatggccgaggagggcttacgtgtagtcagacagtggctagaggcgtccagccagctcgaagaggctagtatctacagtcgatgggaggtcgaggaagactggtgtctgtcagtactgcgatcttaccaggcagagcatggtccggatttcccctggagcgtaggagaggacatgagcgcagacgggaggcgtcagctggcgttgtttctcgctagaaagcatctccacaattttgaagctacgcactgcacgccacttcccgctcaaaattttcaaatgccttggcatttatag

SEQ ID NO: 177544 - DNA, 1578 bp, synthetic construct
  misc_feature 1..1578: note = Description of Artificial Sequence: Synthetic coding sequence
  source 1..1578: mol_type = other DNA
atgcccccccccgccctgttcctgagcagcctgtacccccggctggagttccagaacgatttttataggagctgcatccggcgaagctcacctcagccaccacctaacctcgcttggaggcccgaaagtttgtactccggagaactggcaggggggggatatctttccctctcaaaggtggtaccgttctcccattacgccggtactctgctcctgctgctggcaggggtcgcttgcctgcgggggattggccgttggaccaaccctcaataccgccagtttataaccatcctggaagccacacatcggaatcagagttcggagaacaaaagacagcttgcaaactacaatttcgattttcgatcgtggcctgtggacttccattgggaggagccttcctctcggaaggaaagtcgcgggggcccaagccgccggggggtcgctctgctgcgccccgagcccctacatcgaggaacggccgacactctgctgaaccgagtgaagaagcttccatgtcaaattacctcttacctggtggctcacactctcgggagaagaatgctctatccagggagcgtgtatttactccagaaagccctgatgcctgtgctgctgcagggacaggctcgtcttgtggaagaatgcaacggcagacgggcaaaattgttggcgtgcgacggtaacgagatcgataccatgttcgtagatcgccgtggaacggccgaacctcaggggcagaagttggtgatttgctgcgaaggcaacgcgggtttctacgaagtcgggtgcgtctccacccctctcgaggccggatatagtgtccttggttggaaccatccaggctttgcagggtccacgggagtccccttccctcagaacgaggctaatgcaatggacgtggtggttcaatttgccatccatagactgggcttccagccccaggacatcatcatatacgcttggagcatcggtggtttcacagccacgtgggctgccatgtcctaccccgacgtgtcagctatgatcctggacgcgtctttcgacgaccttgtacccctcgccttaaaagtcatgcctgattcctggagggggctggtaacccggactgtcagacagcacctgaatcttaacaacgccgaacagctctgccgatatcaggggcccgtgctgctcattagaaggacaaaagatgaaatcattactacaactgttccagaggatatcatgtcgaatcggggaaacgatctccttctaaaactgcttcagcaccgctatcctcgagtgatggccgaggaggggcttcgggtcgtgaggcaatggcttgaagctagcagtcagctggaggaagcgagcatctatagccgttgggaagttgaagaggattggtgcctgtccgtcttgcggtcttaccaggcagaacacgggcccgatttcccctggtctgtcggcgaggatatgtcagcggacgggcgccgacagttggctctttttcttgccaggaagcatctccacaactttgaggcaacacattgcactcctctgcccgcccagaattttcagatgccgtggcacctctag

SEQ ID NO: 177545 - DNA, 1578 bp, synthetic construct
  misc_feature 1..1578: note = Description of Artificial Sequence: Synthetic coding sequence
  source 1..1578: mol_type = other DNA
atgcccccccccgccctgttcctgagcagcctgtacccccggctggaatttcagaacgatttctatcgcagttgtatcagacgctcgagcccccagcctccgcccaatctggcatggcggccggagagcctgtactcgggagagctagcaggtggtgggtacctatcattgagcaaggttgtgcctttttctcactacgccggcaccctgctgttgcttctcgctggcgtcgcttgcctccgaggaattggacggtggacaaatccacaatataggcaattcatcacaattctggaggcaacgcatagaaaccagagcagtgaaaacaagaggcagttggccaactataattttgatttcaggagctggccggtggacttccactgggaagagccctcaagcaggaaggaatctcgggggggcccgagccggaggggggtggctctacttcgtccagagccactgcacaggggaaccgctgatacactcttgaatcgcgtgaagaagctgccctgccagatcacatcttacctcgtcgcacatactttggggcggcgcatgttataccccgggagtgtatatttgctgcagaaggcactgatgcccgtcctgctacagggccaagctaggttagtggaagagtgtaatggtcgtcgcgccaagctcctcgcctgtgacgggaatgagatcgacactatgtttgtggacaggcgaggtaccgccgaaccgcaaggacaaaagctcgtgatctgttgcgagggtaatgctggtttttatgaggttggatgcgtcagcacccccttggaggctggatatagcgtgttaggctggaaccaccctggttttgctggttctacgggcgttccctttccacagaatgaggccaacgctatggacgtggttgtacagtttgctattcaccgtctgggtttccagccccaggacattattatctacgcgtggagcattggcggcttcacagcaacctgggccgctatgagctatcctgatgtgtcagcaatgattttggacgccagctttgacgacctcgtccctctcgctctgaaggtgatgcctgactcctggagaggcctggtcacccgcactgtccggcagcatctcaatctgaataatgcggagcagttatgccggtaccagggacctgtactgctgatccgtaggactaaagatgaaatcatcacaacaaccgtccctgaggacatcatgagtaacagggggaatgacttactgttgaaactcctgcagcatcgctacccccgggtgatggctgaggagggcttgagggtggtcagacagtggcttgaggcttcctctcagttagaagaagcatccatttactcccgttgggaggtagaggaggattggtgtttgagtgtgctccgctcctatcaagcagaacacgggccagacttcccatggtccgtaggggaagacatgagtgctgatgggcgcagacagcttgctctcttcctggcgaggaagcacctgcacaacttcgaggccacacattgcacgcctctaccggctcaaaacttccagatgccctggcacttgtag

SEQ ID NO: 177546 - DNA, 438 bp, synthetic construct
  misc_feature 1..438: note = Description of Artificial Sequence: Synthetic coding sequence
  source 1..438: mol_type = other DNA
atgctgggccactgctgctacttctggcaggtgtggcccgccagcgaggcactggctgccgggccaacaccctcaaccggaagctccagcccgtcctggaaacagcatataggcaccagcctgcagaagacaagggggagccttcccacaaccacgctgacgagcggcgccgggcagagcaccagcacagggaagaatcccgcggccggcaggtctctcgagggagctctccctgccggggtatggccatgcttcgcccagagcccttgcaccggcgggcagcaaaccccctcttcgactgggctgcgctcttgcctggttcgctccccaggcggcaagcaacagaggggcgaagcacactggggcggaggcgcgatttccggagtgctctgggagtgggcactgcattgcaagatcgccgtgacacattgggcctag

SEQ ID NO: 177547 - DNA, 1578 bp, synthetic construct
  misc_feature 1..1578: note = Description of Artificial Sequence: Synthetic coding sequence
  source 1..1578: mol_type = other DNA
atgcccccccccgccctgttcctgagcagcctgtacccccggctggagtttcagaatgatttttatcggtcgtgcatccggaggtctagcccccagcctcctccaaaccttgcctggaggccggagagcctatattccggagagctcgcaggtggagggtacctgtctcttagtaaggtcgttcccttctctcattatgcaggcaccctgctcctcctgctggccggtgtcgcatgcctgaggggcatcgggcggtggacgaatccacagtaccggcagttcatcaccatcctggaggccactcacaggaaccaatcctctgaaaataagcggcaactcgccaattacaattttgatttcagaagttggcctgttgatttccattgggaagagccctcttcacgcaaagagagtagggggggcccctcccgacgtggggttgccctgctcagaccggagcccctgcataggggcacagcagataccttactcaatcgggtgaagaagttgccgtgccaaatcacaagttacctggtcgcccataccctggggaggcggatgttgtacccaggctcagtctatctgctgcaaaaagctctgatgcctgtgttgctacaaggtcaggccagacttgttgaagaatgcaatggacgaagagctaagctgctggcatgtgatggcaacgagattgacacaatgttcgtggacagacgagggacagccgaaccacaggggcagaaacttgttatttgttgtgaaggcaacgcaggattctatgaagtcggctgtgtcagtactcccctggaagcgggctattcagtgctcggctggaatcacccgggcttcgcggggagcacaggtgtgccgttcccccaaaacgaggccaacgctatggatgtggtggtgcagttcgctatacacaggcttggcttccagccacaggacatcataatctacgcatggagtatcggggggttcacagcaacatgggcggcgatgagttatccagatgtgagcgctatgattctcgacgcgtcttttgatgatctggttccattggccctgaaggtgatgcccgactcttggcgaggacttgtgaccaggaccgtccgccagcatctaaatctcaataatgctgagcaactgtgtcgctaccaagggcccgtcctcctcatacggaggaccaaggatgagatcataactacaacggttccagaagacataatgagtaaccgaggtaacgatctgttgctaaagctgcttcagcatagatacccgcgcgtcatggccgaggagggcctgagggtcgtcaggcagtggttggaagccagctcacagttggaggaagcctctatatattcccggtgggaggtggaagaagattggtgcttatccgtgctgagatcttatcaggcggaacacggccctgactttccttggtctgtcggtgaagatatgtccgccgacggccggcgccagcttgcactgttcctggcccgcaaacacctgcacaactttgaagctacacattgcacccccctgccggcccagaattttcagatgccatggcatctttag

SEQ ID NO: 177548 - DNA, 1677 bp, synthetic construct
  misc_feature 1..1677: note = Description of Artificial Sequence: Synthetic coding sequence
  source 1..1677: mol_type = other DNA
atggccaagctgctgagctgcgtgctgggcccccggctgtacaagatctacagggaacgcgattctgagagagctccggcgtccgtccctgagactccgacggctgtgacagccccacatagttcttcatgggatacctactaccagcctagagcactcgaaaaacacgcggattccattcttgccctcgccagtgtgttttggtcaatcagctattactcgagtccattcgcgttcttctatctctaccgaaaaggatatttgtcactgtctaaagtcgtgccattcagtcactacgcagggactctcctactgcttctggcgggcgtcgcctgcctcagaggcattggaagatggaccaatccccaatatcgtcagttcataactatacttgaggcaactcatcggaatcagtctagcgagaataaacgtcagcttgctaactacaattttgacttccgatcctggcccgttgattttcattgggaagagccgtccagccggaaggagagccggggaggaccttcacgccggggggttgcccttcttaggcctgaacctctccaccgtgggactgccgacacactcttgaacagagtgaaaaaactgccttgccaaatcaccagctacctggtagcccataccctgggacggaggatgttatatccagggtcagtctatcttctacagaaagccctgatgcccgttctcctgcaaggacaagcccggctggtggaggagtgcaacggccggagggccaagctcctcgcatgtgacgggaacgaaatcgatactatgttcgtagatagacgtgggactgcggagcctcaagggcagaagcttgtgatatgttgcgaaggaaacgctggtttttacgaggttggatgtgtctcgacaccattggaggcgggatattccgtcctggggtggaaccatccgggtttcgcagggtccactggggtgccattccctcaaaacgaggcaaacgccatggatgttgtggtccaattcgctattcacagattgggttttcaaccacaggatattattatctacgcatggtctattggtggctttaccgccacatgggctgccatgagctatcctgacgtatcagccatgatcttggacgcttcctttgacgatctggtccccctcgcacttaaagtaatgccagattcttggcgcggtctggtaacacgaaccgtgcgccaacacctgaacctgaataatgccgagcagctctgtcggtaccagggtcctgtcctgctgattagacgcaccaaagacgaaataattactacaactgttccagaagatatcatgagtaataggggcaatgacttactcctaaagttgctacagcatcgctatccacgggtcatggccgaggaggggctgcgtgtggtgaggcagtggctggaagcatcttcacagctagaagaagcaagcatctactccagatgggaagtggaagaggactggtgtctgagtgtgctgagatcctatcaggcagagcatggccctgattttccatggagcgtaggagaggacatgtcagcagatgggaggcgccagttagccttattcctggctaggaagcacttgcacaacttcgaggcaactcattgcacccctctgcccgctcagaatttccaaatgccttggcatctgtag

SEQ ID NO: 177549 - DNA, 1578 bp, synthetic construct
  misc_feature 1..1578: note = Description of Artificial Sequence: Synthetic coding sequence
  source 1..1578: mol_type = other DNA
atgcccccccccgccctgttcctgagcagcctgtacccccggctggagtttcagaatgacttctaccgaagctgcatccgaagaagcagtcctcagcccccccccaatctcgcgtggcgacccgagtccctttactccggcgaactagcaggcggggggtacttgtccctgagcaaggttgtgccgtttagtcattacgcaggcaccctgctgctcctgttagccggagttgcatgcctgaggggaatcgggcgttggaccaatcctcagtatcgtcagtttattactattttggaggccactcatcgaaatcagtcatctgagaacaagcgccagttagcaaattacaatttcgattttcgatcttggcctgtagacttccattgggaggagccctccagccgcaaagagtctcgtgggggacccagccgtcggggggttgcactgttgagacccgagccacttcatagagggactgcggacacactgctgaaccgggtcaagaagctgccctgtcagattaccagctatctggttgctcatacgctgggcaggcgtatgctctatccaggttcggtgtatctgctgcagaaggcacttatgcctgtgctcctgcaggggcaggcccgcctggttgaagaatgcaatggcaggcgagccaagttgttagcctgcgacggaaatgagattgacaccatgttcgttgaccggcggggcactgcggagccgcaaggtcagaaacttgtcatctgctgcgagggaaatgctgggttctatgaggtcggctgtgtctccacccccttggaggctggatacagcgtactaggctggaaccatcctggattcgcaggttctacaggggtgcccttcccacagaacgaggccaacgcgatggacgtagtggtgcagttcgctatacacagacttggctttcaaccccaggacatcatcatctatgcttggtctattggcggattcaccgcaacatgggcagcaatgtcctatccggatgtaagtgcgatgattctggatgcaagtttcgatgacctggttccccttgccctcaaagtaatgccggattcttggcgcgggctagtcactcgaaccgtccggcagcatctgaatctaaacaatgcagagcagctgtgccggtaccagggcccagtcttattgatcagacgcacgaaggatgaaattataacaacaacagttcccgaagacattatgtcgaatagaggtaacgatctcctgctgaagcttctgcaacatcgctaccccagggtgatggctgaggaagggttacgggtggtccggcagtggctcgaggccagttcacagcttgaggaagcaagtatctatagccgatgggaggttgaggaagactggtgtctcagcgttctaaggtcgtaccaggccgaacacgggcctgacttcccctggagcgtgggcgaagacatgtcggccgacggccggagacagctggccttgttcctggccaggaagcacctccataactttgaagcaacacactgtactcctctgcctgcccagaattttcagatgccctggcatctgtag

SEQ ID NO: 177550 - DNA, 438 bp, synthetic construct
  misc_feature 1..438: note = Description of Artificial Sequence: Synthetic coding sequence
  source 1..438: mol_type = other DNA
atgctgggccactgctgctacttctggcaggtgtggcccgccagcgaagccctggccgctggcccgacgccaagcacgggtagctcaagcccttcgtggaaacagcacatcggcacgagcctgcaaaagactagaggctcattgccgacaactaccctgacttcaggggccggccaatccactagcaccgggaaaaaccctgcggccggtagatccttggagggagctttaccagcaggagtgtggccctgttttgctcagtccccatgtacaggcggacagcaaacgcctagtagtactggcctgcgttcctgcctcgtgagaagtcccggagggaagcagcagcgcggcgaggcacactggggcgggggagccatcagtggagtactgtgggagtgggccctgcactgtaaaatcgccgtgacccattgggcatag

SEQ ID NO: 177551 - DNA, 1578 bp, synthetic construct
  misc_feature 1..1578: note = Description of Artificial Sequence: Synthetic coding sequence
  source 1..1578: mol_type = other DNA
atgcccccccccgccctgttcctgagcagcctgtacccccggctggaatttcagaatgatttttacaggtcatgtattcgccggtcttcccctcaaccacccccaaatttggcttggaggcccgagtcattatacagtggcgagctagccggaggtggctatttaagcctgagtaaagtggtgcccttttcccactacgccggaaccttgctcttactcctggcgggagtggcttgcctgcgcggcatcgggcggtggacaaatccgcagtacaggcagttcattactatactcgaggcaacacatcgcaaccagtctagcgagaacaagagacagctcgctaactataattttgattttcggagttggccagtcgatttccattgggaagaaccctcttcaagaaaggaaagtcgggggggcccgtctcgccggggggtcgccctacttagaccggagccattacatcgcgggacagccgacacccttctgaatagagtcaagaaattgccctgccaaataacgtcgtaccttgtagctcacaccctgggcagacgcatgctgtaccccggatcggtgtatttgctgcaaaaggcgctgatgccagttttgctgcagggccaagcacgcctggtcgaggagtgtaacgggagaagggctaagttattggcctgtgatggcaacgagattgataccatgttcgtcgatcggcggggaacagctgaaccacagggacagaagcttgttatttgttgcgaaggaaacgccgggttttacgaggtaggttgcgtttccacccccctcgaggcaggatactctgtgcttggttggaatcatcccgggttcgccggctctactggtgttccattcccccaaaacgaagccaacgccatggatgttgttgtgcaattcgccattcatagactgggcttccagcctcaagacattatcatatatgcctggtccataggggggtttactgccacttgggccgcaatgagctaccccgacgtttctgctatgatactagacgcctctttcgacgatctggtccctcttgctctcaaagtgatgcccgactcatggcgcggcctggttacgcgtacggtgcgccagcatctcaacctgaataacgctgagcaactttgtcgataccaggggccggtcttgctgatcagaagaactaaggacgagattatcacaacaaccgtcccagaagatatcatgtctaatagagggaatgatctgctgctgaagctattgcagcaccgctaccctcgcgtgatggccgaggaggggctacgggtggttcggcagtggctggaggcatcctcacagctggaagaagcttcgatctacagccggtgggaagtggaagaggattggtgcttaagcgttttgcgcagctaccaggccgaacatggcccagacttcccctggtccgtgggggaggacatgtctgccgacggaaggcgccagttggcccttttcctggctcggaaacatctgcacaacttcgaggcaacacactgtacgccattacctgctcagaactttcagatgccctggcacctttag

SEQ ID NO: 177552 - DNA, 438 bp, synthetic construct
  misc_feature 1..438: note = Description of Artificial Sequence: Synthetic coding sequence
  source 1..438: mol_type = other DNA
atgctgggccactgctgctacttctggcaggtgtggcccgccagcgaagcattggcggccgggcctacaccgtccaccggcagttcctccccttcctggaaacagcacatcggaacgagtctacagaagacccgcggatcactccctaccacaacactgaccagcggcgctgggcagtcgacatccaccggtaagaacccagccgctgggcgatcgctggaaggggcccttcctgctggagtgtggccatgttttgcacaaagcccgtgtacaggcgggcagcagacacctagcagtaccggactccgttcatgcctggtaagatccccggggggcaagcagcagcggggcgaagcccattggggtggcggagccatcagcggggtgctgtgggaatgggccctgcactgtaaaattgccgtgacccactgggcatag

SEQ ID NO: 177553 - DNA, 1578 bp, synthetic construct
  misc_feature 1..1578: note = Description of Artificial Sequence: Synthetic coding sequence
  source 1..1578: mol_type = other DNA
atgcccccccccgccctgttcctgagcagcctgtacccccggctggagttccaaaatgacttctatcggtcttgtatccgccgctccagccctcaaccaccgcccaaccttgcctggaggcctgaaagtctgtacagtggcgagctagctggaggcggatatctgagcctttctaaggtggtcccatttagccattatgccggaaccctgttgctgctgttagcaggggtggcatgtctccgagggattggacggtggacgaatccccaataccgtcagtttattaccatcttggaggcaactcacagaaatcagtccagcgaaaacaagcgtcagcttgccaactataactttgacttccgcagttggcccgtggacttccactgggaggaaccctcttccagaaaggaaagccgcggtggcccaagccggcggggcgtggctctgctaagaccagagccacttcaccgcgggaccgctgacacattgcttaaccgtgttaaaaagctgccatgccagattacctcgtatctagtggcccatactctcggccggagaatgctgtatcccgggtcagtctatctactccagaaggcccttatgcccgtgctcctgcagggccaggcgcgattagtggaagaatgtaatggaagaagagcaaaactcctcgcctgtgatggtaacgagatcgatacaatgttcgtggatagaagagggacggccgaaccccaggggcagaagctggtaatttgctgcgagggtaatgccggcttctatgaagtgggctgcgtgtctacaccacttgaggctggttattcagtactcggatggaaccacccgggatttgctgggtccactggcgtcccgttcccccaaaatgaagcaaatgccatggacgtcgtggttcaatttgccattcatcgactaggcttccagccccaagatatcataatctacgcatggagtattgggggcttcactgccacatgggctgccatgtcttacccagacgtttcagccatgatcctagatgcctcattcgatgatctggtccccctggcacttaaagttatgccggactcatggagggggcttgtgaccagaactgtccgtcagcaccttaatctgaacaacgcagaacagctttgtcgctatcagggcccagtcctgctaataagaagaacgaaggatgagatcattacgacgaccgttcccgaagacatcatgagtaaccgcggcaacgacctgctcctgaagctgttacaacatcggtatccaagggtgatggcggaagagggcttgcgcgtggttagacagtggcttgaagcaagctctcagctcgaggaggcttctatctattcgcggtgggaggtcgaagaagactggtgtctctcagtcctcaggtcctatcaagccgaacacggccccgactttccctggagtgtcggagaggacatgagcgcagacggaagacgccagctggctcttttcctcgcgagaaaacacctacataactttgaggcgacccactgcacgcccctgcctgcacaaaattttcagatgccatggcacctctag

SEQ ID NO: 177554 - DNA, 1278 bp, synthetic construct
  misc_feature 1..1278: note = Description of Artificial Sequence: Synthetic coding sequence
  source 1..1278: mol_type = other DNA
atgaacgccatgctggagacccccgagctgcccgccgtgttcgacggcgtgaagcttgcagcggttgcagcggttctatatgtgattgtgagatgtctgaaccttaagagtccaacagctccaccggatttatattttcaggactctggcctgtctcgcttcctcttgaagagctgtccactactcactaaagagtatattcccccacttatctggggaaaatcaggccacatccagaccgccctgtacgggaagatgggacgcgtgcggagcccccatccctacggacaccgtaaatttatcactatgtctgacggcgcgacgagcaccttcgacctgttcgagcccctcgccgaacactgcgtgggggacgatattaccatggtcatttgcccgggaattgctaatcattcagaaaaacaatacatcaggacctttgtcgactacgcgcaaaaaaacggatatcgctgcgccgtgctcaaccacttgggggcactccccaatatcgaactgacctccccccgcatgttcacatacggatgcacctgggagtttggcgctatggtgaactacatcaaaaaaacctaccctctgacccagttagtcgtggtcgggttctcacttggaggcaacatcgtttgtaagtatctaggggagacgcaggcaaaccaagagaaggttctctgctgtgtatctgtgtgccagggctactccgctctgagggcccaagaaaccttcatgcagtgggaccagtgtagacgattctacaacttcctcatggccgacaatatgaaaaaaattattctgagccaccgacaggccctatttggggaccatgttaagaaaccccagagcctggaagatactgaccttagtcgattgtacaccgccacatccctgatgcagatcgacgataacgtgatgaggaagttccacggttataactcccttaaagaatattatgaggaagagtcatgcatgcggtacctacaccggatctacgtgccactcatgctggtgaacgccgccgacgacccgctggtgcatgaaagtctgctcactattccgaaaagtctctctgagaagcgggagaacgtcatgttcgttctcccgcttcatggcggacacctgggattctttgaagggtccgttctgtttcctgaacccttaacatggatggataaattggttgtggaatacgccaatgccatttgccagtgggaacggaacaagctccagtgctccgatacagaacaagttgaagcggatttagagtag

SEQ ID NO: 177555 - DNA, 1278 bp, synthetic construct
  misc_feature 1..1278: note = Description of Artificial Sequence: Synthetic coding sequence
  source 1..1278: mol_type = other DNA
atgaacgccatgctggagacccccgagctgcccgccgtgttcgacggagtgaagctagccgccgtcgcagcagtgctctacgtgatagtccgatgtctcaatttaaagtctccaactgctcctccagacttgtacttccaagactccgggctgagcaggtttctactgaagtcatgcccgttgctgacaaaggagtatatacctcccttgatctgggggaagagtggccacatacagaccgccctgtatggcaaaatggggagagtaaggtctcctcatccgtatggacatcgcaaattcattactatgtcagacggtgcaacaagtacttttgacctgttcgaaccccttgctgagcactgcgtgggcgatgatatcacaatggtgatttgtcccggaatcgctaatcatagcgagaaacagtatatccgaacattcgttgactacgcgcagaagaacgggtatcgttgtgccgtcttgaaccatctcggcgccctcccaaatatcgagttgacgtctcctcggatgttcacctatggctgcacctgggagtttggtgccatggtcaattatatcaaaaaaacctacccccttacccagctagtggtggtgggctttagtttaggcgggaatatagtctgtaagtatctcggcgaaacgcaagccaaccaggagaaagtattgtgttgcgtcagcgtgtgccaagggtattcggctctcagggcgcaagagacgttcatgcagtgggatcagtgtcgtcgtttttataatttcctaatggccgataatatgaaaaaaattattctgtcccaccggcaggcactctttggagaccacgtcaagaaaccccaatccctggaggacacagatctgagcaggctttatacagccacctcccttatgcaaattgacgataatgtgatgagaaagttccatggttataactcccttaaggaatattatgaagaagaaagttgtatgaggtacctgcaccgaatatacgtgcccctgatgctcgtgaacgcagcagatgatcctctcgttcacgaaagccttttaaccatcccaaaatccctttctgagaaacgagagaacgtgatgttcgtcctgcccctacacggcggccacctaggcttctttgaggggagtgttctgtttccagaacctctgacatggatggacaaactcgtcgtcgaatacgctaatgcaatttgtcagtgggagagaaacaagttgcaatgctccgacaccgagcaggttgaagccgacctggagtag

SEQ ID NO: 177556 - DNA, 1230 bp, synthetic construct
  misc_feature 1..1230: note = Description of Artificial Sequence: Synthetic coding sequence
  source 1..1230: mol_type = other DNA
atgcagcggctggccatggacctgcggatgctgagccgggagctgtcgttgtatctggaacaccaggtgagagttggcttctttggctctggcgtggggttgagtttaattctgggattcagtgttgcatacgccttctactacctgtctagcatcgctaagaaaccccaacttgtcacgggtggtgaaagctttagcagatttctgcaagaccattgtccagtggttaccgaaacatattaccctacagtgtggtgttgggagggaagagggcagacgctgctacggcccttcataacttccaagccccctgtacagtacagaaacgagctgattaaaacagccgacggcgggcagattagtctcgactggtttgacaatgacaatagcacctgttacatggacgcttctacaaggccgacaatcctactccttccagggctaaccggaacttcgaaggagtcttatatactgcatatgatccacctttcagaagaactaggatatcggtgtgtggtctttaacaaccggggggtggcgggagagaacctgctaacaccccgaacctattgctgtgccaacacagaggacctggaaaccgtgattcaccacgtacacagcctttatccgtccgcaccttttttggctgccggcgtgtcaatgggcggcatgctgttgctcaattacctggggaaaatagggagcaagactcctttgatggcagccgccacctttagtgtcggatggaataccttcgcatgtagcgagtccttagagaagccgttgaactggctacttttcaattactaccttaccacatgcctgcaatccagcgtcaataagcaccgccatatgttcgtgaaacaggtagacatggatcatgttatgaaggccaagtcaatcagggagtttgataagaggttcacctccgtcatgttcggatatcagactatcgatgattactacactgacgccagtcccagtccaaggctcaaatctgtgggcatcccggtcctctgcctgaacagtgtagacgatgttttttccccctcacacgctattcctatcgaaacggctaagcaaaatcctaacgtagcactcgtactcacatcttatggcggacacattggttttttagaagggatctggccccgccaaagcacctacatggatcgcgtctttaaacagtttgtgcaagcaatggtggaacatgggcatgagctgagctag

SEQ ID NO: 177557 - DNA, 1050 bp, synthetic construct
  misc_feature 1..1050: note = Description of Artificial Sequence: Synthetic coding sequence
  source 1..1050: mol_type = other DNA
atggccgccgaggaggaggaggtggacagcgccgacaccggcgagaggtcagggtggctgaccggttggctgcccacatggtgtcctacttcaatttcacacctgaaggaagccgaagaaaagatgcttaaatgtgtgccatgtacatataagaaggagccggtgcgaatctccaatggcaataaaatatggactctgaagttttcccacaatattagcaacaagacgcccctggtgcttctccatggcttcggaggcggcctggggctttgggccctgaactttggagatctttgcaccaacagacccgtttacgcattcgatttgctaggctttggacgaagcagcagacccaggttcgactctgatgcagaggaagtggaaaaccaatttgtcgaaagcatagaagagtggcgatgtgcgctgggactggataaaatgatcctgctcgggcacaacctgggagggtttctggccgcagcttattcactaaagtatccctctcgagtgaaccatctgattcttgtcgaaccttggggtttcccagagaggcctgatctcgccgatcaagatagacctatcccagtatggattcgggcgctgggtgctgctctcacaccctttaatccattagccggactccgcatcgcgggccctttcgggttgagcttagtacagcgcctgagacccgatttcaagagaaaatatagctctatgttcgaggacgacaccgttaccgagtatatctaccattgcaacgttcagactcctagcggtgaaaccgcctttaagaatatgacaataccctacggctgggccaagagaccaatgttgcagcgtatcggaaagatgcatccagatatccctgtgtccgtaattttcggagcacggtcatgtatcgatggaaattctggtacgtcaatccagtcactgcggccacacagttacgtcaaaactatcgcgattctcggggcaggccattacgtatacgctgaccaacctgaggagttcaaccagaaggttaaagagatctgcgataccgtggattag

SEQ ID NO: 177558 - DNA, 1491 bp, synthetic construct
  misc_feature 1..1491: note = Description of Artificial Sequence: Synthetic coding sequence
  source 1..1491: mol_type = other DNA
atggccgagctgcagatgctgctggaggaggagatccccagcggcaagcgcgccctgatcgagagttaccagaatttgacgcgcgtggccgactattgcgagaacaactacatccagaggcacggcttcgccgtactactgtgccttctgtctaattcttggcctcaggccacggataaacgtaaggctcttgaagagacaaaggcgtacactacccagagtctggccagcgtggcttaccagattaacgccctggccaacaatgtgctccagctgctcgacattcaggctagccaacttagacgcatggaaagttctattaaccatatatctcaaacagttgacatccacaaagaaaaggttgccagacgggagattggaatacttacaaccaataagaacacatctaggactcataagatcatcgcaccggcaaacatggagcgcccggtcaggtacatccgtaaacccatcgattataccgtgctcgatgatgttgggcatggagtcaaatggctgaaggcaaagcacggtaacaatcagcccgctcggactggcactctgtctaggaccaatccgcccacccaaaagcccccaagtccaccaatgagcggccgtggcactctgggaaggaacactccttacaagaccctggagccagtgaagccccctactgttcccaacgactatatgacctcaccagctaggttgggcagccagcacagccccggtcggacagcctcgctcaatcagcgtcctaggacacatagtggatcctctggaggttcagggagcagagagaattccggctcaagttcaatcggaatcccaattgcagtcccgactccttccccccctaccatcggccctgagaacattagtgtgccgccacctagcggggccccaccagcaccacctctggccccactccttccagtctccactgttatcgccgctccgggatccgcacctggatctcagtatggcactatgaccagacagatcagcagacacaacagcaccactagctcaacatctagcggcggttatcgccgcaccccgagtgttacagctcagttcagtgcacaaccacatgttaacgggggtccgttgtattcccagaactccatcgcagacagccctactccaccacccccaccccctccggacgacatacctatgtttgatgattcccctccgccgccacccccccctcccgtggattacgaagacgaggaagcagcagtcgtgcagtacaacgacccctatgcggacggagacccagcatgggctcctaaaaactatatcgagaaagttgtcgcaatatacgattatactaaagataaagatgacgagttgtcctttatggaaggcgcaattatttatgtgatcaagaagaatgacgacgggtggtacgagggagtctgcaaccgggtgacaggactatttccaggcaactatgtggaatcaattatgcactacaccgactag

SEQ ID NO: 177559 - DNA, 1530 bp, synthetic construct
  misc_feature 1..1530: note = Description of Artificial Sequence: Synthetic coding sequence
  source 1..1530: mol_type = other DNA
atggccgagctgcagatgctgctggaggaggagatccccagcggcaagcgggccttaatcgagtcttaccagaacctgactcgggtggccgactactgcgaaaataactacattcaggccacagacaaacgtaaggcattagaagagacaaaagcttacacaacacagtcattagcgtcagtcgcttaccagattaatgccttggctaacaacgttctgcagctgcttgatattcaggccagccagcttcgaagaatggaatctagcatcaatcacatatcacagacggtggatattcataaagagaaagttgcaaggcgtgaaattggcatcctgacaaccaacaaaaacacgagtcgcacccacaaaataatcgcccccgccaacatggagaggcccgtgagatatatacgtaaacccatcgactacaccgtcctggacgacgtggggcatggcgttaagaagtggcataagattatccacggcaacaatcagcctgcccggacgggtaccctgtctcgaactaatcctcccacacagaaacccccaagccctcctatgtctgggcgaggtactctggggcggaacaccccctacaagacactggagcctgtgaagcccccgaccgtgcccaacgattacatgaccagcccggccagacttggatctcagcatagtcccggacgcaccgccagtctcaatcagcggcccaggacccactcgggctccagcggaggttcaggcagtcgggagaattcggggtcatcctcaattgggattcctattgcagtcccaactccttctccgcctactatcggacctgaaaatatatccgtaccgccccccagcggggcccctcctgccccacctctggctcccctccttccagtgtctacagtgatcgccgcgccagggtctgcaccgggaagccagtacggcaccatgaccagacagatttcccgacacaacagcacgactagttcaaccagttcaggaggctatcgcagaaccccctcagtgactgcccagttctcagcccagccccatgtcaacggcggacctctgtactcccagaattccattagcatagctcctcccccacctcctatgccccagctaacacctcaaattcctttgaccggtttcgttgcaagagttcaggaaaacatcgctgactcacccacacctccccccccacctccgcctgacgatattcccatgtttgacgattcaccaccgccccccccccccccacccgtagactatgaggacgaagaagctgcagtcgtgcagtataacgatccttatgccgatggtgatcctgcctgggcaccaaaaaattacattgagaaggtagtggctatctatgactatactaaggataaagatgacgaactgtccttcatggaaggggccattatttacgtgataaagaagaacgatgacggctggtatgaaggagtgtgtaacagagtaacgggactgttcccaggcaactacgtcgagtcaattatgcattacactgattag

SEQ ID NO: 177560 - DNA, 1443 bp, synthetic construct
  misc_feature 1..1443: note = Description of Artificial Sequence: Synthetic coding sequence
  source 1..1443: mol_type = other DNA
atggccgagctgcagatgctgctggaggaggagatccccagcggcaagagggctctgattgagtcatatcagaacctgactcgcgtggctgactactgcgaaaataactatattcaggctacagacaaaagaaaggccctggaggaaaccaaggcatacaccacacaatcacttgcatcagtggcatatcagataaatgctctcgccaataacgtcctccaactgctcgatatacaggcaagtcagcttcgccgcatggagtcttccatcaaccatatatcacagaccgtggatattcacaaagagaaagtcgctaggcgggaaatcgggattctgactactaacaaaaatacctcacgtacccacaagatcattgccccggctaacatggagcggccagtgaggtacatcagaaagcctatcgattataccgtcctggacgacgtcggtcacggcgtaaagtggcttaaagcaaagcatgggaataaccaacccgctcgcacaggcacgctgtctaggacgaacccccctactcagaaacccccgtccccccccatgagcggccggggcaccctgggccggaacacgccctataagacactcgagccagtgaaacctccaactgtgcctaacgattacatgactagccccgccagactgggcagccagcattcaccaggacgaactgctagtctgaaccaacgcccgcgcacacattctggcagctccgggggaagcggctccagggagaactccggtagtagctctatcggaatccccattgccgtgccaacccccagccctccaactattgggcccgctcctgggtcagctccaggaagtcaatacggaaccatgacacggcagatttcccggcacaattcaacgacatcatccacttcaagtggtggatatcggagaacgccatccgtcaccgcgcagttttccgcccagccccacgttaatggcggccccctgtactcccaaaattctatatccattgcgcctccgcccccccctatgcctcagctcactccccagattcctctgaccggatttgttgctagggtgcaggaaaatatcgcagattctccgacacctccaccccctcctccacccgatgacatccccatgtttgatgacagccccccaccacccccccctccacccgtggattacgaagacgaggaagccgccgtggtgcagtacaacgatccctatgcagatggcgaccctgcttgggccccaaaaaactacatagaaaaagtggtggctatctacgattatacaaaagataaggatgacgagttgagcttcatggaaggggccataatttacgtgatcaagaagaacgatgatggctggtacgagggggtctgcaatcgggttactgggctgttcccgggtaactacgtcgaatccattatgcactataccgactag

SEQ ID NO: 177561 - DNA, 1449 bp, synthetic construct
  misc_feature 1..1449: note = Description of Artificial Sequence: Synthetic coding sequence
  source 1..1449: mol_type = other DNA
atggccgagctgcagatgctgctggaggaggagatccccagcggcaaaagagcactcatcgagagctaccaaaatttgacaagagtggctgactattgcgaaaacaactacattcaggctaccgataaacgaaaggctctggaagaaaccaaggcttacacaacccaatccttggcatctgttgcttaccagattaatgcgctcgccaacaacgttttacagttgttagatattcaggcaagtcagctgaggagaatggaaagctcaatcaaccatattagtcaaacagtggatattcacaaggaaaaggtggcccgccgagagattggcatcctcaccaccaataagaatacatcaagaacccacaaaatcattgctcccgcaaatatggagcgaccagttcgctatattagaaaacccatagactacaccgtgctcgacgatgtgggacacggcgtgaaaaaatggcataagattattcatggtaataatcagcccgcccgaaccgggacgctgtcccggactaaccctcccactcagaaaccaccatccccccccatgagtggcaggggcacactgggtcgtaacacgccatataagaccctggagccggtaaagcctcccaccgttcccaatgactacatgacttctcctgctcgattgggctcccagcatagtcccggcagaaccgcaagcttaaaccagcggccacgaacacattcaggcagcagcggcggtagcggcagccgtgaaaattcaggcagcagttccataggcataccaattgctgtgcccacaccctctccacccacaatcggaccagcggctccgggttcagcacctggatcccagtatggtactatgaccaggcagatttcacgtcacaactccactacctcatctacctcatccggaggctatcgaaggaccccctctgtcaccgcccaattttcggctcagcctcatgttaatgggggacctctttatagccagaattccatttctatcgcgccccccccgccgcccatgccacagctcacaccccagattccattaactgggttcgttgcaagggtgcaggaaaacattgccgatagccccactcctcctccccccccacctcccgacgacattcccatgttcgatgactcccccccaccccctccccccccacccgttgactatgaggacgaagaagctgccgtggtacaatacaatgacccctatgccgatggagaccctgcctgggctcccaagaactatatcgagaaagtcgtggccatttatgattacacaaaagacaaagacgacgagctgagctttatggagggcgccatcatctacgtgatcaagaaaaacgatgatggctggtatgagggtgtctgcaatagggtaacagggctatttcccggaaactacgtcgaaagcatcatgcactataccgactag

SEQ ID NO: 177562 - DNA, 1272 bp, synthetic construct
  misc_feature 1..1272: note = Description of Artificial Sequence: Synthetic coding sequence
  source 1..1272: mol_type = other DNA
atggccgagctgcagatgctgctggaggaggagatccccagcggcaagcgcgctctgatagaatcttatcaaaacctcactcgtgtggccgactactgtgagaataattatatccaagctaccgacaagagaaaggctttagaggaaaccaaggcctacacgacccagtctttagcaagcgtggcataccagatcaacgctctcgccaataacgttttacagttgctcgatatccaggctagccagctcaggaggatggagagtagtatcaatcacatcagccagacagtagacatacacaaagaaaaagttgccaggcgcgaaattggcattctgaccaccaacaagaacacttctcggacacacaaaataattgcgcctgcaaatatggagaggcccgtgcgctatattaggaagcctatcgattacaccgttttggacgacgttggacacggcgtcaagaagtggcacaagatcatacacgggaataaccagccggcaagaacaggcaccctgtcaaggaccaatccccccacccagaagccacctagtccccctatgtccggccggggcactttaggacgcaataccccttataaaactctagagcctgtaaaaccgcctacagtgcccaatgattacatgacctctccagctagattaggaagccaacacagccccgggagaaccgcatctctgaatcagcggccaaggacccatagcgggtcctccggcggctcaggctcaagggagaactcgggctcctcctcaatcggaattccgatcgccgtccccacccccagtcctcccaccatcggcccagtgagtatcgcacctcctcccccacctatgccccagctcaccccgcagatcccactcacaggattcgtcgcaagggtacaggagaacattgcagacagccctacacctcctcctccccctccccctgacgacattccaatgtttgacgactccccaccaccacctcctcctccaccagttgactatgaggacgaagaagccgcagtcgttcagtataacgatccttatgccgacggggatcctgcatgggcaccaaaaaactacatcgagaaagtggtggccatttacgattatacaaaagataaggatgacgagctgtcttttatggagggcgctatcatctacgtcataaagaagaatgatgacgggtggtacgaaggagtctgtaatagagtgaccgggctgttcccaggcaactatgtggagagcattatgcactatactgattag

SEQ ID NO: 177563 - DNA, 1359 bp, synthetic construct
  misc_feature 1..1359: note = Description of Artificial Sequence: Synthetic coding sequence
  source 1..1359: mol_type = other DNA
atggccgagctgcagatgctgctggaggaggagatccccagcggcaaacgtgccctgattgaatcctaccagaatttaacaagagtagccgactactgcgaaaataattacatccaggccacggacaaaagaaaggccctggaggaaaccaaggcctacacaacacagtctctggccagtgtggcttaccagatcaacgccctggctaacaacgtccttcaattattggacatccaggcttcccaattgcggaggatggagagctccataaaccacatctctcagaccgtggacatccacaaggagaaagtggccagacgtgagataggcatcctcacgaccaataagaataccagcagaacacacaagattattgcccccgccaatatggagcggcctgtgagatatatccggaagccgatcgattacacagttctagacgatgttggccacggcgtgaagtggctcaaggcgaagcacggaaataaccagcctgctcgaacgggaactttgtcccgaaccaacccccccacacagaagcctccctccccacccatgtctggtcggggaaccctgggccgcaataccccttataagacactagaacccgttaaaccgccaaccgtcccaaacgattatatgaccagtcccgctagactaggttcacagcattctccgggacggaccgcatctctcaaccagcgccccagaacccactctggatcctccggagggtccggatctcgggaaaattccggctcctcaagcatcggaatccccatagccgttccaactccgtctccaccgactatcgggcccgctgcgcccggcagtgcgcccggctctcagtatggcacaatgaccaggcagatttcacgacacaactctacgaccagttcgacaagctctggtggttaccgtagaacgccctccgtgaccgcccagttcagcgcccagcctcacgtgaatggcgggccactctatagccagaattccattgctgactcccccacccctcctcccccacctccacccgacgacatcccaatgtttgatgattccccgcccccacctcctcctcctcctgtggactacgaggacgaggaagccgccgtggtgcagtacaacgatccatacgctgatggggacccagcgtgggctccgaagaattacatcgagaaggtggtggctatctacgattataccaaggacaaggacgatgaactgtcctttatggagggagccataatttatgtgatcaaaaagaatgacgatggatggtatgaaggggtctgcaacagagtgactggtctattcccgggcaactacgtggagtctattatgcattacacggactag

SEQ ID NO: 177564 - DNA, 1431 bp, synthetic construct
  misc_feature 1..1431: note = Description of Artificial Sequence: Synthetic coding sequence
  source 1..1431: mol_type = other DNA
atggccgagctgcagatgctgctggaggaggagatccccagcggcaaacgcgccctgatcgagagctaccagaatctaacccgcgttgccgactactgcgagaataattacatccaggcaacagacaagcgaaaggccctggaggagaccaaggcctacaccacccaatcactggcaagtgtggcttaccagattaatgctcttgctaacaatgtactccagctattggacatacaagcttcccagctgaggcgaatggagtcctccatcaaccacatctcccaaaccgttgacattcacaaggaaaaggtcgcacgccgtgaaatcgggatcttaaccaccaataaaaatacatcacggacccacaaaattatcgcacccgccaacatggagaggcctgtgagatacatcagaaagccaattgactataccgtgttggacgacgttggccacggcgttaagcacggcaataaccagcctgcacgtaccggcacactctctcggactaatccccctactcaaaaacctcccagtcctcctatgagcggccggggtactctgggcaggaacaccccatacaagacacttgagccggttaagccacccaccgtgcctaatgactatatgacctccccggctaggctgggctcacagcatagtcctggtcgtactgcatcactaaaccaacgccccagaacgcactccggctcgtccggaggctctgggtcaagagagaatagcggatcctcctctatcggtatccctattgcggtgcctaccccatcaccgcccacgatagggccggctgccccagggtctgctcctggatcacaatatgggacaatgaccaggcaaattagcaggcataactccaccacatcaagcacgtctagtggcggatacagaaggacccccagcgtcaccgcccagttctctgcccaaccgcacgtcaatgggggacctctttattcacagaattccatctccatcgctccacctccccctcccatgccacaactaacacctcaaattcccctgaccggttttgtggctagagtccaagagaacatcgctgattcaccaactcccccaccgcctccccctcctgacgatattcccatgttcgacgattcacctccacctccacctccgccccctgtggactacgaggacgaggaagctgcggtcgtgcagtacaatgacccatatgctgacggcgaccccgcctgggcacccaaaaattacatcgaaaaagtcgtggcaatctacgattacaccaaggacaaggatgacgagctgtcatttatggaaggagcaattatctacgttataaaaaagaatgacgacggttggtatgagggggtctgcaatagggtgacaggtctgttcccagggaactacgtggagtcaataatgcactatactgattag

SEQ ID NO: 177565 - DNA, 1446 bp, synthetic construct
  misc_feature 1..1446: note = Description of Artificial Sequence: Synthetic coding sequence
  source 1..1446: mol_type = other DNA
atggccgagctgcagatgctgctggaggaggagatccccagcggcaagagggcactaatagaatcatatcagaatttgactcgcgtagccgactactgtgagaataactacattcaagcgacagacaagcggaaagctctggaggagaccaaagcatatactacacagtccctggcgtcagtcgcctaccaaattaacgcacttgccaataacgttctgcagctccttgacattcaggcaagtcaactgcgaaggatggaatcttcgattaaccatatctcccaaactgtcgacattcacaaggaaaaagtcgcccgaagagaaatcggcattctgactaccaataaaaacacctcaagaacacataaaatcattgcccctgctaatatggagcggccagtgcgatacatcaggaaacccatagactacaccgtcttggatgacgtgggacacggggttaagtggcttaaagccaagcacggcaacaatcaaccggcacggaccggcacacttagccgcaccaatccgccaacccagaagcctcctagtcctccaatgtctggccgcggtaccctcggtcgtaacactccctataagacgctggaaccagttaagccacctacggtgcccaacgattacatgaccagtcccgcacgattgggctcacagcattcacccggtcgaacagctagcctgaaccaaaggccacggacccatagtggctcatctggaggctctggaagtagagagaacagcgggtctagcagtatcggtattccaatcgccgtgcccacgccatctccaccaacaatagggcctgccgcccctggatcagcccccggcagccagtatggtacaatgacgcggcaaatttcccgacacaattctaccacttcctctacgagcagcgggggctatagacgcacaccctcagtgacagcccagttctctgcgcagccgcacgttaatggcggccctttgtattcacagaacagtatttcaattgctcctccgccccctccaatgcctcagttgacgccacagatccccctcaccggctttgtggcacgtgtacaggaaaatatcgcagacagccccactcctcctccacctccgccccccgatgatatccccatgttcgacgatagcccccctccacctcccccacctcctgttgactatgaagacgaggaagccgccgtggtgcagtacaatgatccctatgccgatggagacccggcttgggccccgaagaattatatcgagaaggtggttgctatttatgactatacaaaagacaaagatgatgaactcagctttatggagggggctatcatatacgttatcaagaaaaacgacgacgggtggtacgagggagtgtgcaaccgcgtgactggcctctttccaggcaattacgtcgagagtataatgcattatactgactag

SEQ ID NO: 177566 - DNA, 1527 bp, synthetic construct
  misc_feature 1..1527: note = Description of Artificial Sequence: Synthetic coding sequence
  source 1..1527: mol_type = other DNA
atggccgagctgcagatgctgctggaggaggagatccccagcggcaagagggctcttattgaaagttaccaaaatcttacccgcgtggcggattattgcgaaaacaactacattcaggctacagacaaacggaaagctttggaggaaaccaaagcgtatactactcagtccctggcaagcgtggcctaccaaataaatgccctggccaataacgtgctccagttgctggatatccaggcctctcagcttcgcaggatggagtcctcaattaatcacatctcacagaccgtggacattcataaggaaaaggtcgctcggcgagaaatcggcattttgacaaccaataagaacacatcgaggactcataagatcattgcacccgcaaatatggaaaggcccgtgcggtatatcagaaagcccattgactacaccgtgctggatgacgtaggccacggcgtgaaatggctgaaagcgaagcacgggaacaatcagcctgctcgtactggtaccttgtctcggacaaacccacctacgcagaagcctccaagcccacccatgagtgggcgaggaaccttaggtcgcaatactccctataaaacactggagccggttaagccgcccactgtgccaaatgactacatgacgtcaccagcgcgtttgggctcccagcattcgcccggccgcactgcctcactgaaccagagaccaaggacccacagcggcagttcagggggatctggatctcgggagaactctggaagctcttctatcggaataccaatcgcagttccgactccgagtccaccaacaattggtccagagaatattagcgtgccacctccaagtggggcccctcctgctccgccactggctcccctgctacccgtcagtactgtcattgccgcacctggttctgcgccgggaagccagtatggcacaatgacacgtcagattagccgccataactccaccacctctagtacatcatctggaggctacagaaggaccccctccgtcaccgcccagttctctgcacagcctcacgtgaatggaggccctctgtattcgcaaaacagtatttccatcgcaccgcccccacccccgatgccccagctcacccctcaaatcccactcactggcttcgttgccagggtgcaagagaatatagccgattccccgacgcctcctccgccccccccaccagacgacatcccaatgtttgacgatagccccccacctccccctcccccacccgtcgattatgaagatgaggaagcagctgtggtgcaatacaacgacccatatgccgatggagaccccgcctgggcccctaaaaactacattgagaaggtggtggctatatatgactatacaaaggataaggatgacgagctgagctttatggaaggcgccatcatatatgtgattaaaaagaacgacgatgggtggtacgagggtgtgtgtaatcgggtgacaggactgtttccgggcaactatgtagagtcaatcatgcactacacagactag

SEQ ID NO: 177567 - DNA, 1428 bp, synthetic construct
  misc_feature 1..1428: note = Description of Artificial Sequence: Synthetic coding sequence
  source 1..1428: mol_type = other DNA
atggccgagctgcagatgctgctggaggaggagatccccagcggcaagcgagcacttatcgaatcatatcaaaatttgacaagagtcgctgactattgtgaaaataattatatccaggccaccgataagaggaaagccctagaggaaaccaaggcctataccacccagagcctggcatccgttgcatatcagataaatgcgcttgcaaataatgtactccagctccttgatattcaggcttcacaactgcggcgaatggagtctagcatcaaccatatctcacagacggtggacatacacaaagagaaagtagcaaggcgggagatcggcattctgaccacaaataagaatactagccggactcacaagattatcgccccagccaacatggagaggcctgttcgttacattcggaagcccatcgattacaccgtgcttgacgacgttggccatggagtcaagcacggcaacaatcaacctgctcggacagggaccttgagcagaaccaatcctcctactcagaagccccccagccccccgatgtcaggccgtggcactctgggacgcaacactccatacaaaaccctggagcccgtcaagcccccgacagtgcctaacgattacatgacatccccggcaagactgggatcacagcattcgcctggacgcaccgcaagtctcaaccagagacctcgcacccatagtggcagcagcggcggctccggctctcgagaaaattctggctcaagcagtattggaatccccattgccgttccgactccatcccccccgaccattggcccagctcccgggagtgcccctggttcacagtatgggactatgactcgccagatctcgcggcacaacagcacgacaagctcaaccagctcagggggctatcgtaggactcccagcgtcacggcccagttctcggcgcagccgcatgtgaacggaggaccgctctattcccagaatagtatatctatcgctcccccccctccaccaatgccccagctgactcctcagatccccttaactggctttgtggccagggtccaagaaaacatcgccgacagtcctacaccaccccctccacccccgcccgatgatatcccaatgtttgatgacagtccccctccccctccccctccacccgtggactacgaagacgaagaagcggcagttgtgcagtacaatgacccctacgcagacggagatcccgcctgggcaccaaaaaattacatagagaaggtggttgccatatacgattataccaaagacaaggacgatgaactcagcttcatggaaggcgctattatatacgtgatcaagaagaacgatgacggatggtatgagggcgtttgcaaccgggtcaccggactttttcctggaaattacgttgaatctattatgcattacaccgactag

SEQ ID NO: 177568 - DNA, 1341 bp, synthetic construct
  misc_feature 1..1341: note = Description of Artificial Sequence: Synthetic coding sequence
  source 1..1341: mol_type = other DNA
atggccgagctgcagatgctgctggaggaggagatccccagcggcaaacgggctctgattgagtcataccagaacttaacacgggtcgccgattattgcgaaaataattacatccaagccacggacaagaggaaagcacttgaagagactaaggcctatactacacagtcccttgctagcgtcgcttaccaaatcaacgcactagctaataatgtgctccagttactcgatatccaggccagccagctgaggagaatggaatcaagtattaatcatatttcgcagaccgtggatatccataaagagaaagtggcaaggcgagagatcgggatactgaccacgaataagaatacatccaggactcacaaaattattgcgccagccaacatggagagacccgtgaggtacattcgtaaacctatcgattacaccgttcttgatgacgtgggacacggagtgaaacacggtaacaatcaaccagccagaacgggaaccctgagccgtacaaatcccccgacacagaaacccccatccccccctatgagcgggaggggaaccttggggcgaaatacaccttataaaacgctagagcccgtgaaacccccaactgtgcccaatgactatatgacctcgcctgctcgcctggggagtcagcacagccccgggcggaccgcttcattaaaccagagaccgagaacacactctggttcttccggaggctctgggtctcgcgaaaatagtgggtccagctccataggcatacctatcgccgtaccaacacccagcccccccaccattggtcctgctcccggttctgctcccgggtcgcagtacggcactatgacccgccagatttcccgccacaattccactacttcatctacatcaagcggagggtatcgccggacccccagcgtcacagcacagttttcggcccagccacacgttaacggcggaccactctattcgcagaactcgatcgctgattccccgacacccccgcctccacctcctcctgacgacatccctatgttcgacgattccccccccccccccccgcctccgcctgtagattatgaggacgaggaggccgctgtagtccagtacaatgatccctacgctgacggggatcctgcatgggcccccaaaaactatatcgagaaagtggtcgccatctatgactacacaaaggacaaagatgatgagcttagctttatggagggagccatcatttacgtgattaaaaagaacgacgatggatggtacgagggtgtttgcaaccgcgtcactggactgttccccggcaattacgtggaatctattatgcactacacggactag

SEQ ID NO: 177569 - DNA, 1356 bp, synthetic construct
  misc_feature 1..1356: note = Description of Artificial Sequence: Synthetic coding sequence
  source 1..1356: mol_type = other DNA
atggccgagctgcagatgctgctggaggaggagatccccagcggcaaaagagccctgatcgagagttaccagaacttaacacgggtggccgattactgcgaaaataattatatacaggctacagacaaacgaaaggccttagaagagacaaaggcctacaccacacagtccttggcctctgtggcctatcagataaacgcattggcaaataacgtgttacagcttctggatatccaggcttcgcagctgcggcgcatggaatcctccattaaccacatatcccagactgtcgacattcacaaagagaaggtggcccggagagaaattgggatactcacaacaaataaaaatacatcacggacgcataagatcattgcccctgcgaatatggagcgacctgtacgctacatacggaaacccatcgattatacagtcttggatgacgtgggacacggtgttaagtggctgaaagccaagcacgggaataatcagccagcacgtaccgggacactgagtaggacaaatccccctacacagaaacctccaagccccccaatgtcagggcgaggaaccctcggtcgcaataccccatacaaaaccctcgaaccagtgaagcccccaaccgtgccgaacgactatatgacctctcctgcgaggcttggcagtcagcattctcccggccggaccgcctccttgaaccagaggccaaggactcactcaggctcatccggaggcagcggaagtagagaaaattcgggctccagttcaattgggatcccaatcgcggtgcctacacccagtcccccaacgataggacccgcacccggaagtgcccccggctcgcaatacggcaccatgacccggcagatatcgagacataatagtacaacaagtagcacctcttcagggggctacagaagaactccctcagtgactgcacagtttagcgctcaacctcatgtcaacggaggcccattgtacagtcagaattccatcgctgacagtcctacccctccccccccgccaccgccagacgatatccccatgttcgatgatagtcctccccctccgcccccgcctcccgttgattatgaggacgaggaggcagccgtggtgcagtataacgatccctatgccgatggcgaccctgcttgggcccccaagaactacatagagaaggttgtggccatatacgactataccaaggataaggacgatgagctgagctttatggaaggcgccataatctacgtgatcaagaaaaatgatgacggatggtatgaaggcgtgtgcaaccgcgtgaccggtctgtttcccgggaattatgttgagtccattatgcattataccgattag

SEQ ID NO: 177570 - DNA, 990 bp, synthetic construct
  misc_feature 1..990: note = Description of Artificial Sequence: Synthetic coding sequence
  source 1..990: mol_type = other DNA
atggccgagctgcagatgctgctggaggaggagatccccagcggcaaacgcgcactgatcgagtcgtatcagaatctgaccagagtggctgactactgtgaaaacaactatatccaggccacggacaaacgaaaagcactggaggagactaaggcttatacaacccagtcgctcgcttctgtcgcatatcagattaacgccctggctaataatgtcctgcagttacttgacattcaggcgtcccagcttagacggatggagtcctctattaatcacatctctcagcacggtaataaccagcccgcccgcaccgggaccctctctcggacaaacccccccacacagaaaccaccatctcctccgatgagtggcagagggactctggggcgcaataccccatataaaacactggagccagtgaagccccctacggtgcctaacgactatatgacatctcctgctcgtttgggctcgcaacactccccaggccgaacggccagtctgaatcagagaccaagaacgcattctggctcgagtggtggaagcggttctagagaaaattctggatcctcatcaatcggcatcccgatcgctgtgcccactccttcaccccccaccattgggcctgtggccgatagcccaacaccccctcccccccccccacccgatgatatacccatgtttgatgattcccctcccccccctcccccacctcccgtcgattatgaggatgaagaggcagcagtagtgcagtataacgacccatatgctgatggcgatcctgcctgggcccccaagaattatatagagaaagtggtcgccatctacgactacacaaaggataaggatgacgaactgtccttcatggaaggagctattatctacgttattaaaaagaatgatgatggttggtatgagggagtttgcaatcgggtgacggggctgtttcctgggaattacgttgaatcaattatgcattatacagattag

SEQ ID NO: 177571 - DNA, 1185 bp, synthetic construct
  misc_feature 1..1185: note = Description of Artificial Sequence: Synthetic coding sequence
  source 1..1185: mol_type = other DNA
atggccgagctgcagatgctgctggaggaggagatccccagcggcaagcgggcgttgatcgaatcataccagaatttaaccagagtagctgattactgtgaaaataactatatccaggctaccgacaagaggaaagccctggaagaaacgaaagcatacacaacccagtctctggcctcagtggcgtaccaaattaacgccttggcgaataatgtactccagctgctggacattcaggcgtcccagctgcgcagaatggagtcttcaataaatcacatttcacagacagtggacatacacaaagaaaaggtggcaaggagagaaatcggcatcctgaccactaacaagaacacttcgagaacacacaagattatcgctcctgccaacatggaaaggccagtgaggtacatccgaaagccgattgactatacagtgctggatgacgtgggtcatggagtgaaaaagtggcacaagatcattcacggcaacaatcagccagcaaggaccgggacgctgagcagaaccaatcctccaactcagaaaccaccttctccccccatgagcggccgcggcaccctcgggcggaacaccccctacaagactctggaacccgtgaaaccccctacggtacccaacgattacatgacttccccagccaggttgggaagtcagcactcaccaggcaggacggccagtctgaaccagcggccccgcacccactctggttcctcagggggtagtgggtcccgggagaactctggcagcagttctataggaatccccatcgctgtaccaacccctagccctcctacgattgggcccgtggcagacagcccaacccccccacccccgccccctcccgacgatattcccatgtttgacgattccccaccgccccctccaccgcccccagtggattatgaggatgaggaggctgccgttgtgcagtacaacgacccatatgccgacggagacccagcctgggcccccaaaaattacatcgagaaagttgtggccatttatgattacactaaggacaaggacgacgagcttagcttcatggagggggctattatctacgtgatcaagaaaaacgacgacggatggtacgagggcgtgtgcaatagggtaacgggattatttccagggaattacgtcgaaagtattatgcactatactgattag

SEQ ID NO: 177572 - DNA, 3993 bp, synthetic construct
  misc_feature 1..3993: note = Description of Artificial Sequence: Synthetic coding sequence
  source 1..3993: mol_type = other DNA
atgcccctgagcccccccgcccagggcgaccccggcgagcccagcccatgccgtcccccaaaaaagcatactacgtttcacctctggcgaagcaagaaaaagcagcagccagcccctcctgactgtggtgtgtttgtcccacatccacttcctgcccccgcaggcgaggctagggctctggatgttgtggacggtaaatatgtggttcgggactcacaggagttccccttacactgtggtgagagtcaattcttccatactacatccgaggcactagggtctctcctgttggaaagcgggatctttaaaaagtctcgggcccagcccccagaggataaccgacgcaaaccagtcctgggaaagctcggaacactgtttacagccggacggaggagaaatagccggaatggattggaatcacccacccgctctaacgctaagccgttgagtccaaaagatgtggtggcctctccaaaactgccggagagagaatcggagcggtcacggtcccagtcctctcaactgaagcagacagacactagtgaggaggggagcccacgtgaaaatcctcgggaggctgagggcgaactacctgagtcaggtggcccagccgccccaccagatgccgagctcagcccaaggtggtcatcctccgccgccgcagttgccgtccaacagtgccacgagaatgattccccccaactggaacctctggaagccgaaggagaaccttttcctgatgctacgactacagcaaagcagttgcattcctcaccagggaattcctcacgccaggagaatgcagaaacaccggctcgttccccaggggaagacgccagccccggagccgggcatgagcaggaggcgtttcttggagtgcggggagctccgggctctccgacccaggagcgtccggctggcggtctcggtgaggctcccaatggcgccccgtcagtttgcgctgaggaagggtctctcggaccgagaaacgccaggtctcaaccgccaaaaggagcctcagaccttcccggagaacctcccgccgagggggccgcccacacggcctcaagtgcacaggccgactgcacggcaagacctaagggtcatgctcacccggccaaggtgctaactctggacatctatctgagcaagaccgagggagcccaggtcgacgaacccgtggtgataaccccccgcgcagaagattgcggcgactgggacgacatggaaaagcggagctccggtaggaggagcggtagacggcgtgggagccaaaaatcgaccgattcgcccggtgccgatgctgagctgccggagagtgccgcacgcgacgatgccgtgttcgatgacgaggtggcccctaacgcagcctccgacaatgcttcagctgaaaaaaaagttaaaagtcctcgggcagccctcgacgggggtgttgccagtgccgcctccccagagtcaaaaccgagtccagggacaaagggccagctccgcggtgagagcgatcgcagcaaacagcctccacccgcctcgtctcccactaagagaaagggcaggagcagagcactagaagcagttcccgctccacctgcttccggccctcgcgcccctgcaaaagaatcgccacctaagcgtgtgccagatccttctcccgtaactaaagggacagccgccgagtctggcgaagaggccgcacgggcaattccccgtgaactgccggtgaagagttcgtcactactccccgaaattaagcccgaacataagcgcggccctttaccaaatcatttcaatgggcgcgcagaagggggaaggagtcgggaacttggccgagccgccggcgcaccgggagcatccgatgcggatggtctcaaaccacggaatcatttcggcgttggacgcagcactgtgaccactaaggtgaccttgcctgctaagcccaagcacgtggagctgaatctgaaaactccaaagaatttagatagccttggtaacgaacacaatcctttttcacagccggtgcacaagggcaacaccgccactaagattagcctattcgaaaacaaaagaaccaatagttcaccaagacataccgatatcagaggacagcggaacacaccagcctcaagcaaaacattcgtggggagagccaagctcaacctggcaaaaaaggctaaggaaatggagcagcccgaaaagaaggttatgcccaactctccgcagaacggagtcttagtcaaggagactgctatcgaaaccaaggtgactgtgagtgaggaagagattctcccagctacccgggggatgaatggagactcaagtgaaaatcaggccctgggaccgcaacccaatcaggacgacaaagccgatgtgcagactgatgctggatgtctaagtgagcctgtggcaagtgccttgattccagtcaaagatcacaaactgctggaaaaagaagattctgaagccgcagatagcaagtccctggtcctcgaaaatgtcactgacactgctcaagatattcccaccaccgtcgacacaaaagatctgcccccaaccgccatgccaaagccccagcatacattttcagactctcagagcccggccgagtcctcacccgggccatcactgtctctgagtgccccggcgccaggagacgtgcccaaggacacctgtgtccagtcaccaattagttcgttcccttgtaccgatctaaaggtaagcgagaaccataagggttgcgtgttgcccgtgagtagacagaataatgaaaaaatgccccttctcgagttgggtggcgagacaacccctcccctttccacagagcggtctccagaagctgtcggcagcgagtgtcctagccgagtgctcgtgcaggtgagaagttttgtgttgcctgtagaaagcacacaggacgtctcatcccaggtgatcccagagagttcggaagtgagggaagttcagcttcccacctgccactctaatgagcccgaggttgtctcagtcgccagctgcgcaccaccccaggaggaagtgctaggaaacgaacactctcactgcaccgccgagctggccgccaagagtggcccacaagtgattcctccggcgtccgagaagactctacccatccaggcacagtcccagggctccagaactccactaatggccgagagcagtcccacaaactcaccaagctctggaaaccaccttgccacacctcagcgaccagatcagacagtgaccaacggtcaggatagcccagcctcgttgctgaacatttcagcaggttcagatgattctgtgtttgattcatcttcggacatggagaaattcacggagatcatcaagcagatggattccgccgtctgtatgccaatgaagcgcaagaaggctcgaatgcccaattcccctgctccccattttgctatgcctccaatccatgaagatcatctggagaaagtgttcgacccaaaggtattcacgtttgggctgggcaaaaagaaggaaagccagccagaaatgtcccccgcactccacctcatgcagaacctggatacgaaatctaagctgcggcctaagcgagcctccgccgagcagtcagtactgttcaagagtcttcatacaaatacgaacggcaacagtgaacccttagtcatgccagagatcaatgacaaagagaaccgggacgtgaccaatggtggtatcaagcggtcacggttagagaagagtgccctgttcagttctctgctttcttcgctgccacaggataagatcttctccccttcagttacgtcagtgaatacgatgactactgccttttctacatcacagaatggaagcctctcccagagcagtgtttcacagcccaccactgaaggcgcccctccctgcggcttaaataaagagcagtccaacctcctgccagacaattccctgaaagtattcaactttaatagcagcagcacatcccatagctccctcaagtcacccagtcacatgtag

SEQ ID NO: 177573 - DNA, 5172 bp, synthetic construct
  misc_feature 1..5172: note = Description of Artificial Sequence: Synthetic coding sequence
  source 1..5172: mol_type = other DNA
atggagaagcggagcagcggccggcggagcggccggcggcggggctcccaaaagagtactgatagccccggtgccgatgcagagctccccgaaagcgcggccagggatgacgcagtatttgatgatgaagtggcccccaacgctgcttctgataacgcgagcgctgaaaagaaagtgaaatcaccaagggctgccttggacggtggcgttgcatccgccgcatcaccagaatctaagccctcacctgggacaaagggccagctgaggggagaatcggataggagtaaacaacctccccctgcatcttcgcccaccaagcggaagggcagatcaagagcgctggaggctgttccagccccacctgcgagtggcccgagagcgcctgccaaggaaagcccacccaagcgggtgccagacccgtccccggtaaccaagggaacagctgcagaaagcggagaggaggccgcccgagccattccacgcgaactgcccgtaaaatcaagtagtctactcccggaaatcaagccagagcataaacgagggcccctcccaaatcactttaatgggagggctgaaggcggacgctccagggaattaggaagagcagccggcgccccaggcgccagcgacgctgacgggttaaaaccaagaaatcatttcggcgtaggtaggagtactgttactacaaaagttactttgccagcgaagccaaagcacgtagaactgaacctaaagacccctaaaaatctcgacagtctcgggaatgagcataatccgttctcacagcccgtgcacaagggaaatacagcgacaaaaatttctctctttgagaacaaacgcactaattcatccccccgccatacagatatccgcggccagagaaatacccccgcgagctcaaagacttttgtgggcagggccaaactcaatctcgcgaagaaagctaaggaaatggagcaacccgagaagaaggtgatgcccaattccccacaaaacggcgtgcttgtgaaagagaccgcaatcgaaactaaagttaccgtcagtgaggaggagatacttcctgctacccggggcatgaatggggatagcagtgagaaccaagcccttgggccacagccaaatcaagatgataaagccgacgtgcagactgatgcggggtgtcttagcgaacctgtcgccagtgcccttattcccgtgaaagatcacaagttgctggaaaaggaggattcagaggccgccgactcaaaatcgttggttctagaaaacgttacagatactgctcaggacatccctactacagttgacacaaaggatctgccacccaccgccatgccaaagccacagcataccttcagtgactcccaaagcccagccgagagttcacctgggcctagcctgtccctaagcgcaccagccccaggagacgtccccaaggacacctgcgttcagagcccaatatcctcattcccttgcactgatctgaaagtgtccgagaatcataaaggctgtgtacttccagtgtctcgccaaaacaacgaaaaaatgccactcttggagctggggggagaaaccacgccccccctctcaactgagcgttctcccgaggcggttggctctgagtgccctagcagagtgctcgtccaggtgcgctcattcgtcctcccagtggagtccacacaggacgtgagcagccaggtgatcccagaatcatctgaggtccgtgaggtccagctgcccacctgccacagcaatgaaccagaggtggtgtcagttgccagctgtgctcctcctcaggaggaggtactgggcaacgaacacagccactgcaccgcagaactggctgccaagagcgggccacaggtaatcccacccgcctccgaaaagactttgccaattcaggctcaatctcaaggaagtaggacccccctcatggccgaaagcagccctaccaattctccatcctccgggaatcacttggcgacccctcagcggcctgatcagaccgtcaccaatggtcaggattcgcccgcttccctcctcaatatttctgctggtagtgacgatagcgtgtttgacagttcttccgacatggagaaattcactgagattattaagcaaatggattctgcggtctgcatgccaatgaagagaaagaaagcccggatgccgaattcccccgcaccccacttcgcgatgccaccgatccacgaggatcacttggagaaggtgttcgatcctaaagttttcacattcggccttggaaagaaaaaagagagccagcccgaaatgtcacccgctctccatctgatgcaaaacttagacacaaagagtaagttgcgtccgaagcgtgcctcagccgaacagagcgtcctttttaaatccttacatacgaacaccaacggcaactccgaaccacttgtcatgcccgaaatcaacgataaggaaaatcgcgacgtaaccaacggcggaatcaaacgatcaagactggagaaatcagctctcttctcttcgctactgtcaagcctgccccaggataaaatattttccccatctgtgacctctgtcaatacaatgaccacggcctttagtacatctcagaatggttctctttctcaatcctctgtcagccagcctacaaccgagggggcgcctccatgcggactcaataaggaacagagtaacctcctgccggacaactctctgaaggtctttaactttaatagctcttcgacgagccattcctcactgaaatcgccatcccacatggagaaataccctcagaaggagaaaaccaaagaggacctggactctagatctaatctgcacctgccggagacaaagtttagtgagctttcgaagttgaaaaacgacgatatggagaaggccaatcacatcgagagcgtgatcaagtccaacctgccaaactgtgctaatagcgataccgatttcatggggctcttcaaaagctccagatatgatccctccatatctttttctgggatgagcctgtctgatacaatgacgctgcgtgggagcgtacagaacaagctgaaccctcggccaggcaaggtggtgatttacagcgagccagacgtctccgagaagtgtattgaggtgttcagcgacattcaagattgttcgagctggtctctatcccctgtgatactgatcaaggttgtaaggggatgctggattttgtatgagcagcctaacttcgaggggcattccatcccacttgaggagggtgagttggagttgagcggcctgtggggaattgaagatattttagagcgacatgaggaggcagagagcgataagccagttgtgatagggagcatccgtcatgttgttcaggactaccgcgtttcacatatagacttgtttactgaacctgagggcttgggcatactgagttcctacttcgatgacaccgaagagatgcagggctttggagttatgcaaaagacttgttctatgaaagtgcactggggcacctggctgatatatgaagagcccgggtttcagggcgtccctttcattttggaacctggggagtacccagacctctcattttgggacacagaggaggcatatatcggttccatgcggcctcttaagatggggggccgtaaagtggaattccctacagacccaaaagtcgttgtttatgagaaacctttcttcgaggggaaatgcgtggagcttgaaactgggatgtgctcatttgttatggaaggcggggaaactgaagaagccactggtgacgaccatctcccctttacttccgtaggtagcatgaaagtgctaaggggcatctgggttgcatatgagaagcccggattcacaggacatcaatacctgttggaggaaggggagtacagggactggaaagcatggggtggctacaatggagagctgcagtccttaagacccatcctcggcgacttcagtaacgcacatatgataatgtattccgagaagaattttggatctaaggggtcctctatcgatgtactggggatcgtggccaacctgaaggagacggggtacggcgtgaaaactcagtctattaacgtgctgagtggggtttgggtggcatacgaaaacccagacttcacgggagagcaatatattcttgataaggggttttacacgtcttttgaagattggggtggaaagaactgtaagatatcctccgtccaaccaatttgtctagatagtttcactggtcctcgaagaagaaatcagatccacctgtttagcgagccccagtttcagggccattcccagagctttgaagagacaacatcccaaattgacgactctttctccaccaaatcctgtagagtttccgggggttcatgggtagtttacgacggagagaacttcactggtaaccagtatgtgttagaagaagggcattacccctgcctgtccgccatgggatgtcctccaggggctacatttaagtctctacgattcatagatgtagaattcagcgagcctaccattatcctcttcgaaagggaagatttcaaaggcaagaaaatcgaactgaatgctgagaccgttaatttgcgttcgctgggcttcaacacacagatccggtcagttcaggtgataggtggcatttgggtgacctacgagtacggatcttacagaggcagacagtttttgctctctccggccgaggtccccaattggtacgaattttcaggatgtagacaaatcggatctctccgtccatttgtgcagaagaggatttactttcgactgcggaataaagccacggggttgtttatgtcaaccaatgggaatcttgaggatctgaagctcctccgaatacaggtcatggaggatgtgggggccgatgaccagatctggatttaccaggagggatgtataaagtgccgcatcgccgaagattgttgcctgactattgtgggatcattggtaacctccggaagcaagttgggcctggcattggaccaaaatgctgactcacagttctggagccttaaaagcgacggccgtatctattccaagctgaaacctaaccttgttcttgacattaaagggggaacacagtatgatcagaaccacatcatcttaaacacagtcagtaaagagaagtttacgcaggtttgggaggctatggtattatacacatag

SEQ ID NO: 177574 - DNA, 951 bp, synthetic construct
  misc_feature 1..951: note = Description of Artificial Sequence: Synthetic coding sequence
  source 1..951: mol_type = other DNA
atgcagaagcccaagaccgtggcctgggagaacctgggccccgagatgtctgccctgggcaccgctttttcgcgcgaaggcggccggaaggtggaatttcctacagatcctaaggtggtggtgtacgagaagcctttcttcgagggaaagtgtgttgaacttgagacaggcatgtgctcctttgtgatggagggaggtgaaacggaagaggccacaggagacgaccacctgccttttacatcggtgggctccatgaaggtcctgcggggtatttgggtggcctatgagaagcctggcttcaccggacatcagtacctgctggaggagggcgagtatcgagattggaaagcttggggcggctataatggtgaactccagtcattacggccaatactaggcgacttctcaaatgcccacatgatcatgtatagtgaaaaaaattttggctccaaaggaagcagcattgacgtcttgggcatcgtagctaacctaaaggagacaggctacggcgtgaagacccaatccatcaatgtgttatccggcgtgtgggtggcttatgaaaaccccgactttactggagagcagtatatccttgacaagggcttttatacttctttcgaggactggggcggaaagaactgcaaaatctcatcggtacagccaatatgtctggactctttcactggtccaagaaggagaaaccagatacacttgttttccgaaccccagtttcaggggcacagccagagctttgaagagaccactagtcagatcgatgactccttctcgacaaagtcctgtagagtatcaggagggtcttgggtcgtttacgatggggagaatttcacaggaaatcagtatgttctggaagagggacactacccgtgtctttcagccatggggtgtccccccggagcaacattcaagtcacttagattcattgacgtctag

SEQ ID NO: 177575 - DNA, 1629 bp, synthetic construct
  misc_feature 1..1629: note = Description of Artificial Sequence: Synthetic coding sequence
  source 1..1629: mol_type = other DNA
atgcagaagcccaagaccgtggcctgggagaacctgggccccgagatgtcagcactcggcactgcattttctagggaaggcgggcggaaggtggagtttccaacggacccaaaggttgtagtgtatgagaagcccttcttcgaaggcaaatgcgtcgaattagagacaggcatgtgtagttttgttatggagggcggcgagaccgaggaggctacaggcgatgaccacttgccctttacatctgttggcagcatgaaagttctacggggaatctgggttgcatatgagaaacctggctttacagggcaccagtacctgcttgaggagggggagtatagggactggaaagcatgggggggatacaacggggaactccagtctcttagacctattctcggggacttcagcaacgcgcatatgatcatgtattccgagaagaattttggttccaaagggtcctcaatcgacgtgctgggcattgtcgccaatttgaaagaaactggctatggcgtaaagacccaatcaattaacgtcctttccggggtgtgggtagcgtatgagaatccagactttaccggtgaacaatacatactggacaagggcttctacacctcatttgaggattggggaggaaagaattgcaagatctccagcgtgcagcctatttgtttagacagctttaccggacctcgacggcgaaaccagatccacctattttccgaaccccagtttcagggtcacagccagtcttttgaagagacaacctcacagatcgacgactcattttctacaaagtcctgtcgagtgtccggcggaagctgggtggtctacgatggtgaaaattttaccggtaaccagtatgtgctggaggaaggccattatccctgccttagcgccatgggctgtcccccaggcgccacctttaagtctttgagatttatcgacgtggagttctccgagcctaccattattctcttcgaacgggaagacttcaaaggcaagaagatcgagctgaatgctgagaccgtaaacctcaggtctttggggttcaatacgcaaatccggagtgttcaggtaattggaggaatttgggtaacatacgaatacggttcctacagaggacggcagttcctgctcagtcccgctgaggtacctaactggtacgaattctccggctgtagacagattgggagcctgcgccccttcgtccagaaacgcatctatttccgactgcgaaataaagccacaggattatttatgagcaccaacgggaaccttgaagacctgaagttgttacgcatccaagtgatggaggatgtaggcgccgacgaccagatctggatttatcaagagggatgcattaaatgtcggattgccgaggattgctgcctcacgatcgtaggaagtctggtgacatcaggcagcaagttggggctggccttggatcagaacgcggattctcagttttggtctctaaagagtgatggtagaatctattctaagcttaaaccaaacctcgtgcttgacattaagggtggtacacagtacgaccagaatcacatcatcctaaataccgtttcaaaggaaaagttcacacaagtgtgggaagcaatggtgttgtatacctag

SEQ ID NO: 177576 - DNA, 504 bp, synthetic construct
  misc_feature 1..504: note = Description of Artificial Sequence: Synthetic coding sequence
  source 1..504: mol_type = other DNA
atggtggcccagcaggagagcatccgggagggcttccagaagcggtgtctgcccgtcatggtactaaaagcaaaaaagccctttaccttcgagacccaggaagggaagcaagaaatgtttcatgctaccgtagcaacggaaaaagagttcttttttgtgaaggtctttaatactctcctcaaggataaattcattcccaaaagaatcattatcatcgcgagatattatagacactctggctttctggaggtgaatagtgctagcagggttctggacgccgagagcgatcagaaggttaacgtccctctgaacatcataaggaaagccggagaaacacctaaaatcaacaccctgcagacacaacccctgggaacaattgtaaatgggcttttcgttgtccaaaaagtaacagagaaaaagaaaaacatcctgtttgacctcagcgataacactgggaaaatggaggtactgggggtgcgcaacgaggacacaatgaaatgttag

SEQ ID NO: 177577 - DNA, 1032 bp, synthetic construct
  misc_feature 1..1032: note = Description of Artificial Sequence: Synthetic coding sequence
  source 1..1032: mol_type = other DNA
atggagagcaagtacaaggagatcctgctgctgaccggcctggacaatattaccgatgaggagctggatcggtttaagttttttctgtccgatgagtttaacattgcaacgggcaagctgcacaccgccaataggatccaggttgcgactttgatgatccagaacgccggagccgtgtctgcagtcatgaaaacgatacggattttccagaagttgaactacatgctgctggctaaaagacttcaggaggagaaagagaaagtggataagcagtacaagtcagttacaaaaccaaagcccttgagtcaggcggagatgtcacccgcagcctcagcagccattaggaacgatgtcgcgaagcagcgcgccgctccgaaggtgagcccacatgtgaaacctgagcagaaacaaatggtggctcaacaggaatccatccgggaaggattccagaagcgttgcctgcctgtgatggtgctgaaagccaaaaagccgtttacattcgagactcaagagggtaagcaggaaatgtttcatgctacagtcgctacagagaaagagttcttttttgtgaaagtgttcaatactctgttgaaggacaaattcattcccaagcgtattatcatcatcgcacggtactatcgacattccggttttctcgaagtgaactctgcaagtagagtgctggacgccgagtccgaccagaaggtaaacgtgccgcttaacatcatccggaaggcaggggaaacccctaaaataaatactctgcagacacaaccgctcggcaccatcgttaacggccttttcgtcgtgcagaaggtgactgagaagaagaagaatattctctttgacctgtcggataacacagggaagatggaagtccttggtgtgagaaatgaggacactatgaagtgcaaggaaggggataaagttagactcactttcttcacactctctaagaacggcgagaaacttcaattgacaagtggggtccatagtaccattaaagtcattaaggcaaagaagaagacctag

SEQ ID NO: 177578 - DNA, 411 bp, synthetic construct
  misc_feature 1..411: note = Description of Artificial Sequence: Synthetic coding sequence
  source 1..411: mol_type = other DNA
atggagagcaagtacaaggagatcctgctgctgaccggcctggacaatataacagatgaggaacttgatcgtttcaagtttttcctatcagacgaattcaatatcgcgaccggcaaactgcacactgccaacaggatacaggtggctacattaatgatccagaacgcaggagcagtcagtgccgtgatgaagacaatccgcatctttcagaaacttaattacatgcttctggcgaaaaggttacaagaggagaaagagaaagtggataagcagtacaagtctgtgaccaaacctaagcccctgagccaagctgagatgtctccagcggctagcgccgccatcaggaacgacgttgcaaagcagagagccgcgcctaaagtcagtcctcacgtcaagccagagcagaaatag

SEQ ID NO: 177579 - DNA, 1800 bp, synthetic construct
  misc_feature 1..1800: note = Description of Artificial Sequence: Synthetic coding sequence
  source 1..1800: mol_type = other DNA
atgagcaaggaggagcggcccggccgggaggagatcctggagtgccaggttatgtgggagcccgattcaaagaagaacacacagatggataggttccgagcagctgtaggcgcggcttgcgggttagccctggagtcttacgacgacctgtatcattggagcgttgagagctacagcgacttctgggccgaattttggaaattcagtgggatcgtcttcagtcgggtgtacgacgaagtcgttgataccagtaagggcatagcagatgtgcccgagtggttcaaaggtagtaggctgaactacgccgagaatctgctgcgccataaggagaatgatcgcgtcgcactatacattgcacgtgagggcaaggaggagatcgtgaaggttaccttcgaggagttaagacaggaagtggccctgttcgccgccgctatgagaaaaatgggtgttaaaaaaggcgaccgagtggtggggtacctcccaaactccgaacacgccgtcgaagctatgttggccgccgcctcgattggggcgatttggagcagcacttcacccgactttggggtgaacggcgtactggatcgcttttcccagatccagcccaagctaatctttagcgtggaggcagtggtgtacaatggcaaggagcataatcatatggaaaagttgcagcaagtggtgaaagggctgcctgacctgaaaaaagtggtcgtgataccatacgttagctctagagaaaacattgatttgtcaaagatccctaattcagtctttctggacgatttcctggccactggaaccagcgaacaggcgcctcagcttgaattcgaacagctgccattctcccaccccctcttcattatgttttcatctggaacaacaggtgcaccgaagtgcatggtgcacagcgcgggcggcaccctgattcagcacctgaaggagcatttgcttcacgggaacatgacctctagtgacattctgttatgctacacaactgtcggctggatgatgtggaattggatggtgtccttgctcgcaactggcgccgccatggtgctgtacgacggaagtcctctcgtgcctactcccaacgtgctatgggatctggtggaccggatcggtattaccgttctggtcaccggtgccaaatggctctccgtcctggaagaaaaggctatgaagcctgtggagacacattccctgcagatgctgcacaccattctatccacagggtcgccgctcaaggcacagagctacgaatacgtttacagatgtatcaagagctccatactgctcggctccattagtggaggtactgacattatctcatgttttatgggacataattttagcctgcccgtctataaaggtgagatccaagctcgtaatctgggaatggccgtcgaagcgtggaatgaggagggtaaagctgtgtggggtgagtcaggcgagctggtctgcacgaaacccatcccttgccaacccactcatttctggaacgacgagaatggaaataaatacaggaaggcatatttttccaaatttcctggcatttgggcgcacggtgactactgtcggattaaccctaaaacgggcggcatcgtgatgctgggacggtcggacggaactctgaacccaaatggggtgcgcttcggatcttctgagatatataatattgtatacgctcagcggcaggaatctggcagttgccgccagacggaccatagatggaaaagcagaggtgcacgcaggtgtttcctggaaccaagggacccaggctccgtccctgggcacccttag

SEQ ID NO: 177580 - DNA, 2019 bp, synthetic construct
  misc_feature 1..2019: note = Description of Artificial Sequence: Synthetic coding sequence
  source 1..2019: mol_type = other DNA
atgagcaaggaggagcggcccggccgggaggagatcctggagtgccaggtgatgtgggaaccggacagcaagaaaaatacccagatggaccggtttagggctgccgtcggggcagcctgtggcctcgccctggagtcctacgacgatctctatcactggtcagtcgagagttacagtgatttctgggccgagttctggaagtttagtggtatagttttctcccgcgtttatgatgaagtggtagacacttcgaagggaatcgcggacgttccggagtggttcaagggctctagactgaattatgccgaaaatctgctgagacacaaggaaaatgacagagtggcactttatatcgcacgggaaggaaaggaggagattgtgaaggtcacttttgaagagcttcgccaggaggtggctctgtttgcagctgccatgcggaaaatgggagtcaaaaaaggtgatcgcgtggtggggtatctgcccaactctgagcacgccgtggaagcgatgctagcagcagccagcatcggagcgatatggagctcaacatcaccggactttggggtgaacggcgtgctggatagattcagtcaaatccagcccaagctcatcttctccgtggaggcagttgtctataatggaaaggagcacaaccacatggagaagctgcagcaggtagtaaaagggctacctgacctgaagaaagtggtggtcatcccatatgtttcaagtagggaaaacattgatttgtctaagatcccaaactcagtttttcttgacgattttctcgcaaccggaactagcgagcaggcaccccaactcgagttcgaacagctgccattcagccacccccttttcattatgttcagtagcgggaccactggcgctcccaaatgcatggtgcattcggccggcggcactttgatacagcatctgaaggaacacttgctgcatggcaacatgacaagcagcgacatccttttgtgctacaccacggtcgggtggatgatgtggaactggatggtgagtcttctcgccaccggcgcggctatggtcctctacgacggtagccctcttgttcccacgcctaatgtcttatgggacctggtggaccgaattggcattacagtcctggtgacaggtgcgaagtggttatcggtgttggaagaaaaggccatgaagcctgtcgaaacccactcccttcagatgctccacactattctgtcaactggaagtcccttaaaggcccagtcctacgagtatgtgtataggtgtataaagtcctctatcctccttggcagtatttccggcggtaccgatattatttcatgcttcatgggacacaacttttctcttcccgtatacaagggagagatacaagctagaaatctgggaatggctgttgaagcctggaacgaggaggggaaagcggtttggggggagtctggcgaacttgtgtgcacaaagccgatcccatgtcagccaacgcacttctggaatgacgaaaatggaaataaataccgcaaggcctatttcagtaagtttcccggaatctgggcccacggtgactattgccgtataaatcctaaaacgggaggtatcgtgatgttgggccgctccgatgggacccttaacccgaacggcgtgcggttcgggtcctccgagatatacaacatagtcgagagttttgaagaggtggaggactcactgtgcgtgcctcaatataacaaataccgcgaagagagggtcatcctcttcctcaaaatggcttcaggtcacgcttttcagcccgacctggtcaaacgcatacgcgacgcaattaggatgggactcagcgccaggcacgtaccttccctgattctggaaaccaagggtatcccatacactcttaacgggaagaaagttgaggttgctgtcaaacagataattgcaggaaaagccgtggagcagggaggggcattttccaatccagagaccctggacctatatcgagatatcccagaactgcaaggattttag

SEQ ID NO: 177581 - DNA, 762 bp, synthetic construct
  misc_feature 1..762: note = Description of Artificial Sequence: Synthetic coding sequence
  source 1..762: mol_type = other DNA
atgcggaagatgggcgtgaagaagggcgaccgggtggtgggctacttgcctaacagcgagcatgctgtggaggcaatgctggccgccgcctcaatcggcgcaatctggtcctcaacctcccccgactttggtgtgaatggcgttttggaccggttttctcaaatccagcctaagctgattttttctgtggaggccgtggtttacaacggcaaagaacacaaccacatggagaaattgcagcaagtggtgaaagggctacctgatcttaagaaagttgtggtgattccatacgtgtcctctcgcgagaacatcgatctgtccaagatcccaaatagcgtctttctggacgactttcttgcaaccggtacatctgagcaggccccccagcttgaatttgagcagctgcccttcagccacccactgtttatcatgttttccagcggaacgactggtgcacctaagtgcatggtacacagcgccggggggacactcattcagcacctgaaagagcacttgttacatggtaatatgacttcctctgacattttgttgtgctacaccacagtgggctggatgatgtggaactggatggtctcgctgctggcaaccggcgcggctatggtgctgtacgacggttcgcctctggtgcctacgcccaacgtcctttgggacttagtggaccgcatcggctacctggggtcctggaggctcctgcagaaccagcctcaggatcgcgggcacagacacgcctggccggaatag

SEQ ID NO: 177582 - DNA, 1845 bp, synthetic construct
  misc_feature 1..1845: note = Description of Artificial Sequence: Synthetic coding sequence
  source 1..1845: mol_type = other DNA
atgcggcccccccagtgcctgctgcacacccccagcctggccagccccctcctgctgctgctcctttggttactcggtggcggggtgggagctgagggcagggaggatgctgaactgttggtaactgtgcgcggcgggagattgaggggcatccggctgaagaccccgggtgggcccgtgtctgcctttctcggcattcctttcgctgagccgccaatgggtccccgcaggtttctgccacccgagccaaagcaaccatggagcggagtggtagacgccaccaccttccagtcagtttgctaccagtacgtggatactctttacccaggctttgagggtaccgaaatgtggaatcctaacagggagctgagcgaagactgcctttatctcaacgtctggacaccataccccagaccgacctcccccacgccagtccttgtttggatttacggcggcggattttacagcggggcctcatccctggacgtgtacgacggaaggtttttggtgcaagcagagagaaccgtgctcgtgagcatgaactaccgagtgggcgcctttggttttttggctctgcctggctcccgcgaggctcccgggaatgttggactcctggaccaaaggctcgcgctccagtgggttcaggaaaatgttgccgcgtttggtggagatccaacctctgtcaccttgtttggtgaatccgccggggctgcaagcgtgggaatgcatctgctgtcaccccctagccgcgggctttttcatcgtgctgtgctgcagtccggagcaccaaatgggccctgggctaccgtcgggatgggcgaagcacgccggagggcaacccagctggcccatttggtgggatgcccacccggaggaacaggtgggaatgataccgagctggtggcatgtctgcgcactcgaccggcccaagtgcttgtgaaccatgagtggcacgtcttgcctcaggagagcgtgtttaggttctcttttgtcccggtggtggacggggactttttatcagacaccccagaagcactgataaacgctggtgacttccacggactgcaggtgttggttggcgtggtgaaggatgaaggatcttacttcttggtgtatggagcccctgggttctctaaagataatgaaagcctgattagtagggccgaatttctcgcgggcgtacgcgtgggggtcccccaggtttctgatctcgctgcagaggcagtggtgttgcactatacggattggctccatccagaagaccccgctcgtctgagagaggctctctctgatgttgttggggaccacaatgtagtatgtcctgtggctcagctggccggccgactggccgcccagggtgctcgggtatacgcttacgtctttgaacaccgggcaagtaccttgtcctggcctctttggatgggcgttcctcatggctacgaaatcgagttcatctttggcattcctctggacccttccagaaactatacagccgaggagaagattttcgcacaaaggctgatgcgatactgggccaattttgctcgaacaggggatccgaacgagccccgcgaccctaaggccccccagtggcccccatacacagcgggggcacagcagtacgtctctctggacttacgtccattggaggtgagacgcggcctacgtgcacaggcctgcgctttctggaatcgattcctgcccaagctgctcagcgccacagatacactcgatgaagcagagagacaatggaaggctgaattccacaggtggtcatcttacatggtgcactggaagaatcagtttgaccactattccaagcaggatcggtgctctgacctctag

SEQ ID NO: 177583 - DNA, 1854 bp, synthetic construct
  misc_feature 1..1854: note = Description of Artificial Sequence: Synthetic coding sequence
  source 1..1854: mol_type = other DNA
atgcggcccccccagtgcctgctgcacacccccagcctggccagccccctgctcctcttgttgctctggctgttgggcggaggggtgggcgctgagggtagagaggatgcagagctcttggtgaccgtgcgaggcggcaggctgagaggcatccggttgaagacacctggcggaccagtcagcgcattcctgggaattcccttcgctgagccacccatgggcccaaggcgcttcctgccccccgaacccaaacagccttggagcggagtggtggacgctactacattccaaagtgtgtgttatcaatacgttgataccctgtaccccggattcgaaggcacagaaatgtggaacccaaatagggaactgtctgaggattgtctttatctgaatgtgtggaccccgtacccgaggcctacatctcccacaccagttctcgtgtggatctacggcggaggcttctactctggcgccagtagcctggacgtatacgacggccgtttcctggtgcaagcagagaggacagtcctcgtttccatgaattatcgagtgggcgcctttggctttctggcacttcctggctctagggaggcccccggaaacgtcggactgcttgaccagaggcttgccctgcaatgggtgcaggagaacgtggcagcgttcggcggggatccaacatctgtaactttgtttggagagtctgctggtgccgcctctgtgggcatgcacttactcagccctccgagtcgcggcctctttcaccgagctgtgctgcagtcaggagcgcccaacggcccatgggctacagtgggcatgggggaagcccggaggagggccacgcagcttgcccacttagttggctgtcctcccggggggaccggcggaaacgatactgaactcgtggcttgcctgcgtacacgtcctgctcaggttcttgtgaaccatgaatggcacgtgttgccacaggaaagcgtgtttaggttctcctttgttcccgttgtggatggcgacttccttagcgatactccggaagcactcatcaatgctggcgattttcacggcctgcaggtgttggtgggagttgtaaaggatgaggggtcatattttttagtttacggggctcctgggtttagtaaggacaacgagagtctgatctctcgcgcggagtttctggcaggggtccgagtcggcgtgccccaggtgtccgacctcgctgccgaggcagttgttctgcattatacagattggctgcacccagaagacccagcccggctgcgggaggccttgtccgacgtggtgggcgaccacaacgtggtgtgtcctgtggcacaactggctgggaggctggctgcccaaggcgcacgcgtttacgcctatgtatttgagcatcgcgcgagcaccctttcgtggccactgtggatgggtgttccacacggctacgaaatcgagtttatttttggaattcccctcgacccatctagaaattacactgctgaagaaaaaatctttgcacaacgcctgatgaggtactgggctaattttgcgaggacgggtgatcctaatgagcctcgggacccaaaagcaccccaatggcccccttatacggctggcgcacagcagtacgtaagtctggacctgcgccctctagaggtgcggagggggctccgggcccaggcgtgtgcattctggaaccgattcctgcccaagctgctaagcgctacggcttcggaagctccaagtacttgccccgggttcacccatggagaggccgcccccaggccagggttacctctgccactgcttctcctgcaccagctgctcctgttatttttatcccatctaagacgcctgtag

SEQ ID NO: 177584 - DNA, 1854 bp, synthetic construct
  misc_feature 1..1854: note = Description of Artificial Sequence: Synthetic coding sequence
  source 1..1854: mol_type = other DNA
atgcggcccccccagtgcctgctgcacacccccagcctggccagccccttgctcttactgctgctgtggttactaggagggggagtaggtgcagaaggccgcgaggacgccgaactgcttgttacagtaaggggcgggaggctgaggggtattagattgaaaacaccgggcggacctgtgtctgcgttcctgggcatcccctttgccgagccaccaatgggccctaggagatttctgcctccagagcccaagcagccctggagcggtgtggtggacgcaaccactttccagagcgtgtgttaccagtacgttgacactctatatcctggcttcgaggggactgaaatgtggaaccctaaccgggaattgtccgaggactgtctgtaccttaatgtgtggacaccatatccacgccctacctcgcccacacctgttttggtatggatctacggcggtgggttttatagtggcgctagctctctggatgtttacgacggcaggtttctggtgcaggctgaacgtaccgtgctcgtgtcaatgaactatagagtaggagcctttggcttcttagccctgcccgggtctagggaggcgccaggaaacgtgggactactggatcaacggcttgcattgcagtgggttcaggaaaatgtggcagcatttggcggagatcccacctcggtgacgctgttcggagaatctgctggagctgcctccgtgggcatgcatctgctgtcacctccctctaggggcctgttccacagggcggttctgcagtccggcgcccccaatggcccgtgggctactgtgggaatgggtgaggcccgccgcagagcaactcagctggcccatctggtaggatgcccccctggaggcaccggggggaatgataccgaattagttgcctgtttgcgaactcgaccagctcaggtcctggtgaatcatgaatggcatgttctgccccaggagtcagtttttaggttctcctttgtccctgtcgttgatggtgacttcctaagcgatacgcccgaggcactgattaacgccggggactttcatggccttcaggttctggtgggtgtggtgaaggacgaaggttcctatttcctcgtgtacggtgcacccggattctccaaagacaatgagagcttgatatcccgggcagaattcttggccggcgtgagagttggtgtccctcaagttagtgacctagccgctgaggctgtcgttctccactacactgactggctgcatccggaagatcctgcgcgcttaagagaagccctgtccgatgtcgtcggcgaccataacgtggtgtgtcctgtcgcccagttagccggcagattggccgctcagggcgcacgcgtgtatgcatacgtgttcgagcacagagctagtactctgagctggcccctttggatgggcgtgccccacgggtacgagattgagttcatctttgggattccattagatccttcccggaactataccgcagaagaaaagatctttgcacagcggctcatgagatattgggcaaattttgctcggacgggggaccccaatgagccgcgcgaccctaaggctccccagtggccaccatatactgctggggctcagcagtatgtgtctctggacttaagacctctggaagtcaggcgaggtcttagggcgcaagcttgcgccttctggaataggtttctgcccaaactcttatcggctacagcctccgaagcacccagtacttgcccaggatttacccacggggaggccgctcctcggccaggcctaccacttcccctcctcttactacaccagctgctgctgctttttctcagtcaccttcgacggctctag

SEQ ID NO: 177585 - DNA, 1845 bp, synthetic construct
  misc_feature 1..1845: note = Description of Artificial Sequence: Synthetic coding sequence
  source 1..1845: mol_type = other DNA
atgcggcccccccagtgcctgctgcacacccccagcctggccagccctctgctcttgttgctgctgtggcttctggggggaggcgtgggggcggagggacgcgaggatgccgagctgctcgtgacggtgcgtggcgggcggttgcgcggcataaggttgaaaacccccggaggtcccgtgtcagcttttttgggcataccttttgccgaacctccgatgggcccacgtcgatttctccccccagaaccaaagcagccctggagcggcgtcgtcgacgccactacattccagtctgtgtgttaccagtacgtggacacactctaccccggctttgaaggaactgagatgtggaatcccaatcgggagctttccgaggactgtctgtacctcaacgtgtggaccccatatccccggccgacgtcaccaacccctgttctggtgtggatttatggcggggggttttattcaggagccagtagtcttgacgtgtacgacggccggtttctagtgcaggctgaaagaaccgttctcgtgtctatgaactatagagtgggagcctttggcttcctcgcgttaccggggagtcgagaggcccctggcaacgtgggtctgctcgatcagagactggccctccagtgggtccaggagaacgtggcagccttcggtggggatccgacttcagtcacactgttcggcgaatcggctggagctgcaagcgtcggcatgcatttactttctccaccgtcaaggggtctattccatcgtgcagtattacagtccggagctccaaacgggccctgggctaccgtgggcatgggtgaagcacgaaggcgcgctacacagttagcacacttggtggggtgtccaccaggaggtaccggaggcaacgacacagaactggtggcctgtttgcgcactcggcccgcccaagtactggtgaatcatgaatggcatgtcctccctcaggaatctgtctttcgcttcagctttgttcccgttgtggatggcgactttctctctgatacccctgaggctctgattaatgccggcgactttcatggactccaggtcctggtgggagtggtcaaggacgagggatcctatttcttagtatatggcgcccctgggttctccaaagataatgaatctctgatatccagagctgagtttctggcaggcgtaagggtgggtgtgccacaggtgagcgatctggccgctgaagccgtagtcttgcactacacagactggctgcatcctgaagaccccgcccgcttacgtgaggccctgagcgatgttgtgggcgatcacaatgtagtgtgccccgttgcgcagttggccggccgccttgctgcccagggcgctcgcgtctatgcatatgttttcgaacacagggcaagtacccttagttggcccttgtggatgggcgtgccccacgggtacgagattgaattcatattcgggatcccactcgacccttcccggaactatacagccgaggagaaaatattcgcccagcgtctgatgcggtattgggcaaatttcgcgcgaaccggagacccaaacgaacctcgcgaccccaaggctccccagtggccgccttataccgccggcgcccagcagtatgtctcacttgacctcagacccctcgaggtaagacggggactccgcgctcaagcatgcgccttctggaatcggtttttgccgaaactgctctctgccaccgataccctggatgaggcagagcgtcagtggaaagccgagttccacagatggtcttcctacatggtgcattggaaaaaccagtttgaccactatagcaaacaggaccgatgctctgatctgtag

SEQ ID NO: 177586 - DNA, 1581 bp, synthetic construct
  misc_feature 1..1581: note = Description of Artificial Sequence: Synthetic coding sequence
  source 1..1581: mol_type = other DNA
atgcggcccccccagtgcctgctgcacacccccagcctggccagccccctacttctcctcctgttgtggctcctgggagggggtgtcggggctgaaggcagagaggatgctgaattgctggtgacggtccgaggtggccgtctgcgagggatccggcttaagacacccggcggccccgtaagtgcctttctcggcattccgttcgctgagccacctatggggccccggcgattcctgcctcctgaacccaaacagccttggagcggagttgtggatgctacaaccttccagtcggtctgctaccagtacgtcgatacactctatcctgggttcgaggggaccgaaatgtggaaccctaaccgagaactctccgaggattgcttgtaccttaacgtgtggactccctatccccgccccacctctccgacccctgtcctggtttggatctacggaggagggttttattcaggcgcaagctcgctggatgtttacgatggccgattcttggtccaggccgagagaactgttctagtgtccatgaactatagagttggagcattcgggttcctcgcccttcccggctctcgagaggcccccggaaatgtgggactcctggatcagaggctagcgttacagtgggtacaagaaaatgtcgcagccttcgggggggatccaacatcagtcaccctgttcggcgagtcagccggtgcagcatcagtcggcatgcatctgctttcccctccctcaagggggctttttcatcgagcagttcttcagtccggagcccctaatggcccatgggccaccgttggaatgggcgaggccaggcggagggccacccagctggctcacctggttggatgtccgcccggaggcaccgggggcaatgacactgagctcgtcgcatgtctccggactcggccggctcaggtgctcgtgaaccatgaatggcacgtgctgccacaggaaagcgtcttccgcttttcattcgtgcctgtggttgacggggattttctttccgatacccctgaagctctgatcaatgctggtgacttccatggactgcagctagcgggccgactggccgcccagggcgcgcgagtgtatgcctatgtcttcgagcatcgtgcctcgaccctgagttggcctctgtggatgggagtgccacatggctatgaaatagaattcatcttcggcatacctttagatccctctcgtaattacacagcagaagaaaagatttttgctcaacgactcatgcggtattgggcaaatttcgctcgaaccggtgatccaaacgagccccgcgaccctaaggctccacagtggcccccttataccgcaggagcccagcagtatgtatccttggatctgaggcctctggaggttcgtcgtgggctgcgcgcccaggcttgtgctttttggaaccgatttctccccaaacttctgtctgccaccgacacactggatgaggccgagcgtcaatggaaggcggagtttcaccgatggtcgagctacatggtccactggaaaaatcagtttgatcattattcaaagcaggaccggtgcagtgatctttag

SEQ ID NO: 177587 - DNA, 1806 bp, synthetic construct
  misc_feature 1..1806: note = Description of Artificial Sequence: Synthetic coding sequence
  source 1..1806: mol_type = other DNA
atgcggcccccccagtgcctgctgcacacccccagcctggccagccccctgctgctgctcctgctgtggctgctggggggcggcgtgggagccgagggtagagaggatgccgaacttctggttactgtgagaggaggaaggctgaggggcatacggctgaagacccctggtgggccagtctcagcattccttgggatcccgtttgcagaacctccaatgggacctcgccggtttctgccccccgaaccaaagcagccatggtcaggcgttgtggacgcgaccacattccagtccgtgtgctaccagtatgtagataccctgtacccagggtttgagggaactgagatgtggaacccaaacagggagttgtcagaggactgcctgtatctaaatgtgtggaccccctacccacgcccaacatcgccgacaccggtgctggtatggatctatggcggggggttttattcaggtgcgagtagtttggacgtgtacgacggcaggttcctggtgcaggccgaaaggaccgttttggtgtccatgaactaccgtgttggggcttttggctttttggccctccctggaagcagagaagcacccgggaatgtcggactgctggatcagcgtctcgccttgcagtgggttcaggaaaatgttgctgcttttggtggggaccctacaagtgtgactctcttcggcgaatctgctggtgctgcatcggtgggcatgcatctgctgagcccaccgtcgagagggctgttccacagggccgtgcttcagagtggcgccccaaatgggccctgggccacagtgggcatgggcgaggccagacggcgagctacgcagctggcgcaccttgttggatgtccgcctggcgggacgggaggaaacgacaccgagctggtggcatgtttgcgcactcgtccggcccaagtgctggtgaaccacgagtggcatgtcctacctcaggaaagcgttttcagattctccttcgtccctgtcgtggatggcgatttcctatccgacaccccagaggccttaatcaatgccggcgattttcacgggctgcaagttctggtgggcgtcgtgaaggacgaggggagctattttctggtgtacggcgcacccggcttctctaaagacaatgaatcactcatttctcgggcagagttcttagcaggagtacgggtgggtgtgccacaggtgtctgacctagcagctgaggccgtggttttgcactataccgactggcttcacccagaggacccagcacgcctccgggaagccctgtcagacgtcgtcggcgaccacaatgtggtgtgccccgtggcgcaactcgctggtcgcttggcggctcaaggggctcgggtgtacgcttacgtttttgaacacagggcttccacactttcatggccactgtggatgggagtgccgcacggctacgagatcgagttcatcttcggcatccccctggacccatctaggaattatacagccgaggagaagattttcgctcagaggctgatgaggtactgggcaaactttgctcgcacaggggaccccaatgaacctcgcgatcccaaagcccctcagtggccaccatacaccgctggggcgcagcaatatgtctctcttgacctgaggcccttagaggtgcgccgcggcttgagggcccaggcttgtgctttttggaatcgatttctgcccaaactcctgtcagccactggtatgcaaggacctgctgggtctggcagacgcggcgttggcgcccggtgcaatccaagtcttctccccctggctagtgaatag

SEQ ID NO: 177588 - DNA, 1845 bp, synthetic construct
  misc_feature 1..1845: note = Description of Artificial Sequence: Synthetic coding sequence
  source 1..1845: mol_type = other DNA
atgcggcccccccagtgcctgctgcacacccccagcctggccagcccacttttgctcctgctgctttggttgttgggtggtggtgtgggcgccgaggggcgcgaagatgccgagctgctggttaccgtccgtggaggccggctccgaggcatccggctgaagactcctgggggacccgtctccgcttttctcggcataccctttgccgagcccccaatgggacctcgacggtttctgcctcctgagccaaaacaaccttggagcggtgtggtagatgctacaaccttccagtccgtctgttaccaatacgtggataccctgtatcctggcttcgaggggacagagatgtggaatccaaacagagagctttctgaggactgcctgtacctgaacgtctggaccccttaccccagaccaacctctcctacccctgtgcttgtgtggatctatggaggcggattttattccggcgcttcctccttggatgtgtacgatggaaggtttttggtgcaagcggagagaacggtgcttgtgagcatgaattacagagtgggtgccttcggattcctggccctacccgggagtcgggaagccccagggaacgtggggttattggatcaacggctagcactccagtgggtgcaggaaaacgtggcagcatttggtggtgatcccactagcgtgacccttttcggcgaaagcgctggggctgctagtgttggcatgcacttgttgtcacctcccagtaggggtcttttccatagagctgtcctccagagcggtgcccccaatggtccctgggctaccgtgggcatgggcgaggccagaaggcgggcgacgcagttagcccacttggtcggctgccctcccggcgggactggggggaacgacactgagctggtggcgtgtctcagaactaggccagcccaggtgttggtgaaccatgagtggcacgtattgccccaagaatccgtattccgcttttcctttgtccccgtcgtcgatggtgatttcttaagtgacacaccagaagcactaattaatgctggtgattttcacggcctgcaggtgttggtcggtgtggtgaaggatgagggtagctattttctggtgtacggcgctcccgggttttccaaggataatgaatccttaataagtcgcgcggagttcctggccggcgtccgagttggggtcccgcaggtttcagatttagctgcagaagctgtagtgcttcactacaccgactggctgcaccctgaggatccagcacgcttacgggaggccttgagtgatgtggttggtgaccacaacgtggtctgccctgttgcgcaactcgccgggcggctcgccgcccagggggcacgggtttatgcctacgtgtttgagcaccgggccagcactctctcctggcccctttggatgggggtgcctcatggatatgagatagagtttatattcgggatacctctggatccaagcagaaattacaccgctgaggaaaaaatctttgcccaaaggctaatgcgctactgggctaattttgcacgaaccggggaccctaacgaacccagagaccctaaagccccccagtggcctccttacaccgcgggagctcaacaatatgtgtcacttgacttgcgaccgcttgaagtcagacggggtctcagagcacaggcttgtgcattttggaatcgctttctgcccaaacttctgagcgcaaccgacacattagatgaagccgagaggcaatggaaagccgagtttcacaggtggtcgagctacatggtccattggaagaatcagttcgatcactacagcaaacaggatagatgtagcgacctgtag

SEQ ID NO: 177589 - DNA, 480 bp, synthetic construct
  misc_feature 1..480: note = Description of Artificial Sequence: Synthetic coding sequence
  source 1..480: mol_type = other DNA
atgcggcccccccagtgcctgctgcacacccccagcctggccagccctctgctgctcctcctgttatggttacttgggggcggagtcggtgccgagggccgtgaggatgcagaattgctcgtgacagtaaggggtggccggctgcgcggaatacggctgaagaccccaggagggcccgtgtcagcttttcttggcattcccttcgcagagcctcctatggggcccaggcgattcctgcccccagagcctaaacagccttggagcggagtggtggacgcaaccactttccagtctgtttgctaccagtatgtggacactctgtatcccggcttcgaaggtaccgagatgtggaatcctaatcgcgagctctctgaagactgtctgtatctcaacgtctggacgccctatcccaggcccacctcccccacccctgtgctagtgtggatttacggaggggggttttacagcggggcctcgtag

SEQ ID NO: 177590 - DNA, 87 bp, synthetic construct
  misc_feature 1..87: note = Description of Artificial Sequence: Synthetic coding sequence
  source 1..87: mol_type = other DNA
atgcggcccccccagtgcctgctgcacacccccagcctggccagcccactgttactactacttctctggttactcgggggcggttag

SEQ ID NO: 177591 - DNA, 282 bp, synthetic construct
  misc_feature 1..282: note = Description of Artificial Sequence: Synthetic coding sequence
  source 1..282: mol_type = other DNA
atgctgggcctggtgatgagctgccccgaccggaccctggtgaccaaagtgcggagccacccctccggtaatcagcaccggccgactagaggaggctctcgaagcttccactgtagacgaggggtgccacgcccagctgcactgcgtgtattgccccgatgtcccgccttctccgatgccgcttgccccgcggctatgcgacccccccaatgcctcctgcacacaccaagcctggcttcacccttgttactgctcctgctatggctcctcggtggcgggtag

SEQ ID NO: 177592 - DNA, 1284 bp, synthetic construct
  misc_feature 1..1284: note = Description of Artificial Sequence: Synthetic coding sequence
  source 1..1284: mol_type = other DNA
atggccgtgctggccgccctgctgcggagcggcgcccggagccggagcccactgctccgcaggctggtccaggagatcagatacgtcgagaggtcttacgtgtcaaaaccgacacttaaggaggttgtcatcgtgtcggcaacccgaacgcctattggatccttcttgggatccctaagtctgcttccagcgactaaacttgggagcatcgctattcaaggcgccattgagaaggccggcatccctaaagaagaagtgaaggaagcttacatgggaaatgtgctacagggtggcgaaggccaggcccctaccaggcaggctgtgctgggcgcaggactccccattagcactccgtgtacgaccatcaataaggtgtgtgcgagcgggatgaaagccatcatgatggcatcccagtctctgatgtgcggacatcaagatgtgatggtcgcaggtggtatggagtccatgtctaacgtgccctatgtgatgaaccggggctccacgccgtatggcggagtaaaattggaggacctcattgtcaaagatggcctgaccgacgtctacaacaaaatacatatggggtcatgtgccgagaacaccgccaagaaactcaatatcgctaggaacgaacaggatgcctatgccattaatagctatacacgctccaaagcagcatgggaggccgggaagtttgggaatgaagtgatccctgtaaccgtgactgtgaaaggacagcctgatgtagtggtgaaagaggatgaagagtacaagagagtcgattttagtaaagttccgaaactgaagacagtctttcagaaggagaatggaaccgttactgcagcaaacgccagtacattaaatgacggagcagccgctctcgttctcatgactgccgacgccgccaagcggctaaacgtcacacccctggctcgcattgtcgcattcgcagatgctgcagttgagcccatcgactttcccatagcaccagtctatgctgcctccatggttttgaaggatgtcggcctgaaaaaggaagacattgctatgtgggaagttaatgaagcattcagcttagtggtgctcgcgaacataaaaatgttagagatagacccacagaaagtgaacatcaatggcggggccgtgtctctcgggcatccaattggtatgagcggggccagaattgtgggccatctgacccacgctctcaaacagggggaatatgggttggcctctatttgtaacggcggcggtggggccagcgcaatgcttatacaaaaactatag

SEQ ID NO: 177593 - DNA, 1194 bp, synthetic construct
  misc_feature 1..1194: note = Description of Artificial Sequence: Synthetic coding sequence
  source 1..1194: mol_type = other DNA
atgaacgccggcagcgaccccgtggtgatcgtgagcgccgcccggaccataattggcagctttaacggcgccctggctgctgtgcccgtgcaagatcttggaagtacagtgatcaaggaagtgttaaaacgggctacagtcgcacctgaggatgtgagcgaagtcatattcggccacgtgcttgcggctggctgtgggcagaatcctgtgaggcaagcctcagttggcgcaggcatcccttattctgttcctgcctggagctgccaaatgatatgtggcagcggcctcaaggctgtgtgcttggctgtgcagagcataggcatcggggactcttcaattgtggtggcgggaggtatggagaacatgagcaaggccccccacctagcctacctgagaaccggcgtgaagatcggcgaaatgccacttacagattccatcctttgcgacggcctgactgacgccttccacaactgtcatatgggcatcaccgccgagaacgtagcaaagaaatggcaagtgagtcgcgaggaccaagataaggtggcagttctgtctcagaaccgaacagagaacgcccaaaaagccggtcatttcgataaggagatcgtgcccgtcctggtgtcaactagaaaaggcttaatcgaggtcaaaacggatgagtttcctcgccatggcagtaatatcgaggcaatgtcgaagttaaagccatattttctgacagacgggaccggcaccgtgacgcccgcgaacgctagcggcatcaacgatggcgcggccgcggtggtgctcatgaagaaatctgaggctgataagcgcggtctgacaccactggcgaggattgtgtcatggtcccaggtcggagtggaaccttcaatcatgggtataggccctataccggccattaagcaagccgtaaccaaggcaggctggtcccttgaggacgtggatatttttgaaatcaatgaagcattcgccgctgtgtcagccgcaattgttaaggaactggggctgaatcccgaaaaggtaaacattgaaggaggcgcgatcgcgcttggacaccctttgggcgccagcggatgccgaatcctcgtgacacttctgcacactctggaacgtatgggccggtctaggggagtggcggccctctgcatcggcggcggcatgggtatcgctatgtgcgtccagcgagagtag

SEQ ID NO: 177594 - DNA, 1281 bp, synthetic construct
  misc_feature 1..1281: note = Description of Artificial Sequence: Synthetic coding sequence
  source 1..1281: mol_type = other DNA
atgggcagccaccccgtgctgcggatctggggcaaccggcgggccacggcggcctctctcggccggagtggcggtagactatcaagccctaggttgcttcgggtggtggcccccaccttgacattcgctcaaacgagcaggtgctcctttaacggtgcactggccgctgtccccgtgcaggatctcgggtctacagtgataaaggaggtgctaaagcgggcgaccgtggccccagaagatgtgtctgaggtgatctttggacacgtactggccgccgggtgcggacagaatccagtgaggcaagcgtcagttggggccggtattccatactccgtccccgcctggtcatgtcaaatgatttgcgggagcggcctcaaagctgtatgcctggcagtccagagtatcggcatcggcgactcttctatcgtagtcgcgggaggcatggagaacatgtcaaaggcaccacatctggcatatctgcggacaggggtcaagatcggggagatgccgttgactgactcgatcctctgtgatgggttgaccgatgcctttcataattgccacatgggaataacagccgagaacgtggccaagaagtggcaagtcagtcgggaagatcaagacaaagtcgcagtcctctctcagaatcgcacagagaatgcacaaaaagctgggcattttgataaggaaatagtgcccgtcctcgttagcacccgcaaagggttgattgaggttaagaccgacgaattcccacgccatgggtctaatatcgaggcgatgtccaaacttaagccctactttttaaccgacggcacaggaactgttacccccgcaaatgctagtggtattaacgacggagcagccgctgtagttctcatgaaaaaatcagaagctgacaagcgcgggctgactcctctggcgcgtatcgtgtcatggtctcaggtgggagtcgagccttcgattatgggtatcggaccaattccagctatcaaacaggcagttacgaaagctggatggtctctcgaggatgtggatatcttcgagatcaatgaggccttcgctgccgtgagtgcggccattgtgaaagagttggggctcaatcctgaaaaggtgaatatagaggggggtgcgatcgcgctgggccacccactgggtgcgtctgggtgccggattctcgtgacgctcctgcacacacttgagaggatgggcaggagcagaggggtcgccgccctctgcatcggaggcgggatgggcatcgctatgtgcgtgcaaagggagtag

SEQ ID NO: 177595 - DNA, 1275 bp, synthetic construct
  misc_feature 1..1275: note = Description of Artificial Sequence: Synthetic coding sequence
  source 1..1275: mol_type = other DNA
atgcagcggctgcaggtggtgctgggccacctgcggggccccgccgactccgggtggatgccgcaggcggcgccgtgtctgagtggcgctccacaagccagcgcagctgacgtggtggtggtacatggccgccggacggccatatgcagagccgggagagggggatttaaggatacgacgcctgatgagctcctctctgccgtgatgacagccgtgctgaaggacgtaaatctccggcctgagcaactaggcgacatctgcgtcggcaacgtacttcagccaggagcaggagccattatggccagaatcgcccagtttttgagtgatattccggagacagttcccctgtctacagtaaatcggcagtgcagctcaggtctgcaagcggtagcctccatcgccggaggcatccgtaatggctcttacgatatagggatggcatgcggggttgagtccatgtcgctcgcagacagagggaacccaggaaacattaccagtcggttgatggagaaagaaaaagctcgtgactgcctcatcccgatgggaatcacaagcgaaaatgtggccgagcgattcggaatctcccgagaaaagcaggacacttttgccctggctagccagcaaaaagcggcccgggctcagtccaaggggtgctttcaagctgaaatcgtgcccgtaacgactactgtgcacgacgacaaaggcaccaagcgatcaatcactgtgacacaggacgagggtattaggccctctactacaatggaagggttggctaaactgaaacctgcgtttaagaaagacggaagtactaccgcaggcaactccagccaggtctccgacggggccgcagctatcctcctcgctaggcgctcaaaggccgaagagctggggctgcccatattaggggttctgcgttcctatgcggtggttggcgttccccccgacattatggggatcgggcctgcttacgcgatcccagttgctcttcagaaggcgggcctgacagtcagtgatgtggatatcttcgagattaacgaagccttcgcctcacaggcagcgtattgcgtggaaaaattgcgactgccaccggagaaggtgaaccctctgggaggagctgtcgccttgggtcatccattgggctgtacaggagccaggcaggtgattacacttctcaacgaacttaaaagacggggcaaacgggcctacggagtggtgtctatgtgtattggcaccggcatgggtgccgctgctgtgttcgagtacccaggtaactag

SEQ ID NO: 177596 - DNA, 1071 bp, synthetic construct
  misc_feature 1..1071: note = Description of Artificial Sequence: Synthetic coding sequence
  source 1..1071: mol_type = other DNA
atgaccgccgtgctgaaggacgtgaacctgcggcccgagcagctgggcgacatatgtgtgggcaacgtgctgcagcccggcgccggtgctattatggcgagaatagctcagtttctaagtgacatccctgaaacggtccctttgtcaactgttaacaggcagtgctcaagcggattgcaggcggtggctagcatcgccggcggaattcgaaatgggtcttatgacatcggcatggcgtgcggagtagagtccatgtccttagctgatcgaggaaacccggggaacattacctcccggctgatggagaaagaaaaggcacgggattgtttgatacccatgggaattaccagtgagaatgtcgccgaaagatttggcatcagtagggagaagcaggacaccttcgcactggcatcacagcagaaagccgcaagggcccagtcaaaaggttgctttcaggcagagattgtgcccgtgaccacaaccgtgcacgatgacaagggcaccaagaggtcaattacggtgacccaggacgaaggaattagaccctccactacaatggagggcctcgcgaaattgaagcccgctttcaagaaggacgggtcgaccactgctgggaattccagccaggtgtcagacggagctgcagctattttactagctagaaggtccaaagcggaagaattggggttaccgatcctgggtgtgcttagatcctacgcggtggtgggggtgccaccagatatcatggggatagggcctgcatacgctatccccgttgctttgcaaaaagcaggattaactgtttcagacgttgacatctttgaaatcaatgaggcattcgcctcccaggctgcctactgtgttgagaaattgcgcctgcctcccgaaaaggtaaatccccttgggggagctgtggccctgggacatcctctcgggtgcacgggcgctagacaagtaataacactgcttaatgaactgaagagaaggggtaagcgagcctatggagtggtcagtatgtgtattggcactggaatgggcgccgcagcagtttttgaatatcccggtaactag

SEQ ID NO: 177597 - DNA, 462 bp, synthetic construct
  misc_feature 1..462: note = Description of Artificial Sequence: Synthetic coding sequence
  source 1..462: mol_type = other DNA
atgcagcggctgcaggtggtgctgggccacctgcggggccccgccgacagcgggtggatgccgcaggccgccccatgtttatcaggtgccccgcaagctagcgctgccgacgtggtggtcgtccatggcagaaggactgcgatttgccgcgccggtaggggaggttttaaggataccacccccgacgagctcctgtccgccgtcatgacagcggttctcaaagatgtgaacctgcgcccagagcagctcggcgacatctgcgttggtaacgtgctacaaccaggagccggcgcaatcatggctagaatcgctcagtttctgtctgatatacctgagactgtccccctgagcactgttaataggcaatgtagctctggcctgcaggccgttgcctccatagcagggtggtccccttgtccctggctgaccgagggtacactcgaaatacttctaagggcctag

SEQ ID NO: 177598 - DNA, 381 bp, synthetic construct
  misc_feature 1..381: note = Description of Artificial Sequence: Synthetic coding sequence
  source 1..381: mol_type = other DNA
atgagcctggccgaccggggcaaccccggcaacatcaccagccggctgatggaaaaggagaaagctagagactgcctaatacctatgggaattactagcgagaacgtagctgagaggttcggcatctctagggagaaacaggatacatttgccctggcctcgcagcagaaggctgccagggcacagtcaaaagggtgtttccaagccgaaatcgtgccggtgactacaaccgtgcatgatgacaagggtacgaagcgttctatcaccgtgactcaagacgaggggattaggcccagtactaccatggaaggactggctaaactgaagccagcatttaagaaagacggctcaaccactgctggtgaaaccgggcctggttag

SEQ ID NO: 177599 - DNA, 996 bp, synthetic construct
  misc_feature 1..996: note = Description of Artificial Sequence: Synthetic coding sequence
  source 1..996: mol_type = other DNA
atgcagcggctgcaggtggtgctgggccacctgcggggccccgccgactcaggttggatgccccaggccgccccatgcctttcaggcgcgcctcaggcgagcgctgctgatgtcgtggtggttcacggaaggaggaccgccatttgccgcgcaggacgcggaggttttaaggatacaacaccagacgagctgctgtccgcagttatgacagcagtcctcaaggatgtgaacctgagacccgagcagctaggagacatatgcgtagggaatgtgctccagccaggcgcaggggctataatggcccgtattgcccagtttctttccgacatcccggagaccgtccccctgtccacagtgaaccgccagtgcagttctggactgcaggccgtggcttccatcgctggtggaataagaaacggttcctacgacatcggtatggcttgcggaatcaccagtgagaacgtggccgaacggtttggcataagcagagagaagcaggacacctttgcacttgcatctcagcaaaaagccgcacgtgcccagagtaagggctgcttccaggctgagatcgtccctgtcacgactactgtgcatgacgataaagggaccaaaagatccataacggttacacaggacgagggaatccggccgtctaccaccatggagggcctggccaagctgaagccggcgtttaaaaaagatggcagcactacagccggacttactgtcagtgatgtcgatatctttgagatcaacgaggcatttgcctcccaggccgcttattgcgtggagaagttaagactgcctccagaaaaggttaaccccctgggaggcgctgtcgcactgggccaccctctgggctgcaccggagcccgccaggtgataacactgttaaacgaactaaagcgccgtgggaagcgggcatacggagtggtcagcatgtgcataggcacgggaatgggcgccgccgccgtcttcgagtacccgggaaactag

SEQ ID NO: 177600 - DNA, 7377 bp, synthetic construct
  misc_feature 1..7377: note = Description of Artificial Sequence: Synthetic coding sequence
  source 1..7377: mol_type = other DNA
atggtgctgctgctgtgcctgagctgcctgatcttcagctgcctgacttttagttggctgaagatctggggaaaaatgacagactccaagcccatcactaaatctaagtcagaagccaatctaataccctctcaagagccatttcccgcgtcagacaactccggagaaactccccagcggaacggagaagggcatacccttccaaagaccccatcccaagcagaaccagccagccacaaagggcccaaggacgctggaagacggcgaaactctctgccccctagccatcagaagccccctcgaaatccccttagcagttccgatgcagctccatcccctgaacttcaggctaacggcacaggaactcagggtttagaggcaactgatactaacgggctgtcttccagtgctcgcccgcaggggcagcaggccgggagtccttcaaaggaagacaagaaacaggcgaacatcaaacgtcaactaatgacaaactttatcctgggctcctttgacgattactctagtgatgaggattcggttgcgggcagctcgagggaatccactaggaagggctcccgtgcaagccttggagctttatccctcgaagcgtacctgaccacgggggaggctgagacacgggtaccgacaatgcgaccctccatgtctggactgcacctcgttaagcggggacgggaacacaagaagctggacttacatagagacttcaccgtagcctccccagccgaattcgtgactcgttttgggggggatcgcgtaatcgagaaggttctgattgctaacaatgggatcgctgccgttaaatgcatgaggtcaattaggcgctgggcatacgagatgtttcgaaatgaaagagccatcagatttgtcgttatggtcacacccgaagatttaaaggccaacgcagagtacatcaaaatggccgaccactacgtacctgtgccgggtggacctaacaacaacaattatgccaacgtggagctcattgtcgacatcgctaaacgaattccggtgcaggccgtttgggccgggtggggacatgcctctgagaatcctaagctgcctgaactgctgtgcaaaaacggtgtcgcatttcttggtcccccctcagaagccatgtgggctctgggcgacaagatcgcgagtacagtagtagcccagacgctgcaagtgcctactcttccatggtcaggctccggactgacagttgaatggaccgaagatgacctgcaacagggaaagcggatctccgtgccagaggacgtgtacgacaagggatgcgtcaaagatgtcgatgagggtttggaagctgccgagcgaatcggctttccattgatgatcaaggcgtccgagggcgggggaggcaaagggattagaaaggctgaatcagcagaggacttccccatcttgttcaggcaagtccagagcgagatcccgggtagccccatcttcctcatgaaacttgcccagcacgcccgtcacttggaggtgcaaattttggctgatcagtacggtaatgcagtgtccctcttcggtagagactgtagtatccagagacgtcatcagaaaatcgtggaggaggcccctgccacaattgccccactcgctatcttcgaatttatggagcaatgcgctatacgactggccaaaactgtcgggtacgtgtcagccggaacagtggagtatctgtacagccaagacggcagtttccatttccttgagcttaaccctaggctgcaggtggaacacccatgcaccgagatgatcgcggacgtgaatctaccagccgctcaacttcagattgcaatgggggtaccactgcacagacttaaagacatcagacttttgtacggagaatcaccgtggggcgtgactccaatcagtttcgagaccccctccaaccctcccctggccaggggtcatgttatcgccgctaggatcacctcagagaatcccgatgagggtttcaagccctcctccggtaccgtccaagagctgaatttccgctcttctaaaaatgtctggggatattttagcgtagccgcaaccggtggcctgcacgagtttgccgattctcaattcggtcattgcttttcgtggggggagaatcgcgaggaggctatctccaacatggtggtggccctgaaagagcttagcatccgcggcgactttcgcacaactgtggagtatctgattaatctgctggagaccgaatcctttcagaacaatgacatcgataccggctggctggattatctaattgctgaaaaggtgcaagccgagaagccagacattatgctgggtgtggtgtgtggcgccctgaacgttgctgacgcgatgttcagaacatgcatgaccgatttcttacactcgttagagcggggacaagtattgcctgcggacagcctattaaatctcgtggacgtcgagctgatctatgggggagtaaagtatatactaaaagtggcgcgccaaagtctcacaatgtttgttctcatcatgaatggctgtcacatagagatcgacgcacatagactgaatgatgggggacttcttctgagctacaacggaaactcatacacaacttacatgaaggaagaagttgacagttatcgaattaccattggcaataagacctgcgtatttgaaaaggaaaacgaccccacagtccttagatctccgtccgccggcaaacttacgcagtatactgtggaagacggcggacacgtggaggcagggagcagctacgccgagatggaagtgatgaagatgattatgaccctcaacgtccaggagagaggtagagttaaatacatcaaacgcccaggtgccgtgttggaggctgggtgcgttgtagcaaggctcgaattggacgacccaagcaaagtgcatccagccgaaccatttaccggagagctgcctgcgcagcagacacttcccatcctgggggaaaagctccaccaggtgtttcacagtgtcctggaaaacctgaccaatgtgatgtcaggcttctgcctccctgagccggtattctcgattaaactcaaagaatgggtgcagaagttgatgatgaccctccgacatccttcgttgcccttgctagagctgcaggaaatcatgaccagtgtggccggacgaattcctgctcctgtcgagaagtcagtgagacgggtgatggctcagtatgcgagcaatattacaagcgtcttgtgccagttccctagccaacaaatcgccactatactggattgccatgctgctacgcttcaacggaaggctgaccgcgaggtctttttcataaacacccaaagcattgtccagttagtgcagagatacaggagtggcattcgggggtacatgaagacagtagtgttggacctcctgaggcgctacttacgagtggagcaccactttcaacaagcccactatgacaaatgtgtgatcaatctgcgggaacagttcaagcccgacatgtctcaggtactggattgcattttcagccacgcgcaagtcgctaaaaagaatcagttggttatcatgctgatcgatgaactttgcggacccgacccctcactctccgatgaattgatttccattctcaatgagctgacccagctcagcaaatccgagcactgtaaggtagcattgagggctaggcagattctgattgcaagccacctcccctcttacgaactgagacacaatcaggtcgagtcaatcttcctcagcgccattgacatgtatggacaccagttctgcccggagaacctgaagaaactgattctgtccgagacgacaatcttcgatgtactgcccaccttcttttatcatgccaacaaggtagtgtgcatggcatcactggaagtgtacgtacggcgcggctatattgcttatgagctgaatagtttgcagcaccgacagctccctgacgggacgtgcgtagtggaatttcagttcatgctgccttcatctcaccctaataggatgaccgtccccatcagcatcactaaccctgacctgctcagacatagcacagaactctttatggacagtggcttctctccactgtgccagaggatgggagctatggtagccttcagacggttcgaagacttcacacggaactttgacgaggtgatttcgtgctttgctaacgtgccgaaggacacccccttattttcagaggcaaggacctccctttacagcgaggatgattgcaaatcactccgcgaagagccgatccatatattgaatgtgtccattcagtgtgcagaccacctggaagacgaggcgctcgtgccaatcctgcgtacttttgtgcaatcaaaaaaaaatattctggtcgattacggactccggaggatcacgtttttgatcgcccaggaaaaggagttcccaaaattttttacctttagggcccgcgatgagtttgccgaagacagaatctataggcacctggaacccgcgcttgcatttcagctcgaacttaacagaatgagaaatttcgacctgaccgcggtgccgtgtgcaaatcacaagatgcacctgtacttgggagcagcaaaagtgaaagagggcgtggaagtaaccgaccatcggttcttcattcgggccatcattcgccatagtgacctcatcacgaaagaggcaagcttcgagtaccttcaaaatgagggagaaagactgttactggaggcaatggacgaactggaagttgcattcaacaacacttcagttcggacggattgtaaccacattttcctcaatttcgtgccaacagtgatcatggaccctttcaagatcgaggagagtgtacgctacatggtgatgcggtatggtagccggttgtggaagctgagagttctccaggccgaggtgaaaatcaatatcagacaaactacaactggctcagcggtccccataagactctttataactaatgagtctggatactacctggatatcagcttgtacaaagaggtgacagatagtagatccggaaatattatgtttcactcttttggaaataagcagggaccacagcatggtatgcttattaatactccctacgtaacaaaagatttgttacaagccaagcgcttccaggctcagactttaggaacaacatacatctacgattttcctgagatgttcagacaggcattgttcaaattgtggggctcccctgacaagtatcctaaagacatactgacatacaccgaactggtgctagactctcagggccagttggtcgagatgaatcgcctgccagggggtaacgaggtgggcatggtggcctttaaaatgaggtttaagactcaggagtacccagaaggccgtgatgtaattgtcataggtaacgatatcacatttaggataggatcatttgggcccggggaggatctgttgtacctgagggcttcagagatggcgcgggctgagggaatcccgaagatttatgtcgccgctaattcgggcgcaaggatcggaatggcggaggagatcaaacacatgttccacgtcgcctgggtcgacccagaagacccgcacaagggttttaaatacctatatctgacgccacaggactatacaaggatctcgtctctgaattcggtgcattgcaagcatatcgaggagggaggtgagtcacgctacatgatcactgatatcattggcaaggatgatgggttaggggtggagaacctgagaggcagcgggatgattgcaggagagtcgtcactggcttatgaggaaatagtgacaatctctttagtcacctgccgcgccatcggcataggtgcttatcttgtaaggctgggccagcgcgtaattcaggtagaaaatagtcatatcattttgactggtgcctctgcgctgaacaaggtgctggggagggaggtctacacgtcaaacaatcagcttgggggagttcagatcatgcattataatggggtgtctcacattacagtgccggacgattttgagggagtatacaccatcctggaatggttatcctatatgcccaaagacaaccattctccagtgcctattattacccctactgatcctattgacagagaaattgagtttctcccaagtagagccccctacgaccctaggtggatgctggccggcaggccacatcccacactgaagggaacttggcagtccggttttttcgaccacggcagttttaaagaaatcatggccccgtgggcacaaacagtcgttactggccgggcccgcctgggcggcattcctgtcggggttattgctgtagaaacaagaacagtggaggtggcggtccctgcagatccagctaacttggattcggaggcaaagatcattcagcaggccggacaggtctggtttcctgactcagcatacaagacggcccaggctgttaaggacttcaaccgggagaagcttccactgatgatattcgcgaattggagagggttctccggaggcatgaaggatatgtatgaccaggtcctgaagttcggcgcttacattgtggacggcctgaggcagtacaaacagcctatcttaatttacatacccccctacgctgagcttcgggggggtagctgggtggtgatagatgctaccatcaaccccctatgtatcgagatgtacgcagataaagagagtcgaggtggtgtgttagaaccagagggtaccgtggaaattaagttcagaaagaaagacctgatcaaatccatgcgcaggattgatccagcatataagaaactcatggaacagctcggtgaaccggacctctcggataaagaccggaaggatctggaagggcggctgaaagcacgtgaggatctgttgttgccaatctatcaccaagtggccgttcagttcgccgacttccacgatacgcctggcaggatgcttgagaaaggcgttattagtgacattctcgaatggaagacagcacgcacattcctgtactggcgactgcgcagactcctgttggaagatcaggtgaagcaagagatcctgcaggcctccggagaactttcacacgtccacattcagtcaatgcttaggcgatggtttgtggagacagaaggagcggttaaagcctacctctgggataataaccaagtcgtcgtacagtggctcgaacaacactggcaggccggtgacgggccgcgcagtacaatccgcgagaatattacatatctgaagcatgattccgtactgaaaacaatccgcggcttggtggaagagaatcccgaggtagctgtagattgcgtgatttatctctcacagcatatttccccggccgagcgcgctcaggtggtgcacctgttgtccaccatggattctcccgccagcacatag

SEQ ID NO: 177601 - DNA, 7377 bp, synthetic construct
  misc_feature 1..7377: note = Description of Artificial Sequence: Synthetic coding sequence
  source 1..7377: mol_type = other DNA
atggtgctgctgctgtgcctgagctgcctgatcttcagctgcctgactttctcctggctgaaaatctggggaaagatgaccgactccaaaccaatcacaaagtcaaagagtgaagcgaacctgatcccaagccaggagccctttccagcatccgataattccggagagaccccccagcgtaatggcgagggtcacactctgcccaagaccccaagccaggctgaacccgcttcacataagggacccaaagacgccggccgcagacgcaactccctgcccccgtcccaccagaaacccccccggaaccccctgtcatcttcagatgccgccccctcccccgaactgcaggcgaatggcaccggaacccagggcttggaggcaactgataccaacggactgtcctcatcggctcgcccccagggccaacaggcaggatctccgagcaaggaggataaaaaacaggcaaatattaaacgccagctgatgactaattttatcctgggtagctttgacgattattcgtccgatgaggatagcgtggccggatctagcagggagtcaacaaggaaaggctctagagctagcctgggagctctcagtctggaggcatacttgactacaggagaggctgagacccgcgtgcccaccatgcgaccatcgatgtcgggattgcacctcgtgaagagaggaagggagcataagaagcttgatctgcaccgagatttcacagtcgcatcgcctgccgagtttgtgactcggttcggcggcgaccgcgtcatcgaaaaagtgttaatagcgaacaacggcattgcggccgtcaagtgcatgcggtccatccgccgctgggcatacgagatgttccgcaacgaaagggcaatcagattcgtagtcatggtgacccccgaagacctgaaggccaacgcagaatatattaagatggcagatcactatgtacccgtgcccggtggccccaacaacaacaattacgcaaacgtggaactcatcgtggacatagccaagaggatccctgtacaggctgtttgggccggatgggggcacgcgtctgaaaaccctaagttgcccgagcttttatgcaagaatggtgttgcctttttggggcctccaagtgaggctatgtgggctctcggggacaagattgccagcaccgtggtggcacagacactgcaagttcccactttaccgtggtccggtagcggcctgaccgtggaatggacagaagatgaccttcagcaggggaaacggatatccgtccctgaggatgtttacgacaaaggctgcgtgaaagacgtggacgaagggttagaggccgccgagagaatcggctttccacttatgatcaaggccagtgagggcggaggtgggaagggcattcgaaaggccgaatctgccgaagatttcccaatactttttcgacaagtccaatcagaaatcccaggcagcccaattttcctcatgaaactcgcgcagcacgctaggcatctagaggttcagatcctggctgaccagtatggaaacgcagttagtctgttcggtagggattgtagtatacaaagacgtcaccagaagattgttgaggaggcccctgcgaccatcgccccactggcaattttcgagttcatggagcagtgtgcgataaggctggcgaagactgtgggctacgtgtctgccggtactgtggaatatctctattcacaggatggaagttttcattttctcgaattgaatccaaggctccaggtggagcatccctgtactgagatgattgccgatgtcaatctacccgcagcccaactgcagatcgctatgggggtgccactgcacagactcaaggacatccgcctcctttacggagaatctccgtggggagtcacacctatttcgtttgagactccatcaaacccccctctggctcgcgggcacgtcattgccgcacgaattacctcggaaaaccctgacgaggggttcaagccatccagtggaaccgttcaggaactgaattttagaagctccaaaaacgtgtggggatatttcagcgtggcagccaccggcggcttacacgagtttgccgatagccagtttggtcattgtttcagctggggcgagaacagggaggaggcaatcagtaatatggtcgttgcactgaaggagttgtccatcaggggtgactttcgcacaaccgtcgaatacctgattaacttgcttgagacagagagcttccagaacaatgatattgacactggctggctcgattaccttattgccgagaaagttcaggctgaaaaacctgacattatgttgggtgtcgtttgtggcgcattgaacgtggcagatgccatgtttcgaacatgcatgaccgactttcttcatagtttggagcggggtcaggtcctaccagcggactccctgctcaatttggtcgatgtggaactgatttacggcggagttaagtacatcttgaaggtggctagacagtcccttaccatgttcgtcttgataatgaacggttgccacatagagattgatgcccatagactgaatgacggagggctcttacttagttacaatggaaactcctacacgacttacatgaaagaggaggtcgatagctatagaatcacaattggtaacaaaacatgtgttttcgaaaaggaaaatgatcctactgtactccggagccccagtgctggaaaacttacacagtatactgtcgaggacggaggacacgtagaagcaggcagttcctacgccgaaatggaggttatgaagatgatcatgacccttaatgtccaggaacgcggacgagttaagtatattaaacgtcctggggcagtgttggaagctggatgcgtcgtcgcgaggcttgaattggacgacccgtcaaaggtgcatcctgccgagccttttacgggggaactgcctgcgcagcagacccttcccattcttggcgaaaagctccaccaagtttttcactccgtgctggagaatctgactaatgtgatgtcagggttctgtctgcccgaacccgtcttttccatcaagctgaaagagtgggtgcaaaagcttatgatgaccctgagacacccaagtcttccactgctggaactgcaggaaatcatgactagtgtggcaggaagaatacccgcgcctgtcgagaagagcgtgaggcgcgtgatggcccagtacgcctcaaacatcactagtgtgctgtgtcaatttccttcccaacagatcgccactatcctggactgccacgccgctaccttgcaaagaaaggccgatcgggaggtattcttcatcaatacacagtcaattgtgcagctggttcaaaggtatcgatccggcattcgagggtatatgaagacagttgtgctcgatctgctgcgccgctacctgcgagtcgagcatcacttccaacaggcgcattatgataagtgcgtgatcaatctccgggagcagttcaaaccggatatgtcccaggtcttagactgcatcttttcccacgctcaggtggccaagaagaatcaacttgtgattatgctcattgacgaactctgtggccccgatccttctctgtcagatgagctgattagcattctcaacgagctcacccagctgtctaaaagcgagcactgcaaagtggccttgagggcaagacaaatcctgatcgcatctcacctcccaagctatgaactgcggcacaaccaggtcgagagcatattcctctcagcaattgacatgtacggtcatcagttttgccctgagaacttgaaaaaactcattctgtcagaaaccacaattttcgatgtgctgcctacattcttttaccatgcaaacaaggtggtttgtatggcctcactggaagtttacgtccggaggggatatattgcttacgagctcaactcgctccaacaccggcagttgccggacggtacctgtgtcgtggaatttcagttcatgcttccaagcagtcatccaaaccggatgactgtgcctatatcaattaccaatcccgacctccttagacactccaccgagctgttcatggacagtggcttctccccactgtgtcaaaggatgggagctatggtcgcctttcggaggttcgaggacttcacccgcaatttcgacgaagtcatctcttgcttcgcaaacgtgccgaaagatactccgttgttcagtgaggcccgcacaagcctgtattccgaggatgattgtaaatccttgcgcgaggagccaattcacatcttaaacgtctccatccaatgcgctgaccatttggaggacgaggcgctggtgcctattctccggactttcgtgcaatccaaaaagaatatactggtcgattacggactgaggaggataactttcctgatagctcaggagaaagaattccctaagttctttacgttccgcgcaagggacgaattcgctgaagaccggatatataggcacctggaacctgccttagcttttcagctggagctgaaccgcatgagaaatttcgatttaaccgccgtcccctgtgcgaaccacaagatgcacctttacctcggcgcggcaaaggttaaggagggcgtggaagtcactgaccacaggttttttatcagagctatcatccggcattcggacctcatcaccaaggaggccagctttgagtacctacagaatgaaggagaacggcttctactggaggcaatggatgagctggaggtcgccttcaacaacacatcggtgagaacagactgcaatcacattttcctgaacttcgtgccaacagttatcatggaccccttcaagatcgaagaatctgtgcgatacatggtcatgaggtacggttctcggctctggaaactgagagtgctgcaggcagaggttaaaatcaatattcggcaaaccacaaccggaagtgctgtgccaatacggctctttattactaatgagagcggctactacctagacatctcactgtacaaagaagttactgattcaaggagtggaaatatcatgttccattccttcggtaataagcagggcccccagcacgggatgttaatcaataccccttacgtgactaaggaccttcttcaagctaaaagattccaggcacaaacactcggtaccacctatatctacgacttccccgaaatgttccgccaggccttgtttaagctatgggggtcacctgataaatatcccaaagatattcttacatacactgaacttgtactggactctcaagggcagttagtcgaaatgaacaggcttcccggaggtaatgaggtggggatggtagcattcaagatgcggttcaagacacaagaatacccagaaggccgcgatgtgatcgtgattggaaacgatatcaccttccgcataggttccttcggtccaggagaggatttgctttacttgagagcctccgagatggcccgtgctgagggtatcccaaaaatatatgtcgccgccaattcgggggctcggatcggtatggcagaggaaatcaagcatatgttccacgtcgcttgggtggatcctgaggacccacacaagggcttcaagtacttgtacctcaccccacaagactatactaggatttcctctctgaactctgtgcactgtaagcatattgaagaggggggcgaaagtaggtatatgattacagatatcataggaaaagacgacggcctcggagtggaaaacctacggggcagtggcatgatagctggggagagcagccttgcttatgaggaaatcgtgactattagtttggtcacgtgtcgcgcaatcggtataggagcgtacctagtgagactgggccaacgggtcatccaggtcgaaaactcccacatcatactgactggagctagcgctctcaacaaagtcctcgggagagaggtgtacaccagtaacaaccagttgggtggagttcagattatgcattacaacggagtcagccatattactgtaccggatgacttcgaaggagtatatactatcctcgagtggctctcctatatgcctaaagataatcactcccctgttcctatcattacccctactgatcccatcgaccgcgagatcgagttcctcccgtcaagagccccttatgatccgcgatggatgttggcaggccgcccccatcccactctgaagggcacatggcagagtggcttcttcgaccacggttcgtttaaagagattatggctccatgggcccagacagtagtgacaggccgggcgcgcctgggagggatccctgtcggtgtgattgctgtcgaaacacggaccgttgaggttgctgtgccagcggaccctgctaacctggatagcgaggcgaaaattattcagcaggcagggcaagtgtggttcccagacagtgcctacaagacagcccaggcagtaaaggatttcaaccgggagaagttgcctctcatgatctttgccaactggagggggttctctggaggtatgaaggatatgtacgatcaggtgttaaaatttggagcctacattgtagacgggttacgccaatataaacagcccattctgatctacatcccaccatatgctgaactgcgcggtggctcctgggtcgtgatcgatgccaccatcaatcccttgtgcattgaaatgtatgccgataaagagtccagaggaggtgttctcgaaccagaaggcaccgtggagattaaattccggaagaaagacctgattaaatctatgcgccgaatagaccctgcttacaagaaactcatggagcaactgggtgaaccagacttatctgacaaagatagaaaggatttggagggccgcctgaaagctagagaggatctgttgttgcccatttaccaccaagtggccgttcagtttgccgactttcacgatacacccggccgtatgctggagaagggtgtgattagtgatatactggagtggaagacagcaagaacgtttctgtattggcggctcagaaggcttctgcttgaagatcaggtcaagcaggagatccttcaagcatcaggagagctctcgcacgttcacatacaaagcatgttacgtcgatggtttgtcgagaccgagggagcagtcaaggcttacttatgggataacaaccaagtggtggtgcagtggctggagcaacactggcaagcaggcgatggaccgcgctctacaattcgggagaacatcacatatctgaagcacgacagcgtgctaaagactatacgcggattggtggaagagaatcctgaagtggcagtggattgtgtaatatacctgtcgcagcatattagcccggccgaaagagcacaagtagtacacttgctgagcaccatggattcacctgctagcacatag

SEQ ID NO: 177602 - DNA, 7167 bp, synthetic construct
  misc_feature 1..7167: note = Description of Artificial Sequence: Synthetic coding sequence
  source 1..7167: mol_type = other DNA
atggtgctgctgctgtgcctgagctgcctgatcttcagctgcctgacattctcttggttgaagatttggggcaaaatgactgactcaaagcctattacaaagagcaagtcagaggccaatttaattccctctcaggaacccttcccagcatcagacaatagcggcgaaacccctcagcgaaacggtgagggccatacactcccaaagacgccatctcaagcagaacccgcatctcacaaaggtccaaaagacgctggccgacggagaaattctttacccccctctcatcagaagcccccgcggaatcctctctcaagtagcgacgctgccccatctccagagctccaagctaacggcacaggaacccagggtctagaagccaccgataccaacgggttgtcctctagtgcaagacctcagggtcagcaagctggctctcccagcaaggaagacaagaaacaggctaatataaaaagacagcttatgacaaacttcatccttggtagttttgacgactacagcagcgatgaggatagcgttgccgggagctctcgggagagcacgcggaaaggttcccgggctagtctgggagccctgagcctagaagcctatctgaccaccggagaagctgaaacacgagtgccaaccatgcgtccttccatgtctggccttcatctcgtgaaacggggtagggagcataaaaagctggatctacacagagattttaccgttgcaagtccagccgaatttgtgacacgcttcggaggggaccgagttatcgagaaagttctaatcgccaataacggtatcgccgccgtgaaatgcatgagaagcattcgcagatgggcttatgagatgttccgtaacgagagagcgatcaggtttgttgtgatggtgactcccgaagacctgaaagcaaacgcagagtacataaaaatggcagaccattacgtccccgttcccgggggccccaacaacaacaactatgcaaacgtcgaattgatcgtcgacatcgcaaagagaatccctgtccaggcggtgtgggcagggtggggacacgcctccgaaaaccctaaactgccagagctgctgtgcaagaatggagttgcctttctgggtccaccaagtgaagcaatgtgggcacttggagacaagattgcgagtaccgtcgtcgcacagaccctccaagtcccgaccctgccttggagtggaagcggcctgaccgtggagtggaccgaggacgacctccagcagggcaaacggatcagtgtacccgaagatgtctacgataaaggttgcgtgaaagatgtggacgagggcctggaggctgccgaacgaatcggatttccattaatgatcaaagccagcgagggtggcggcggaaagggcatccggaaagctgagtccgccgaggacttcccaattctgttcagacaggtgcagtcggagattcccggtagcccaatttttctgatgaagctggctcagcatgcccgtcatcttgaggtccagatcttggccgaccagtatggcaacgcggtctccctgtttggtagggactgctccatccagcggagacaccagaaaatcgtcgaggaggcgccagctacaatcgcccccttagccattttcgagtttatggaacagtgtgctataaggctggccaagactgtcggatacgtcagtgcgggcacggttgaatacttgtactcacaggatgggtcttttcacttccttgaactgaacccacgcctgcaggtcgagcatccatgcactgagatgatagccgatgtgaatctgcccgcagcccagctgcaaattgcaatgggcgtgcctcttcatcgccttaaggacattagacttctatacggggaatctccttggggcgtaacccctattagctttgagaccccatccaatcccccactcgcccgaggacacgtgatcgccgcccgtattacctcagagaaccccgacgagggatttaagccctcctccggcaccgtgcaggaactgaacttccgcagctctaagaacgtatggggatactttagtgtggccgcgactggaggtcttcacgaatttgcagactcacagttcgggcactgctttagctggggtgagaaccgtgaggaggccatttccaatatggtcgtggctttaaaagaactgtccatccgaggggacttccggaccacagtcgaatatctcatcaaccttttggaaaccgagagctttcaaaacaatgacatagacacagggtggctggactacttgatcgctgaaaaagtgcaggctgagaagcctgatatcatgctcggagttgtttgcggcgccctgaatgtcgcggacgccatgttccgaacatgtatgacggattttctccactcactggagcgcggacaggtgcttcccgccgatagcctgctgaacctcgtggacgtggagctgatttacgggggggttaagtacatcctgaaagtggcaagacaaagtctgacaatgttcgttctgataatgaacggatgccatatcgaaattgacgcccatagactgaacgacggcggccttctgctgagctataacggtaatagctacaccacttacatgaaggaggaagtcgattcttaccgtattaccatcggtaataaaacctgtgtctttgagaaggagaacgatcccaccgtgttacgtagccctagtgccggaaagctaactcagtatacagtcgaggatgggggccacgttgaggccggcagttcctacgcggaaatggaggtgatgaaaatgatcatgacactcaatgttcaggaaaggggcagggttaaatatattaaacgacccggtgccgtgttagaggccggctgcgtagtggcccgtctggagctcgatgaccccagtaaagttcatcccgcagagccttttacgggtgagctgcccgcccagcagaccctgcctattctgggcgagaagctgcatcaagtgtttcacagcgtgctcgagaacctgaccaacgtcatgagtggattttgtcttcctgagcctgtgttctccatcaagctgaaggagtgggtgcagaagctgatgatgactctcagacatcctagtctgcctctgttggaacttcaagaaatcatgacttcggtcgccggccggatcccagcccccgttgaaaaaagcgttcgacgggtcatggcccagtacgccagcaacattaccagcgttctgtgccagtttccctctcagcaaatcgctacaatccttgactgtcatgcggcgacactacaacgtaaggccgatcgcgaggtgttctttatcaacacccagagcatcgtgcaactggtgcagtccaaggatgaactctgtggcccagacccttcactgtcagatgaattgatatctatcttgaacgaactaacccagctgagtaaatctgaacattgcaaggtggccctgagggccaggcaaatactgattgcaagtcatctgccctcctatgaactcaggcataatcaggtggagtctatcttcttgtccgcgatcgatatgtatggacaccagttctgccccgaaaatctgaagaagctcatactgagtgagacaacaatttttgacgtactgcccaccttcttctaccacgccaacaaagtagtttgcatggcatcattagaagtgtacgtgcggcgcggctacatagcatacgaactcaactctctgcagcaccgacagttacctgacggaacttgcgtcgtggaattccagtttatgttaccttcttcacatcccaataggatgacggtccccattagcataacaaatcctgatttattaagacactctaccgaactgttcatggactccgggttctcgccattgtgccagcggatgggcgcaatggtcgccttccgtcggttcgaggactttacccggaattttgacgaagtgatttcctgcttcgctaacgtgccaaaggatactccactgttttccgaggccagaacaagcctgtactcagaagatgactgcaagtctttacgggaagaacctatacatatcctgaacgtgagcattcaatgcgccgatcatctggaagacgaggcactcgtgccgatcctaagaacgtttgtccagtcaaagaagaacattctggtggactacggtcttagacgaattaccttcctcatagcacaggagaaggagttccccaaattttttacttttcgagcccgggatgaattcgctgaggatcgaatctataggcatctagaacctgcgttggcgtttcagctcgagttaaacagaatgcggaactttgatctcacggccgtgccttgcgctaaccacaagatgcacctgtatcttggcgctgccaaagtaaaggagggcgtagaggtcaccgaccaccgcttctttattcgtgccatcattcgccattccgatctgatcaccaaggaagcatcttttgaatacttgcaaaacgagggcgagcgactgctccttgaagctatggatgaactggaagttgcctttaacaacactagcgtccgtaccgactgcaaccacatattcctgaactttgtgcccaccgttatcatggatcccttcaaaatcgaagagtccgtaagatacatggttatgagatacggcagcaggctctggaagctcagggtgctgcaggcggaggtgaagatcaatatccgacagaccaccacaggttccgccgtgccaatccgcctttttatcacaaatgaatcgggatattatcttgatatctccctctataaagaagtcaccgatagcaggtccgggaatataatgtttcacagttttggcaacaaacaggggccccagcacggaatgctcattaataccccatatgtgacaaaggacttgctccaggccaaacgctttcaggcccagacgcttggcactacatatatctacgattttcctgagatgttccgtcaagctctgttcaagctctgggggagcccagataagtatccaaaagacatcctaacatacaccgaattggtccttgattctcagggtcaactggtggagatgaatcggctccctggcggaaacgaggtggggatggttgctttcaaaatgagattcaagactcaggaatacccagaagggagggacgtaatcgttatcggaaacgacattacttttagaatagggtcttttgggccgggagaggacttactatacttacgcgcttcggagatggccagggccgagggcattccaaagatttacgtggcagctaactcaggagcgcgtatcgggatggctgaagaaattaaacatatgttccacgtggcctgggttgacccggaggacccccacaagggattcaaatacctgtacctcactcctcaggactatactaggatctcctctctgaactctgtgcactgcaagcatatagaggagggcggagagagtcgttatatgatcaccgacataatcgggaaagatgatggcttgggtgttgaaaacctgcggggaagcggaatgatcgccggggagtcctccctggcctatgaggagattgtcactatttccctcgtaacgtgtagggcaatcggcatcggggcttacttggttagactcggccagcgcgtgattcaagtcgagaacagccacattattctgactggagcatccgctctgaacaaagttctgggccgggaggtgtatacttcgaataaccagttgggaggcgtccaaatcatgcactacaatggtgtgtcccacattaccgtgccagatgattttgagggggtatatacaatattagaatggttaagctacatgcccaaggacaaccactcacctgtgcccataataacaccaactgaccccattgacagggagatcgaatttctgcccagccgcgcaccttatgaccccagatggatgctagccggccgcccccacccaaccctgaaggggacatggcaaagcggctttttcgatcacggctctttcaaagagatcatggccccttgggcacagaccgtcgttacagggcgcgcgcgcctggggggcatccctgtgggtgttattgccgtcgagaccaggacagttgaggtggccgtccccgccgacccagccaacctggactcggaggcaaaaatcatccaacaggctggccaggtctggtttccagattctgcctacaagactgcgcaggctgtgaaagacttcaacagagagaagctacccctcatgatctttgcaaactggagaggtttttctggagggatgaaggatatgtacgaccaggtcctgaaattcggtgcctatatcgtggatggattacggcaatacaagcagcctatcctaatctacatccctccatacgccgaactgaggggaggtagttgggtagtaatcgatgccaccatcaaccctctgtgtatagaaatgtacgctgacaaggaatctcgaggtggagtcctggagcccgaggggactgtggaaatcaaattccggaaaaaggacctgatcaaatcgatgcggagaatcgaccccgcttacaagaaactgatggagcagctgggagagccagatctctccgacaaggacagaaaagatttagagggccggctgaaagctcgagaggacctgctcctgccgatttatcaccaggttgccgttcagttcgctgactttcatgatacacctggaagaatgcttgagaagggggttatctctgatatcctagagtggaagacggcccgaactttcctgtactggaggctgcggcgactcctattggaggaccaagtgaagcaagagatcctgcaagccagtggcgagctgtcccatgtacatattcaatcaatgctacgccggtggtttgtggagactgaaggagccgttaaggcctatttatgggataataatcaagtggttgtccaatggctcgagcagcactggcaagcaggtgacggccctcgcagcaccatccgcgagaatatcacctacctgaagcacgatagcgttcttaaaaccattaggggcttagttgaggagaatcccgaggtagctgttgattgtgtgatttacctgtcccagcatattagtcccgccgagcgtgcccaggtggtgcatctgcttagcacaatggactcaccagcatccacctag

SEQ ID NO: 177603 - DNA, 5070 bp, synthetic construct
  misc_feature 1..5070: note = Description of Artificial Sequence: Synthetic coding sequence
  source 1..5070: mol_type = other DNA
ctgcccttcctgctgaagcccccccagaccctgcccagccccgacgcaatgttccgtacctgcatgaccgactttctgcattccctcgaaaggggccaggtgcttcctgcagacagcctcttgaacctggtggatgttgagctcatctacggcggagtgaagtatatcctgaaggtggcgagacagtcactgactatgtttgtacttattatgaatgggtgccacatcgagatagatgctcataggttgaatgacggtggccttctgctgtcttacaatgggaattcttacaccacatatatgaaggaggaagtcgatagctacaggataaccatagggaataaaacctgcgtgtttgagaaggagaacgatccaacagtgctgagaagcccatctgccggaaagcttacacagtatacagtcgaagacggcggccacgtcgaggctggctcctcatacgcagaaatggaagtaatgaaaatgatcatgacattgaatgttcaagaacgaggccgcgtgaagtatattaagagacccggagcggtgttagaggctggttgcgtagtcgccaggctcgaattggacgaccccagcaaggtccaccctgccgagcccttcacaggagaattaccggcccagcaaactctccctattttaggcgagaaactccatcaggtgttccatagtgtgctggagaatctcacaaacgtaatgtcaggcttctgtttacctgagccggtattttcaatcaagctcaaagagtgggttcagaaattgatgatgactttacgccacccttccttaccactgttggaactccaggaaatcatgacatccgtggcaggacgcatcccagcccccgtcgagaaatccgtccggagggtcatggcccagtacgcctccaatatcacttcagtgctttgtcaattcccctcccagcagattgcaacaatccttgactgccacgcagcaacattacagagaaaggccgatagagaggtctttttcataaatacccaatcaatcgtacagttggttcaaagatacagatccgggattaggggctacatgaaaacagtcgtcctggacctcctgagaaggtatttgcgtgttgaacaccatttccagcaagcccactatgacaagtgcgtcattaacctccgagagcaattcaaacctgacatgtcacaggtcctggattgcatcttcagtcatgctcaagtggccaagaagaatcagctcgtcattatgttgattgacgaactgtgcggcccggacccctcgctgagcgatgaattgatcagcattcttaatgaactgactcagttgtcaaagtctgagcactgcaaggtggctcttagagcacggcagatcctgatagcttcacacctccccagctacgagcttcggcacaatcaggttgaaagcatcttcttaagcgcaatcgatatgtatgggcatcagttttgcccagagaacctgaaaaagttgatccttagcgaaaccactatcttcgatgtgctgccaacattcttctaccatgccaataaagttgtgtgcatggcttcgctggaggtctatgtgagacgggggtatattgcgtacgagctgaattcgctgcagcaccgccagttacctgacgggacctgcgtagtagagtttcagttcatgctgccttctagtcatcctaatcgtatgaccgtgcccatttcgataactaacccagacctgttacggcattcaacagaactgtttatggatagcggtttcagcccactgtgccagaggatgggcgcaatggttgcatttcggcggtttgaggattttacccgcaacttcgacgaggtgatctcctgttttgcaaatgtacccaaagatacgccgctgttctctgaagcacgcacctccctgtatagtgaggatgactgtaagtctctgcgcgaggagccaatccatatactaaacgtaagtattcagtgtgcagaccacctcgaagatgaggcgctcgtccccattctgcggaccttcgttcagagcaagaagaacattctcgtcgattacggtctgaggcgcatcaccttcctgatagctcaagaaaaagagtttcccaaattttttacctttagagcaagggacgagttcgcagaagaccggatatacaggcaccttgagcctgccctcgctttccagttggagctgaacagaatgcgcaactttgatcttacagcagtgccctgcgctaatcacaagatgcatctgtatctcggtgccgccaaagtcaaggaaggggtcgaggttacggaccaccgtttttttatacgggctattatccgtcattccgacttaattacaaaggaggcctctttcgagtatcttcagaatgaaggcgaaagactcctcttggaggcaatggatgaactcgaggtagccttcaacaacacatccgttcgaactgattgtaaccacatcttcctcaactttgtcccaaccgtgatcatggacccatttaagattgaagaatctgtgcgttatatggtgatgaggtacgggtcacggctctggaagctccgcgtgctgcaggctgaagtaaaaatcaatattcggcaaaccaccactgggtcggctgttccaatacggctcttcattactaatgagagcggatactacctagacatcagcctgtataaagaggttacagacagccgcagcggcaacatcatgttccactcgttcggaaataaacaagggcctcagcatggcatgctaattaatacgccctatgtgacgaaagacctgcttcaggctaaacgattccaggcacagacactcgggacgacctatatctatgactttcccgagatgttccgccaggccctcttcaaactgtggggctctcctgacaagtatcccaaagacatcctgacttacaccgagctggttctagactcacaggggcagttggtggagatgaatcggctgcccggcggtaatgaagtgggtatggtggcattcaaaatgagatttaaaacacaggaatatccagagggcagagacgtcatagtgatcggcaatgacatcactttcaggattgggtcttttgggcctggagaggacctactgtatctgcgagcaagtgagatggcccgggcggagggcatacccaaaatttacgtagcagctaacagtggagccagaatcgggatggcagaagagatcaagcacatgtttcacgtagcttgggtggaccccgaagacccacacaagggttttaagtacctgtacttaacaccccaggactacactcggatttcttctctcaatagtgtccattgtaagcacatagaagaaggcggagaatcaaggtacatgattactgacattataggcaaggatgatggcctgggcgtggagaatctaaggggaagcggcatgatcgctggcgaatcctccctcgcttacgaggaaattgtaacaatttcactagttacatgtagagcgatcggcatcggggcctacctagtcagactgggacagcgtgtcattcaagtggagaattcccatatcatcttaaccggagcgtccgccttgaataaggtgctcggtagagaggtttatacctcaaataaccagctaggcggcgtccagatcatgcattataatggagtgtcccatatcacggtgcccgacgacttcgaaggcgtctataccatactggaatggctgtcctacatgcctaaggacaatcacagtcccgtgccaattattacccccaccgaccccattgatagggagatcgagttcctgccctctagggcaccttatgacccgcggtggatgctcgccggacgcccccatccaactttaaaagggacctggcagagcggatttttcgaccacggatctttcaaggaaatcatggccccctgggctcagactgtagttactggcagagctagactcggaggcattcccgtgggggtaatcgctgtggagacaagaaccgtcgaggttgctgtaccggctgaccccgcaaacctggattcagaagctaaaatcattcagcaagcgggacaggtctggttcccggattctgcttacaaaacggcccaggcggttaaggatttcaacagggaaaagttaccacttatgatatttgcaaattggcgggggttttctggggggatgaaagatatgtacgaccaggtgttgaagtttggagcctatatcgttgatgggctcaggcagtataaacaacccattctgatctatatcccaccctacgccgaactcagaggcggatcatgggtagtgatcgacgcaacaatcaaccctctctgcatcgaaatgtatgcagacaaggagtcacgggggggagtcttggaacctgaggggaccgttgagatcaagtttcggaaaaaggatcttatcaaatcgatgcgccgcatagacccagcctacaagaagctgatggagcagcttggcgaaccagatctgtcggacaaggaccgcaaggacctggagggacgcctcaaagctcgggaggatctcttgctgccaatctatcaccaagtggcagtccaatttgccgactttcatgatacaccgggccggatgctggaaaagggtgtgatctcagacatcctcgagtggaagacagcacgcacttttctttattggcgattacgccgcctcctcctggaagaccaagtgaaacaggagatcttgcaggccagtggcgaactgtctcatgtgcatatccagtcgatgctgcgcagatggtttgttgagactgagggggctgtgaaggcctatctctgggacaacaaccaagtggtggtgcagtggcttgaacagcattggcaggctggcgacggacccaggtctaccattcgtgagaacatcacctacttgaaacacgacagcgtgctcaagaccatcaggggcctcgtggaggagaatccagaagttgcagtcgattgcgtaatctacctttctcagcatataagtcccgccgaaagggcccaggtcgttcatctgttgagcaccatggacagtcccgcttcaacctag

SEQ ID NO: 177604 - DNA, 432 bp, synthetic construct
  misc_feature 1..432: note = Description of Artificial Sequence: Synthetic coding sequence
  source 1..432: mol_type = other DNA
atgaccgacagcaagcccatcaccaagagcaagagcgaggccaacttaatcccaagccaggaaccatttcccgcttctgacaattcaggagaaaccccccagaggaacggcgagggccacacactaccaaaaacccctagtcaagctgaaccagcctctcacaagggccccaaagatgccgggcgccgaagaaactcattacctccctcacaccagaaaccacctcggaaccccttgtctagcagcgacgccgcaccctctccagagcttcaggccaatggaacaggaactcaaggcctggaggctaccgacacgaacggactcagttctagtgcccgtccccagggtcaacaggctggatctcccagcaaagaagataagaaacaggccaacataaaacgacagctcatgaccaacttcatcttggggtag

SEQ ID NO: 177605 - DNA, 2577 bp, synthetic construct
  misc_feature 1..2577: note = Description of Artificial Sequence: Synthetic coding sequence
  source 1..2577: mol_type = other DNA
atgaccgtgcccatcagcatcaccaaccccgacctgctgcggcacagtacggagctattcatggatagcggctttagcccattgtgccaacggatgggagctatggttgcatttcgccgcttcgaagattttactaggaacttcgacgaggttattagctgctttgccaatgttccaaaagacacacccctgtttagcgaggctcggacaagcctgtatagcgaggacgattgcaagtcgttgagggaggagcccattcacatcctgaatgtctctattcagtgcgccgatcacctggaggatgaggctcttgtgcccattctgcgaacattcgtccagtctaaaaagaatattttagtagactacgggctgaggcgaattacttttctcattgcacaggagaaggaattcccaaagtttttcacgtttcgagcacgcgatgagttcgccgaggatcgcatctatcggcatttggagcccgcactcgcattccagctggaactgaaccggatgcggaatttcgaccttactgcagtgccatgcgccaaccataaaatgcatctctatctgggtgctgccaaggtgaaagaaggagtggaggtgacagaccatcggttcttcatacgcgctatcataaggcactctgacctgatcactaaggaggctagctttgagtatctacaaaacgagggggagcggctcctcttagaggctatggatgagctggaagtggctttcaacaataccagcgtcaggacagactgtaaccatatattcctgaatttcgtccctacagttattatggatccctttaagatcgaggaatctgtacgatacatggttatgaggtacgggtcccggctctggaagctacgagtgttacaagcggaagttaagatcaacattcggcaaactacaaccggtagtgcagttcccatcagactctttatcaccaatgaatctgggtactaccttgacatttcactatacaaggaggtgaccgactctcgcagtggaaatataatgtttcacagcttcggtaacaagcagggccctcagcacggcatgctcatcaataccccctatgtgaccaaggatcttttgcaagccaaacgttttcaggcccagacactggggacaacctacatctacgattttcctgaaatgttcaggcaagctctgttcaagctgtgggggtctcctgacaagtaccccaaggacatccttacatacacagaactcgtgctggactctcagggtcagcttgtggagatgaatcggctgcccggaggaaacgaggtcggtatggtggccttcaaaatgcgattcaaaacccaggaatatccagagggacgcgacgtcatagtaattggcaatgatataaccttcaggatcggatccttcggacccggcgaggacctgctgtacctccgcgccagcgagatggccagagctgaagggatccccaaaatatacgttgctgccaactcaggcgctcgcatcgggatggcggaagaaatcaaacacatgtttcacgtggcctgggttgatccggaagatccacacaaaggatttaaatatctttatctcacccctcaagattatacccgcatctctagcctgaacagcgtgcactgtaagcacatcgaggaagggggcgagagtaggtatatgattactgatattataggcaaggatgacggcctaggcgtggagaaccttagggggagtggcatgatcgctggtgaatcttctctagcatatgaggaaatagtaaccatctccttggtgacctgccgagcgattgggattggcgcctacctggttaggctgggtcagagagtgatccaggtggaaaattcacacattatcctaaccggagcctctgctctcaataaggttctcggccgagaggtatacacctctaataaccagctggggggggtccagattatgcattataacggggtgagtcatataactgtccccgacgactttgaaggcgtctatacaatccttgaatggctttcttatatgccaaaagataaccactcccctgttcctatcatcacccctacggatccaattgacagagaaattgagttcctgccctccagagctccatacgatcctagatggatgctcgccgggcggccccacccaactctcaagggcacatggcagagcgggttctttgaccacggatctttcaaggagattatggccccctgggcccagacagtagttacaggtagggccagactgggcggcatcccggttggcgtgatcgccgttgaaacccgtacagtcgaggtggccgtgccagccgatcctgccaatctcgacagtgaagctaaaatcatccagcaggccggccaagtttggttcccggactctgcttataaaaccgcgcaagccgttaaggatttcaatcgagaaaagctgccattaatgatttttgcaaactggcgtggtttttccggtggtatgaagggctgcttggggacatggagggacgtgagttggtggaagattagggccatgctgcctatgcacattggagaggggtccgtctag

SEQ ID NO: 177606 - DNA, 1038 bp, synthetic construct
  misc_feature 1..1038: note = Description of Artificial Sequence: Synthetic coding sequence
  source 1..1038: mol_type = other DNA
atgggcagcagcgaggaccaggcctaccggctgctgaacgactacgccaacgggtttatggtatcacaagtcctcttcgccgcatgtgagctcggagtgttcgacctactcgctgaagctccaggccctctcgatgtcgcagccgtggccgcaggtgtacgggcgagtgcgcacggcacagaattgctgttggatatctgcgtgagccttaagttactgaaagtcgaaactcggggggggaaggccttctacagaaatactgagttaagttccgattacctcacgaccgtctcacctacctctcaatgctcaatgctgaagtacatgggacgtacctcctaccggtgttggggacatctggcagatgccgtgagggaaggccgtaatcaatacctcgagactttcggcgttcccgctgaggagctgttcaccgctatctataggagcgaaggtgagcggcttcagttcatgcaggcactgcaggaggtctggagtgtcaatggacgttctgtgctgaccgctttcgacctcagtgtgtttcctttgatgtgcgatctcggtgggggggctggtgcgctagccaaggagtgtatgtctctttaccccgggtgtaaaattacagtttttgacattcctgaggtggtgtggaccgcgaagcagcatttctccttccaggaggaggaacagatcgacttccaagaaggagatttcttcaaggatcccctgccggaggccgacctctacatcctggctcgggttctgcacgattgggctgacggcaagtgttctcacctgctggagagaatttaccacacttgcaagccaggtggaggaatcttggtaattgagtcactactggatgaggacagacgcggaccactgctcacccagttatatagtttaaatatgctggtgcagacagagggccaggagcgtacaccgacccactatcacatgcttctgtcgtctgcgggcttcagagatttccagttcaagaaaactggtgccatctacgatgctatcttggcccgcaaatag

SEQ ID NO: 177607 - DNA, 897 bp, synthetic construct
  misc_feature 1..897: note = Description of Artificial Sequence: Synthetic coding sequence
  source 1..897: mol_type = other DNA
atgggcagcagcgaggaccaggcctaccggctgctgaacgactacgcaaacggatttatggtgagccaggtgttattcgctgcctgcgaacttggtgtgtttgatctgcttgcagaagctccaggccccttggacgtagcagcggttgcggctggagtgcgggctagcgcccacggcacagagctgctcctcgatatctgcgtgagcctgaagctcctgaaggtagaaacccgaggcggtaaagctttttaccgcaatactgaactgtctagtgattatttaacaacagtgtcgcccacatcccagtgctcaatgttgaagtatatgggacggacttcttaccgctgctggggtcatctggccgatgcggtgagggaaggaagaaaccaatacctcgaaacttttggcgtgcccgctgaagagctgtttacagctatataccgaagcgaaggtgaacgcctgcaattcatgcaagccttacaggaggtctggtccgtcaacggtagatccgttttaactgcctttgatctgtccgtattccctcttatgtgtgatttagggggtgatttcttcaaagatccgctccctgaggcggacttgtacatcctggcacgggtacttcatgactgggccgacggcaagtgttcacatttgttggagcgcatctaccacacgtgcaagcccggagggggaatcctcgtgatagaaagccttctggatgaggataggcgcgggccccttctgacccagctctacagcctgaacatgctggttcagacagagggacaagagcgcacccccacacactatcacatgctcctgagcagtgccgggttccgagactttcagttcaagaagactggggcaatctacgacgcaattcttgcacgcaagtag

SEQ ID NO: 177608 - DNA, 1122 bp, synthetic construct
  misc_feature 1..1122: note = Description of Artificial Sequence: Synthetic coding sequence
  source 1..1122: mol_type = other DNA
atgggcagcagcgaggaccaggcctaccggctgctgaacgactacgcaaacgggttcatggtgtctcaagtactctttgccgcatgtgagctgggtgttttcgacctgcttgccgaggctcctggcccgttggacgtggctgctgtggccgcgggagtgcgagcctccgcacatggcactgagcttctactcgatatctgtgtttctcttaaattgctgaaggtcgagactcgaggcggcaaagctttttaccgaaacacggagctatcatctgactacctgacaaccgtgtcccctacctctcagtgttccatgctgaagtacatgggaagaacatcgtataggtgttggggtcacctggccgacgccgtgcgggaggggaggaatcaatacctggaaaccttcggagtgcccgcggaagagttgttcactgctatctaccggtctgagggtgaacggctacagttcatgcaagcactgcaggaagtttggtcagtaaatggaagatccgttctcacggcattcgatctgtccgttttcccacttatgtgcgatctgggggggacctggattaagcttgagacgattattctctcaaagctgagtcaggggcagaaaaccaagcaccgcgtgttttcactgatcggaggtgctggagccttagctaaggagtgcatgtccctttatccaggctgcaagataacggtttttgacattcccgaagtggtgtggactgcaaagcaacatttctcatttcaggaggaagaacagattgatttccaggaaggagatttcttcaaagatccactgcccgaagctgatctctacatcctggctagggtgcttcatgactgggcggatggcaagtgttctcacttgctggagcgcatctaccatacatgcaaacctgggggtggcatcctcgtgatcgaatctctgctcgacgaggaccggaggggtccactgctgacgcaactatactccctgaatatgctggttcagaccgaaggacaggaacgcacacccacgcattaccacatgcttctgagctctgccgggttcagggattttcaattcaaaaagacaggagccatttacgacgcaatactggctaggaagtag

SEQ ID NO: 177609 - DNA, 375 bp, synthetic construct
  misc_feature 1..375: note = Description of Artificial Sequence: Synthetic coding sequence
  source 1..375: mol_type = other DNA
gactgccggctgaccagcgtgtgcctgccctgcgtgcccggcgacttctttaaagatcctctgcctgaagctgatttatatatccttgcacgtgtgctgcacgactgggcagacgggaagtgcagccacctgctggagcgcatttatcatacctgcaagccagggggtggaatcctggtgatcgagtccctccttgatgaagaccgacgtggcccactcctgacgcaactatacagtctgaacatgcttgtgcagacagagggtcaggagcggacccctacacattatcacatgctcctgtcctccgccgggtttcgcgacttccagttcaagaaaaccggtgctatctatgacgctattctggcacgcaagtag

SEQ ID NO: 177610 - DNA, 711 bp, synthetic construct
  misc_feature 1..711: note = Description of Artificial Sequence: Synthetic coding sequence
  source 1..711: mol_type = other DNA
atggagagcagcgccaagatggagagcggcggcgccggccagcagccccagcctcagccccagcaacccttcttgccaccagctgcatgttttttcgcaactgctgctgcagcggccgctgctgctgcagccgcagctgcacagtccgcccaacagcaacaacagcagcaacaacagcagcagcaggcccctcagttgagaccagccgcagatggacagccaagtggaggcggccacaagtctgcaccgaagcaagtcaagagacagcggtccagctccccagaactgatgcggtgtaagcgcagattgaacttctccggttttggctattcactgccccagcagcagccagcagcggtggcaaggcgcaacgagcgcgagcggaatcgcgtcaaactggttaacctcggcttcgccacactgagggagcacgtgccaaatggggctgccaacaaaaaaatgagcaaggttgagacacttaggagcgccgttgagtatatcagagcgctccagcagttattagatgaacacgatgccgtatccgctgccttccaagcaggcgttctgtccccaactatctcccccaactattctaacgacctgaactcaatggccggttcgcccgtcagctcctattccagcgatgaaggaagttacgatccacttagcccagaagagcaggagttgttagacttcacaaactggttctag

SEQ ID NO: 177611 - DNA, 582 bp, synthetic construct
  misc_feature 1..582: note = Description of Artificial Sequence: Synthetic coding sequence
  source 1..582: mol_type = other DNA
atggacggcggcaccctgccccggagcgccccccccgccccccccgttcctgtgggatgcgccgcccgcagacgacctgcatcgcccgagctgctcagatgctccaggcgacggcgaccggcaaccgccgaaaccggaggtggcgccgccgccgttgctcgcagaaacgagcgcgagagaaacagggtcaaactggtaaatctgggctttcaggccttgcggcaacacgttccccacggcggcgcctcaaaaaagctgtcaaaagtcgagacccttcgtagcgccgtggagtacatcagagctctccaacggttactggctgaacacgatgccgtgagaaacgccctcgccggaggcctgaggccacaggcagtaagaccctctgctcctagggggcccccaggcacaaccccagtggcggccagtccaagccgcgcgagcagctcgcccgggcgcggtgggagtagcgagcctgggagcccgaggtcagcatacagctcagacgactcgggatgcgagggcgcgttgtctcccgcggaacgagaactactcgatttcagctcgtggctgggcgggtactag

SEQ ID NO: 177612 - DNA, 1542 bp, synthetic construct
  misc_feature 1..1542: note = Description of Artificial Sequence: Synthetic coding sequence
  source 1..1542: mol_type = other DNA
atgtgcagcctgggcctgttcccccccccccccccccggggccaggtgactctatatgaacacaataatgaactggtcacaggatcatcatacgagagccccccgccggactttaggggccagtggataaatctccctgtcttgcaattgacaaaggatccactcaagacacccggcagactagaccatgggacccgaaccgctttcatccaccatcgagaacaggtttggaagcggtgtattaatatttggagggacgttgggctttttggtgtgttgaacgagatcgctaactccgaagaggaggtttttgaatgggtcaagacagcaagtggttgggccctagctctttgtcgctgggcctcgtcactccatggtagtctgtttccacacctgtctttacgatccgaagatctgatagcagaatttgcacaagtaaccaattgtaccatagtacctagtttgaagcatcgcctacaaagaaacgtcgcttctctggcctggaaaccactttccgcatccgtgcttgccgtcgcctgccagagttgtatcctcatttggaccctagaccctacatccctgtcaaccaggccttctagtggctgtgcacaagtgctttctcaccctggtcacacaccggtcactagtctggcatgggccccaagcgggggcagactgttgagcgcatcccccgtcgatgccgccattcgtgtgtgggacgttagcactgagacatgtgtgcccttgccctggtttagaggcggaggggtgacaaacctcctgtggtcgcccgacgggagtaagatcctcgcgaccactccctctgccgtttttagggtgtgggaagcccagatgtggacatgtgaacgctggcccacgctgtcagggcggtgccagacaggctgctggtctcctgacggtagcaggctgctgttcacggttttgggagaacctttaatctacagccttagcttcccagaacggtgcggagaggggaagggttgcgtgggaggcgccaaatctgcaacgattgtggcagatttatcggaaacgactatccagactcctgacggcgaggagcgcctgggtggagaggcgcactctatggtctgggacccctccggagaaagattagctgttttgatgaaaggtaaaccaagagtgcaagacgggaaaccggttatccttttgttccggactcgcaacagtccagtattcgagctcctgccctgcggaatcattcaaggggagccgggagcacagcctcagctaattactttccaccccagcttcaataagggcgcactgctgtccgtggggtggagcacgggaaggatcgcgcatatccccctctatttcgtgaatgcgcagtttccacggttctccccagtgctgggaagagctcaggagcccccagccggcggcggcggaagcattcacgacctaccgctatttactgagaccagccccacctctgcaccgtgggaccccctccccgggccccctcccgttctcccacattccccccattcccacctgtag

SEQ ID NO: 177613 - DNA, 1683 bp, synthetic construct
  misc_feature 1..1683: note = Description of Artificial Sequence: Synthetic coding sequence
  source 1..1683: mol_type = other DNA
atgccccagacccggagccaggcccaggccaccatcagcttccccaagagaaagctgtcgagggccctgaataaagcaaaaaactctagtgacgcgaagctggaacccacgaacgtacaaactgtgacttgtagcccccgtgtgaaagccttaccgcttagtccccggaagcgacttggtgacgacaacttgtgcaatacacctcatctgccaccttgttctcctccgaagcagggcaagaaggaaaacggtccccctcattcccacaccctgaaggggcggagactcgtgttcgacaatcagctgaccattaagagtcctagtaagcgagaactcgcaaaggtccaccagaataagatcctgagcagtgtgcgaaaaagccaggaaatcactacaaactctgaacagaggtgccccctaaagaaggagagcgcctgcgtccggctgttcaagcaggagggtacttgttatcaacaggccaaactcgtgcttaacaccgcggtccctgaccgcctgccagcgagagaaagagagatggacgtgatcaggaacttcctgcgagaacacatctgcgggaaaaaagctgggagcctgtatctcagcggcgcccctggaactggcaagactgcgtgtctatcccggatcctccaggacctgaagaaggaactgaaagggttcaagacaattatgttgaattgtatgagtctccggacagcacaggcagtctttccggcgattgctcaggaaatttgccaagaagaggtttcacgacccgctggcaaagatatgatgaggaagctagagaaacacatgacagctgagaaggggcccatgatcgtgctagtgttagatgaaatggatcagttggattccaaaggtcaagacgttctgtacactctctttgagtggccatggctcagcaacagtcacttagtacttattggcatcgccaataccctggacctgacagacaggatcctgccacggctacaggctagagaaaagtgcaaaccccagttgctgaacttccctccttatacacgaaaccaaatcgttacgatcctccaagaccgcctcaaccaggtgagtagggatcaagttcttgataacgcggctgtgcagttttgcgcccgcaaggtgtcagctgttagtggcgatgtacgcaaggccctcgatgtgtgccgtagggctatagagatcgtggaatccgacgtgaaaagccaaacaatacttaaaccccttagcgaatgcaaatcccccagcgagcctctcatcccaaaaagggtcggactgatacacatctcacaagtcatttcagaagtagacggcaaccgtatgactctctcacaggagggagcccaagactctttcccacttcagcagaagattttagtctgctctcttatgctcctgattagacagttaaagatcaaggaagttaccttggggaaactgtacgaagcatactccaaggtgtgccgcaagcagcaagttgcagccgtcgaccagtcggagtgtctgtcgctatctggacttctggaagcccgaggcattcttggcttgaaacgcaataaagagacacgcctgactaaagttttcttcaagatcgaggagaaagagattgagcacgcactgaaggacaaagccctaatcgggaatatcctggcaacgggcttaccctag

SEQ ID NO: 177614 - DNA, 339 bp, synthetic construct
  misc_feature 1..339: note = Description of Artificial Sequence: Synthetic coding sequence
  source 1..339: mol_type = other DNA
atggccgagcaggccaccaagagcgtgctgttcgtgtgcctgggcaacatctgtcggtcgcctatagccgaggcggtgtttcgcaagcttgtgactgaccaaaacatctctgaaaactggagagtagattcagctgccacttcgggttatgaaataggtaaccctccagactatagggggcagagctgcatgaaacgccacggtatcccgatgagccatgtcgcccgccaggtaccctccctcgatctgaagctatgcgtcctgtgcttctctggtagcctgactgctgttctttttctaacaggcacatgggcaggcccccagacacaggaactgtag

SEQ ID NO: 177615 - DNA, 477 bp, synthetic construct
  misc_feature 1..477: note = Description of Artificial Sequence: Synthetic coding sequence
  source 1..477: mol_type = other DNA
atggccgagcaggccaccaagagcgtgctgttcgtgtgcctgggcaatatctgtcgtagtcctattgccgaggccgtcttcagaaagctggtcaccgatcaaaatatatctgagaactggcgggttgattcggctgccacaagcgggtacgagattggaaatcctcccgactatcgtggtcaatcctgtatgaagcgccatgggattccaatgagtcacgttgccagacagatcacaaaggaagacttcgccacttttgactatatcctctgtatggatgagtccaacttacgcgacctaaatcggaagtctaatcaggtgaagacctgcaaagcgaagattgagctgttagggtcctatgatccccaaaagcagttgattatcgaggatccctactacgggaatgactccgactttgaaaccgtgtaccaacagtgtgtgcgctgttgccgggcgttcctggagaaggctcactag

SEQ ID NO: 177616 - DNA, 477 bp, synthetic construct
  misc_feature 1..477: note = Description of Artificial Sequence: Synthetic coding sequence
  source 1..477: mol_type = other DNA
atggccgagcaggccaccaagagcgtgctgttcgtgtgcctgggcaacatctgtaggtcaccaattgcggaagccgtgttcaggaagctggtgactgaccagaacattagtgagaactgggtgattgactcaggcgcagtttcagattggaacgttgggaggagccctgacccgcgcgctgtctcctgtctgcgcaatcacggcattcataccgcccataaggccagacaaatcacgaaggaagattttgccacctttgattacatactctgtatggacgagagcaatctccgagatctgaaccggaagtcaaatcaggtgaaaacgtgtaaggcaaaaatcgaactgcttgggtcctatgacccacaaaagcaattaattatagaggatccgtactacggtaatgattctgatttcgagacagtgtaccagcagtgcgtgagatgctgcagggctttcttagagaaagctcattag

SEQ ID NO: 177617 - DNA, 219 bp, synthetic construct
  misc_feature 1..219: note = Description of Artificial Sequence: Synthetic coding sequence
  source 1..219: mol_type = other DNA
atggccgagcaggccaccaagagcgtgctgttcgtgtgcctgggcaatatctgccggtcccccattgccgaagccgtgttcaggaaacttgtgacggaccaaaacatttcagaaaactggcgcgtagactcagctgctacttcagggggatccctgacagctgttctcttcctgactggaacctgggcaggcccacagactaagagctgcgcagcctag

SEQ ID NO: 177618 - DNA, 483 bp, synthetic construct
  misc_feature 1..483: note = Description of Artificial Sequence: Synthetic coding sequence
  source 1..483: mol_type = other DNA
atggccggcaagcggagcggctggagccgggccgccctgctgcagctcctactgggcgtcaacctggtggtgatgcctccaactagagcccggagcctcagatttgtgacactgctgtacaggcatggagatcggtcccctgtaaaaacatatccaaaggacccgtaccaagaagaagagtggcctcaagggtttggacaacttacaaaagaaggcatgctgcagcattgggagttagggcaagccctgcgccagagataccacggcttccttaatacttcttaccaccggcaggaggtgtacgtccgaagtacggattttgaccggacgctcatgagcgctgaagctaacctggctggtctatttccaccaaacggaatgcagcggttcaaccccaatattagctggcagcctattccagttcacacagtgccgattaccgaggatcgagtacgggtcgcgagtccctcattgggatggtag

SEQ ID NO: 177619 - DNA, 1272 bp, synthetic construct
  misc_feature 1..1272: note = Description of Artificial Sequence: Synthetic coding sequence
  source 1..1272: mol_type = other DNA
atggccggcaagcggagcggctggagccgggccgccctgctgcagctcctgctcggagtgaaccttgtcgtaatgccgcccaccagagcaagatctctgaggttcgtcacactgttgtataggcacggggacaggtctcctgtgaaaacctaccccaaggatccttaccaggaggaggaatggccccaagggtttggccaactcaccaaggaaggaatgctccagcattgggagcttggacaggcactgcgccagcgttaccatggctttctaaacacgtcatatcacagacaagaagtgtatgttagaagcacggactttgacaggactctgatgtcagcagaggctaatctcgccggccttttccccccaaatggtatgcaaagattcaaccctaatatttcatggcagcctattccagtgcacacagtgcccatcacagaggacagactgttaaaattcccactgggaccctgtccccggtacgaacagctacagaatgagacccgacagacccctgagtaccagaatgaatccagtcgaaatgcccagttcttagatatggtggctaacgaaactgggcttactgacttgacactggagaccgtgtggaatgtgtacgatacgctgttctgtgagcaaacgcatggattgaggctgcctccatgggcctctccccaaacaatgcagaggctgtccaggttgaaggatttctccttccggtttctcttcggtatataccagcaggctgagaaggcacggctgcaaggtggggtattgctggcacagatcagaaagaatttaacattaatggccacgacgtcacaactccccaaactgctggtttactccgcccatgacaccactctagtggcgctgcaaatggccctggatgtgtacaacggagagcaggctccatacgccagctgtcatatattcgagttgtatcaagaggactcaggcaacttttccgtggagatgtacttccgcaatgaaagtgacaaagcgccatggcctctctccctgcccggatgcccccatcgatgtcctctgcaggacttcctcagactgacagaacctgtggtgcctaaggactggcaacaggagtgccagctggcaagcggcccagccgatacggaagtgattgtggccttagccgtatgcggatctatactctttctgcttatcgttctcttgctgactgtgctcttcaggatgcaggcgcaacctccaggttatagacatgtggccgatggcgaggaccacgcgtag

SEQ ID NO: 177620 - DNA, 1176 bp, synthetic construct
  misc_feature 1..1176: note = Description of Artificial Sequence: Synthetic coding sequence
  source 1..1176: mol_type = other DNA
atggccggcaagcggagcggctggagccgggccgccctgctgcagttgctgctcggcgtgaatttggtcgtgatgccacccacgcgcgctcgctccctcagattcgttacgctggaaggcatgctgcaacactgggagctcggccaggcactgagacagaggtaccacggttttttaaacactagctatcacaggcaagaagtttatgtgcggtccacggattttgatagaacccttatgagtgcagaggccaacctcgccggcctgtttcctcccaatggtatgcaaagattcaatccgaatatctcctggcagccaattccagtgcacacagttcccattaccgaggacagattattaaaattcccactggggccatgtccgcgttatgaacagctccagaacgagaccaggcaaacacccgaatatcagaacgagtcatctcgaaacgcccagttccttgacatggtagccaacgagactggcctcactgacctgaccttagagactgtgtggaatgtgtacgacacattattttgcgagcagacgcacggattgcggcttccaccgtgggcgtccccacagacaatgcagcggctcagtaggcttaaagattttagtttccgcttcctgtttggcatttaccagcaagcggaaaaagctcggctccaggggggagtgctcctggcgcagatcagaaagaacctgacacttatggccactacaagccaactccccaagcttctggtctacagcgcacacgatacaactcttgtagcactccagatggccctggacgtctataatggcgaacaggccccctacgcgtcttgccacatttttgagctgtaccaggaggattctggaaacttctctgtcgagatgtattttagaaacgagagtgacaaggcaccttggccactgagtctccccggttgcccccaccggtgtcctcttcaggacttcctgaggctcaccgaacccgttgtccctaaggactggcagcaggagtgccaactggcctcagggcctgcagacaccgaggtcatcgttgctttggccgtgtgtgggagcatattgttcctgttaattgtcctcctgttaaccgtcttgttccgtatgcaagcacagccccccggataccgccacgtggcagatggagaggatcatgcttag

SEQ ID NO: 177621 - DNA, 711 bp, synthetic construct
  misc_feature 1..711: note = Description of Artificial Sequence: Synthetic coding sequence
  source 1..711: mol_type = other DNA
atggtggccaacgagaccggcctgaccgacctgaccctggagaccgtttggaacgtctatgatactctgttctgcgagcaaacccacgggttgcggctgccgccatgggcttcaccgcagactatgcagaggctgagtagattgaaggattttagctttaggtttctgttcggtatctatcagcaggcagagaaggcgcgcctacagggtggtgtgcttttggcacagattcgcaaaaatttgacactgatggctacaacaagccagttaccaaaactgcttgtttactccgcccacgacactaccctcgttgctctgcaaatggcgttagatgtgtacaacggggagcaggctccctacgcctcttgccacatatttgaactctatcaagaggactcaggcaattttagcgtcgaaatgtacttcaggaacgaaagcgataaagcgccttggccactgtcattgcccgggtgtccccatcggtgccctctgcaggacttcctgcgccttaccgagccagtggtccctaaagattggcaacaggaatgccagctcgctagcggccccgctgacacagaggtcatagtagcactagcagtatgtggcagtattctctttttattgattgtactgctgttaactgttctctttcggatgcaggctcagcctcccggctacagacacgtagcggacggggaagaccacgcatag

SEQ ID NO: 177622 - DNA, 1242 bp, synthetic construct
  misc_feature 1..1242: note = Description of Artificial Sequence: Synthetic coding sequence
  source 1..1242: mol_type = other DNA
atggccggcaagcggagcggctggagccgggccgccctgctgcagctcttgctcggagtcaatctggtcgtgatgcccccgactagagctaggtccctgcggttcgtgaccctgctgtatcgtcacggtgacagatcccctgtgaaaacgtaccctaaggacccttaccaggaagaggaatggcctcagggatttggccagctgacaaaagagggaatgttgcagagatatcacggctttcttaatacatcttatcatcgccaagaagtttatgtgcgctctaccgactttgacagaaccctcatgtcagccgaagccaacctggccggactcttcccaccgaatggaatgcaacggtttaatccaaacatttcctggcaacctataccagtccacaccgttcccattaccgaagacagactgcttaaattcccattgggcccttgcccccggtacgaacagctgcagaacgaaactaggcaaacccctgaatatcagaacgagagtagtcgaaatgcccaattcctggacatggtcgccaatgagacgggcctgaccgacttaaccctggaaacagtgtggaacgtctatgacacacttttctgtgaacagactcatggactgaggctgccaccttgggctagcccacagacaatgcagaggctgagtcgcctgaaggacttttctttcaggtttctgttcgggatttaccagcaagcggagaaggcaaggctgcagggtggagtcttactggcccagatccggaaaaacttgaccttaatggctacgaccagccagctgccgaagttattggtctattcggctcacgacacgaccctcgttgccctccagatggcgctcgacgtttacaacggagaacaggccccctatgcatcctgtcatatattcgaactgtatcaggaggattcaggtaacttctccgtggagatgtacttccggaatgaatctgacaaggcaccctggccactgtctttgcccggttgcccacaccggtgcccccttcaggattttttgcggctgaccgagcctgtagttcccaaggattggcaacaggagtgtcagcttgcctccggacctgcagacaccgaggttatcgttgccttagccgtctgtggatccatcttgttcctgctgattgtcctccttttgactgttctttttcgaatgcaagcgcagccaccgggctaccggcatgtggcagacggagaggatcacgcctag

SEQ ID NO: 177623 - DNA, 978 bp, synthetic construct
  misc_feature 1..978: note = Description of Artificial Sequence: Synthetic coding sequence
  source 1..978: mol_type = other DNA
atggacatgtggaccgccctgctgatcctgcaggccctgctgctgccatctctggctgatggagccacacccgctctacgctttgtggcagtgggagactggggaggcgtgcccaacgcgcctttccatacagccagggaaatggccaacgcaaaggaaatcgcaagaacagtccagatcctcggagccgatttcatcctaagcttgggagataacttctattttaccggtgtacaggacattaatgacaaaagattccaggagacctttgaagacgttttcagtgaccggtcattgaggaaggtgccatggtatgttctagcaggcaaccacgaccatcttggaaatgtctccgcccagatagcttattctaaaattagtaagcggtggaattttccctcacccttctatcggctgcacttcaaaatcccacaaactaatgtctcagttgccatcttcatgctggacactgtgaccctgtgtggaaactctgatgactttttatcccaacagccagagcgtccccgggacgtcaaactggcccggacacagttgagctggctgaagaaacaactcgccgcagccagggaggactatgtgctggtggctggccactaccccgtgtggagcattgccgaacacggacctacccattgtctcgtaaaacagctcagacccttacttgcgacatacggcgttaccgcctacctatgtggtcatgaccacaacttacagtacctgcaggacgagaatggtgtggggtacgtgctgtcgggcgcagggaatttcatggacccaagtaagcggcaccagaggaaagttcccaacggctatctgcgatttcactacggcacagaggattccctgggggggtttgcctacgtggagattagtagtaaagaaatgaccgtcacgtatattgaggctagtggcaaatcactctttaagacacgattgccccgccgagcacgcccctag

SEQ ID NO: 177624 - DNA, 1239 bp, synthetic construct
  misc_feature 1..1239: note = Description of Artificial Sequence: Synthetic coding sequence
  source 1..1239: mol_type = other DNA
atgggcagcccctggaacggcagcgacggccccgagggcgcccgggagcctccatggcctgccttgcctccgtgtgatgagcggaggtgtagtccctttccactgggcgcgctcgtcccagtgactgccgtgtgcttgtgtctttttgtggtgggcgtgtcagggaacgttgttacagtgatgcttatcggccggtatagagatatgcgcaccacaaccaacctctacttggggtctatggcggtcagcgacctgctgatcttgctcggcctcccctttgacttgtaccggctgtggcgatcaagaccatgggttttcggccccctgctgtgtcggctgtctctgtacgtgggcgagggttgcacctacgccacccttttgcatatgaccgctctgagtgtggaaagatacttagccatttgccgacctctgagggcacgcgtgctggtgaccaggcgaagagtgagagcacttatcgcagtcctgtgggccgtggccttactgtccgccggtccctttttatttcttgtgggggtcgagcaagaccccggaatctctgtggtgcccggcctcaatggaacggcccgcatagcttcatctccactggccagtagtcctcccctgtggctgtcccgagccccaccacccagcccaccctctggccccgagaccgccgaggcagcagctctcttcagcagggaatgcaggccttcaccggcccagctgggcgctttaagggtgatgctatgggtcaccacagcttattttttcctgccttttctgtgcctgtctatactttatggccttatcgggcgagaactgtggtctagcaggcgccctttgcgcggccccgccgcaagtgggcgagagcgaggtcacagacagaccgttagggttttgctggtcgtggtgcttgcatttatcatttgttggttgccatttcacgtcgggcgcatcatatacatcaatacagaagattcaagaatgatgtatttctctcagtatttcaacattgtggcgcttcagctcttttatctgtctgcatccattaacccaatcctgtataatctgatttccaaaaagtatcgcgccgcagcatttaagttattgctggcaagaaagtcacgtcctcgcggctttcaccgaagccgtgacaccgccggtgaagtggctggtgacacggggggggatactgtgggatatacagagacgagcgccaatgttaaaacaatgggatag

SEQ ID NO: 177625 - DNA, 978 bp, synthetic construct
  misc_feature 1..978: note = Description of Artificial Sequence: Synthetic coding sequence
  source 1..978: mol_type = other DNA
atggacatgtggaccgccctgctgatcctgcaggccctgctgctgccttccctggcagacggagccacgcccgctctgcgattcgtcgcggtgggcgactgggggggcgtgccaaacgccccctttcacaccgcgagggagatggccaatgcaaaggaaattgctaggactgtgcagatcctgggagcggacttcattttgtcccttggcgacaacttttacttcaccggggtgcaggacattaatgataaacgctttcaagagacttttgaagatgtcttttctgaccgatcgctgcggaaggtcccttggtacgttctggctggcaaccacgaccaccttggaaacgtttccgctcagattgcttactctaagatctccaaacgatggaatttcccctctcctttttaccggctgcattttaaaatccctcagacaaacgtgtccgtggctatttttatgttagacacagtcaccttgtgcgggaactcggatgattttctgtctcagcagcctgagcgaccccgcgatgtgaaattggcaaggacccagctgtcatggctgaagaagcagctcgctgccgcacgtgaggactacgtcctcgtcgcaggacactacccagtgtggtccatcgccgagcatggtccgacacactgcctggtgaaacagcttaggcccctcctggcaacttacggggtcaccgcatacctctgtggccatgaccacaatttgcaatatttacaagacgagaatggggtgggatatgtcctctcaggggccggaaacttcatggacccatcgaaaaggcaccaaagaaaagtacccaacgggtacctaagattccattacggaactgaggatagcctgggaggcttcgcatacgtggaaatttcctccaaagagatgacggttacttacatagaagcttctgggaagagcctctttaaaacacggctgccccgcagggcacggccctag

SEQ ID NO: 177626 - DNA, 978 bp, synthetic construct
  misc_feature 1..978: note = Description of Artificial Sequence: Synthetic coding sequence
  source 1..978: mol_type = other DNA
atggacatgtggaccgccctgctgatcctgcaggccctgctgctgccttcactggccgacggtgctaccccagctttaaggttcgtggctgtaggcgattggggaggcgtaccgaacgccccattccacaccgctcgcgagatggcaaacgcaaaagaaatcgccagaacggtgcagattctaggagcagattttattctgagtttaggcgacaatttctatttcaccggggtccaggacataaacgacaagcgcttccaggagacttttgaggacgtgttttctgatcgttcccttcgaaaggttccatggtacgtactggctggaaatcacgatcaccttggaaatgtgagtgcccaaatcgcttactccaagatcagtaagaggtggaacttcccaagccccttctacagattgcactttaaaatcccccagacgaacgtgagcgttgctattttcatgctggatactgtgacgctttgtggtaacagtgacgacttcctgtcacagcagccggagcggcccagggatgtcaaactcgcaagaacccagttgtcgtggcttaagaaacagctggcagcggcacgcgaggattacgtcttggtggcggggcattaccctgtttggtccatcgctgagcatggccctacccattgcctggtcaaacagcttaggccactgcttgccacttacggggttacagcttatctgtgcggacacgaccataatctgcagtacctccaggacgagaacggcgtgggctacgtgcttagcggcgccggaaattttatggacccctcaaagagacaccaacgcaaggtaccaaatgggtacctgagattccactatgggaccgaagattctctgggtggttttgcatatgtcgagatttcctccaaggaaatgacagtcacctacatcgaagcatcgggtaaatcactgtttaagacccgcctgccacgacgcgcacgcccttag

SEQ ID NO: 177627 - DNA, 1161 bp, synthetic construct
  misc_feature 1..1161: note = Description of Artificial Sequence: Synthetic coding sequence
  source 1..1161: mol_type = other DNA
atgcgggccgcccccctgctgctggcccgggccgccagcctgagccttggattcctttttctgttatttttctggttggatcgctccgtactggctaaagaattaaagttcgtgaccctagtgttcaggcacggtgaccgatctcccattgacacatttcctactgatcccattaaggaatccagctggccacagggttttggccagctcactcagctgggaatggagcaacactacgaactgggggagtatatccggaagagataccgcaagttccttaacgagagctacaagcatgaacaggtctatataaggtcgaccgacgtcgaccgaactctcatgtccgccatgacgaacctggccgctcttttcccaccagaaggagttagcatctggaatcccatcttactctggcagcctatcccggtgcacaccgtgcccctgagtgaagaccagttgctgtacctcccattccgcaattgtcctcgcttccaagagctcgagtcggagactctcaaaagcgaggaatttcagaaacgcctgcatccgtacaaggatttcattgcaaccctgggaaagctgtctggcctgcacggacaggacctgtttgggatttggtcgaaagtatatgatcctctctattgcgagagtgtacacaactttactcttccgtcgtgggccaccgaggacaccatgacaaaactccgggaactttcagaactttccctgttgtcgctgtatggaatccataagcagaaggagaaaagcaggctccaaggcggcgtactggtgaacgagattttaaaccacatgaaacgggcaacacagataccctcatataagaagctaatcatgtattcggcccacgacactacagtgagcggtctgcagatggcccttgacgtgtacaacgggcttctaccaccttacgctagttgccatctgactgaactgtattttgagaagggcgagtacttcgtcgaaatgtattacagaaacgaaacacagcacgagccttatcctttaatgcttccaggatgctccccctcatgcccgctcgagaggtttgcagagctggtcggaccagtgattcctcaagactggtccactgagtgcatgacaactaattctcaccaggggacagaggactctaccgactag

SEQ ID NO: 177628 - DNA, 1257 bp, synthetic construct
  misc_feature 1..1257: note = Description of Artificial Sequence: Synthetic coding sequence
  source 1..1257: mol_type = other DNA
atgcgggccgcccccctgctgctggcccgggccgccagcctgagcctgggcttcctctttttactcttcttctggcttgacaggagtgtacttgctaaggagctgaagttcgtcaccctcgtcttccgacacggggatcgcagccctatcgataccttcccaacagaccccatcaaggaatctagttggcctcagggttttgggcagctgacccagcttgggatggagcagcattatgagctgggagaatacatccgcaagaggtaccgcaagtttcttaacgaatcttacaagcacgagcaggtctacataaggagcaccgacgtagaccggacgcttatgtccgccatgacgaatctggcagcactttttccccccgaaggagttagtatttggaacccaatcttactgtggcaaccaataccagttcatacagtgcctctatctgaagaccagcttctctacttgccgttcaggaactgtccaagattccaagagctggaaagtgaaaccctgaagtccgaggagttccagaaacggctccacccatataaggacttcattgcaacgctcggcaagctgagtggtctgcacggacaagatttgttcgggatctggtcaaaagtttatgatcccctttattgcgaatctgttcacaatttcaccctgccttcctgggctactgaggacactatgacaaaactccgagaactgtccgagctttctttgctctcattgtacgggatccacaagcagaaggagaaatctaggctgcaggggggagtgctggttaacgagatcctaaaccacatgaagcgagccacacagatccccagttataagaaactgatcatgtatagtgcgcacgatacgacagtgagcggtttacaaatggctttggatgtgtataacggcttgctccctccatatgcgtcatgtcacctgactgagctgtacttcgagaagggggaatatttcgtggagatgtactaccgaaacgagacccagcacgaaccctaccctttaatgttaccagggtgctccccatcgtgtcctctggaaagatttgcggaacttgtgggcccagtcatcccccaggattggtcgacagagtgtatgacaactaactctcaccaggttctcaaggtcatatttgctgtggcattttgtctcatcagtgccgtactgatggtcctgctgttcattcatatcagaagagggttatgttggcagcgggaaagctatgggaatatttag

SEQ ID NO: 177629 - DNA, 1281 bp, synthetic construct
  misc_feature 1..1281: note = Description of Artificial Sequence: Synthetic coding sequence
  source 1..1281: mol_type = other DNA
atggccggcctgggcttctggggccaccccgccggccccctgctgctgctgctgctccttgtgctcccgccccgtgccctccctgaggggcctctggtttttgtggccctggtctttcgtcacggcgatagagctccattggcctcctaccccatggacccccacaaagaggtggcttccactctgtggccaagaggccttggccagctcaccaccgagggagtcaggcagcaactggagttaggccggttcttgcggtcaaggtatgaagctttcctgtctcctgaataccgccgagaggaggtctacattcgtagcaccgacttcgatcgtactctcgagtcagcccaagctaatctcgccggcttatttcccgaggcagccccagggagccccgaggcacgctggcgacccattcctgtgcacacagtgcccgtggccgaggacaagcttttgagattcccaatgcgcagctgtcctagataccacgaattactgcgggaggccaccgaggctgccgaatatcaggaggccctggaggggtggactgggtttctcagccgcctagaaaatttcacaggactgtctttggtcggagagcctctccgccgcgcatggaaggtcctcgacacacttatgtgccagcaggcacatggcctgccactccccgcatgggcctcgcccgacgtgctgaggacattagcccaaatttccgctttggatataggagcacatgtcggaccccccagggcggcagagaaggcacagcttaccggcggcattctgttgaacgcaattctggccaacttcagtcgggtgcagcgactgggcctgccgttgaagatggtgatgtactcagcccatgactctactctgttggctctgcaaggcgctctgggtttatatgatggccatactccaccatatgctgcatgtcttgggttcgagttccgcaaacacctcggcaaccccgcgaaagacgggggaaacgtgactgtgagcctgttttatcgtaacgattcagcccatctaccacttcctttatccctgccaggatgccctgcaccctgccctctcggaaggttttatcaactgaccgcgcccgcgcgccctccagcacatggagtatcctgccatgggccctacgaagccgccattcctcccgccccagtcgtccctctgctggcaggtgcggtcgccgttctggtggcactgagcttgggattgggactattggcttggcggccaggctgtcttagggcgctgggcgggcctgtctag

SEQ ID NO: 177630 - DNA, 1002 bp, synthetic construct
  misc_feature 1..1002: note = Description of Artificial Sequence: Synthetic coding sequence
  source 1..1002: mol_type = other DNA
atggccggcctgggcttctggggccaccccgccggccccctgctgctgctgctcctgctggtcttgccacctcgtgccctgcccgagggaccactcgtattcgttgcactcgtgttccgccatggcgatcgagctcccctggcgtcctacccgatggatcctcataaggaagtcgcctcgacgctttggccccgggggctgggtcagctgacaaccgagggagtgcgacagcagctggagctgggccgtttccttagatccagatatgagggtttcctgtcacggctggagaatttcaccggactgtccctggtgggggagcccctgcggcgcgcatggaaagtcctggatacattaatgtgccagcaagcgcacggtctgcctttaccagcctgggcatcccccgacgtgttgagaacactggcccaaatctctgcacttgacatcggagctcatgttggcccgcccagagcagccgaaaaagcccaactgaccggaggcattctcctcaacgccatcttggctaactttagccgggtgcagaggctcggcttgcccctgaagatggtcatgtatagtgcccacgattccaccctgttggctctgcagggggccctcggcctctacgacgggcatactccaccttacgcagcctgcctggggttcgaatttcgtaagcacctcggcaaccccgccaaggatggcggaaacgtaacagtgagcttgttctaccggaatgactccgcccatctgccactgcctctcagcctgcctggctgccccgcaccttgtcccctcgggcgcttctaccagctgactgcacctgcccgaccgcccgcccacggtgtctcctgccacggaccttatgaggccgcgataccacccgcacccgtggtgccgcttctggcgggggccgttgcggtgctggtcgcgttgtcgttaggccttggtctgcttgcttggaggcccgggtgtttgagagctctgggaggaccggtgtag

SEQ ID NO: 177631 - DNA, 633 bp, synthetic construct
  misc_feature 1..633: note = Description of Artificial Sequence: Synthetic coding sequence
  source 1..633: mol_type = other DNA
atggagatgggccggcggatccacctggagctgcggaaccggaccccgtcggacgtaaaggagctcgtactagataactctagatccaacgaggggaaactagaaggtctgactgatgaattcgaagagctggaatttctgtccactatcaatgtggggttgacatccattgcgaacctccccaaactgaataaactgaaaaagctggaactgtcagacaatcgggtgtcaggtggcctggaagtgctggccgagaaatgtcctaatctcacacaccttaatttaagtggaaacaaaatcaaggatcttagtactatcgaaccgcttaaaaagctggagaatctgaagtctctcgacctgttcaattgtgaggttaccaatctcaatgattaccgagaaaacgtgtttaaactgctccctcagcttacttacttggacggctacgaccgggacgacaaagaggcccccgacagcgatgctgaggggtatgtggagggactcgatgatgaggaagaggatgaggacgaagaggagtatgatgacgaggagggctacaacgatggtgaagtcgacgacgaagaggacaagaaaaagaagaaaaaaaagaaaaagaaaaagaagaagaaaaagtag

SEQ ID NO: 177632 - DNA, 750 bp, synthetic construct
  misc_feature 1..750: note = Description of Artificial Sequence: Synthetic coding sequence
  source 1..750: mol_type = other DNA
atggagatgggccggcggatccacctggagctgcggaaccggaccccttcggatgttaaagagttggttctcgataacagcagatctaacgagggcaagctcgaaggtctgactgatgagttcgaggagctggagttcctgagcacaatcaatgtgggactcacgtcaatagccaacttgcctaaactgaataaattgaagaagctggagttatccgataaccgggttagtggaggtcttgaggtgctggcagagaagtgcccgaatttgactcatctcaacctgagcggcaacaaaatcaaggatctttctacaattgagcccctcaagaaactggaaaatctcaaatcattagatctcttcaactgcgaagtgactaatctgaacgattatagagagaatgttttcaaactgctgccccagcttacttacttagacggttacgaccgagacgacaaggaggcaccagatagcgatgcggagggctacgtggaggggttagacgatgaggaagaagacgaagatgaagaagagtatgacgaggatgctcaggtggtggaggacgaagaagatgaggatgaggaagaggagggggaggaggaggacgtttctggagaggaagaagaagatgaggaggggtacaacgatggcgaggttgatgacgaggaagatgaagaggagctgggcgaggaagagcgcggacagaagcggaagagggaaccagaggacgagggcgaggacgacgattag

SEQ ID NO: 177633 - DNA, 396 bp, synthetic construct
  misc_feature 1..396: note = Description of Artificial Sequence: Synthetic coding sequence
  source 1..396: mol_type = other DNA
atggagatgggcaagtggatccacctggagctgcggaaccggaccccatcagatgtgaaagagctttttcttgacaacagtcagagtaatgagggcaaactcgagggactgacggacgagttcgaagagctggaactgctcaatacgattaacatcggactcaccagtatagccaacctgcctaaattgaacaaacttaagaaattagagttatcgagtaatcgggcttcagtggggctggaagtgctggccgagaaatgccccaatctgattcatcttaacctgtctggtaataagattaaggacctatccaccatcgagcctcttaagaagctagagaatctggagtctctggacttgtttacctgcgaagtgacaaatcttaataattattag

SEQ ID NO: 177634 - DNA, 807 bp, synthetic construct
  misc_feature 1..807: note = Description of Artificial Sequence: Synthetic coding sequence
  source 1..807: mol_type = other DNA
atggagatgaagaagaagatcaacctggagctgcggaaccggagccctgaagaagtcacagaactcgttcttgacaattgcctttgcgtcaacggggaaattgagggcctgaatgacacattcaaagaactggagttcctgtcaatggcaaacgtcgaactttcctctttggctagattgcctagcctgaacaaactgcgcaaattagagctgtctgataacatcatctctggtggcctggaagtcctcgctgagaagtgtccgaatcttacatacctaaacttatcaggaaacaagatcaaagatctctcaaccgtagaggccctgcagaacttgaaaaatctgaagtcattggacctattcaactgcgagataacaaacctcgaggactatagagagtcaatctttgagctgctccaacagatcacctacctcgacggctttgaccaggaggacaatgaggccccggactcagaagaggaagacgacgaagacggcgacgaagacgatgaagaggaggaggagaatgaggccggtcccccagaagggtacgaggaggaagaggaggaagaggaagaagaggacgaggacgaggacgaggatgaggacgaagctggatcagagctgggtgagggggaagaagaggttgggctgagttatctgatgaaagaagagatccaggatgaagaggacgatgacgactatgttgaggaaggggaagaggaagaggaggaagaggagggagggcttagaggagaaaaaaggaaacgagacgcagaagacgatggcgaagaagaggatgattag

SEQ ID NO: 177635 - DNA, 411 bp, synthetic construct
  misc_feature 1..411: note = Description of Artificial Sequence: Synthetic coding sequence
  source 1..411: mol_type = other DNA
atggagatgaagaagaagatcaacctggagctgcggaaccggagcccagaggaagaggacaacgaggcccccgactcagaggaggaagatgatgaggatggagacgaagacgacgaggaagaggaagaaaacgaggcagggccacccgaggggtatgaggaagaagaggaggaggaggaggaagaagatgaggacgaagacgaagacgaagatgaagccggttcagaactgggcgaaggggaggaggaggtcggtttgtcatacctcatgaaagaggagatccaagacgaagaagacgatgacgactacgtggaggagggagaggaggaggaggaagaggaggagggcggtctgagaggcgagaagagaaagagggacgcggaagatgacggagaagaggaggacgactag

SEQ ID NO: 177636 - DNA, 663 bp, synthetic construct
  misc_feature 1..663: note = Description of Artificial Sequence: Synthetic coding sequence
  source 1..663: mol_type = other DNA
atggccaacgtggagctgagcagcctggcccggctgcccagcctgaataagctcaggaagttggaactcagcgataacattatttcgggaggcttggaagtgctcgccgagaagtgcccaaacctcacgtatttgaatcttagtggtaacaagattaaagatctgtccaccgtggaagccctccagaatctcaaaaatctcaaaagcttagatctgttcaactgcgaaatcacaaatctggaggactaccgggaatctatctttgagttattacaacaaataacctatctagatggcttcgaccaggaggacaacgaagctccggattcggaggaggaggatgatgaagacggagacgaggacgacgaggaagaggaagagaatgaggccgggcccccagagggttatgaggaagaggaggaggaagaggaagaagaggacgaggacgaagacgaagacgaagacgaggcgggttctgagctcggggaaggtgaagaagaggtgggcctttcttacctgatgaaggaagaaattcaggatgaggaagacgatgatgactacgttgaggagggtgaggaggaggaggaagaagaggagggtggactccggggcgaaaaacggaagcgagatgcggaagacgacggggaggaagaagatgattag

SEQ ID NO: 177637 - DNA, 684 bp, synthetic construct
  misc_feature 1..684: note = Description of Artificial Sequence: Synthetic coding sequence
  source 1..684: mol_type = other DNA
atggagatgaagaagaagatcaacctggagctgcggaaccggagccccgaggaagtcaccgagcttgtcctggacaattgcctgtgtgtgaatggtgagattgagggtcttaatgacaccttcaaagaactggaatttctctcaatggcaaacgttgaattgtcttcgctagcccgtctgcccagtctgaataaacttcgcaagcagaatttaaaaaacctcaagtcccttgacctgttcaattgtgaaatcacaaatttggaggactatcgcgagagtatttttgagttgctccagcaaattacctatctggacgggttcgatcaagaggacaacgaggcccctgactcggaagaagaagacgatgaagatggtgatgaggatgacgaggaggaagaagagaacgaggctgggcccccggagggatatgaagaggaggaagaagaggaagaagaagaggatgaagatgaagacgaagatgaggacgaagccgggtcagagctcggcgagggggaggaggaggtgggcctgtcatatctgatgaaagaggagatacaggatgaggaggacgacgatgattacgtcgaagagggcgaggaggaagaagaggaagaagagggtggcctgcggggagaaaagcggaagcgggacgctgaggatgacggagaagaggaagatgattag

SEQ ID NO: 177638 - DNA, 2076 bp, synthetic construct
  misc_feature 1..2076: note = Description of Artificial Sequence: Synthetic coding sequence
  source 1..2076: mol_type = other DNA
atggacggctgcaagaaggagctgccccggctgcaggagcccgaggaggacgaggattgctacatcctgaatgttcaaagctccagcgacgatacgtcgggtagctcagttgccagacgggcccccaaaaggcaggcctcttgcatcctgaacgtacagtctcgcagcggggatacatcaggatccagcgttgctcgtcgcgcacctaagcgtcaagccagcagtgtggtggtcatagactcagactctgacgaggagtgccacacacacgaagaaaaaaaggcaaagctgttggagatcaacagcgatgacgaaagccccgaatgctgtcatgtgaagcctgcaatccaggagccacctattgtcatttcggatgacgacaatgacgatgacaatgggaacgatcttgaggttcctgacgataacagcgacgactcagaagcgcccgacgataattcagacgattccgaagcacctgacgacaactccgacgactccgaagcccccgatgacaactccgacgattctgaggcacccgatgacaatagtgacgactcagatgtgcccgatgataactctgacgattcttcagatgataacagcgacgacagctctgacgacaattccgatgactcggacgtgcctgatgataagtccgatgatagtgacgtcccagatgacagcagtgacgatagcgatgtgcccgacgactccagtgacgactcggaggctcctgatgacagctccgacgacagtgaggccccggacgattcctctgatgattccgaagcgcccgatgacagcagtgatgacagcgaagcgccagatgattcctccgatgatagtgaagcaagtgatgattctagtgatgacagcgaggccagtgacgactcttcagatgactctgaagccccagacgataaatcggacgactctgatgtccccgaagataaatccgatgacagcgacgtcccagatgacaactctgatgacctcgaggtgccagtgcccgcagaagacctgtgtaacgagggacagattgccagcgatgaagaagagctagtggaggcggccgctgcagtctctcagcacgattcaagcgacgatgcgggagagcaggacctgggcgaaaacctatctaaacccccaagcgatcccgaggctaaccccgaagtgagcgaaaggaagctgcctacagaggaagagcctgctccagtggtcgaacagtcaggcaaaagaaagagcaagactaaaaccatcgtcgaaccaccccggaaacgtcaaacaaaaaccaaaaacattgtggagccgccacgtaaacggcaaacaaaaaccaagaacatcgtagagccactgagaaaacggaaagccaaaactaagaacgtgtcggtaacccctggccataagaaacgtggcccatctaaaaagaaacctggggctgctaaagtggagaagagaaagaccaggacccctaaatgtaaagttcctggttgttttctgcaagaccttgaaaagtctaagaaatattcaggaaaaaatctcaagagaaacaaagacgagcttgtgcagcggatttatgacctgttcaatcggtctgtttgcgacaaaaaactgccagaaaagctacggatcggttggaacaacaagatggttaaaactgctggcctatgttccacgggtgagatgtggtatcccaagtggcgcaggtttgcaaagattcagatcggcctcaaggtatgtgattccgcggaccgcatccgcgacactctgattcacgaaatgtgccatgcagcctcttggctcatcgatggtatacacgactcccacggagacgcgtggaagtattatgcccgcaaatccaaccgaatccaccccgagttaccaagagtgactcgctgtcataattataaaattaactacaaagttcactacgaatgcactggatgcaaaacccgaattgggtgctatacaaagtctctcgatactagtagattcatctgtgccaagtgcaaaggaagtctggtcatggttcctctgacacagaaggacgggactcgtattgtgccccacgtctag

SEQ ID NO: 177639 - DNA, 2076 bp, synthetic construct
  misc_feature 1..2076: note = Description of Artificial Sequence: Synthetic coding sequence
  source 1..2076: mol_type = other DNA
atggacggctgcaagaaggagctgccccggctgcaggagcccgaggaggacgaagattgctacatactcaatgttcagtctagctccgacgacacatctggctctagcgtcgcacggagagccccgaagaggcaagccagctgcattctgaacgtccagagcagatccggggacacatctggtagctccgtggctagaagggccccaaagcggcaagcctcgtctgtggtagtgatagactccgattcagatgaggagtgccacacacatgaagagaagaaagcaaaacttttggaaattaactcagacgacgaaagtcctgagtgttgtcacgtgaagccagccattcaggagcctcccatagtgatcagcgatgatgacaatgatgacgacaatggaaatgatctggaagtccctgatgacaattcggatgacagcgaggcacccgacgacaactcagatgacagcgaagcccctgacgataactctgatgacagtgaggccccagatgacaatagcgacgactccgaagcacctgacgacaacagtgatgattctgacgttcccgatgataatagtgatgacagttctgacgacaattcggatgactctagcgatgacaactctgacgactctgatgtgccagacgataaaagtgatgatagcgatgtacctgacgactctagcgacgacagcgatgtccccgatgactcgtctgacgatagtgaagcaccagacgattccagcgatgattccgaggccccagacgattcgagcgacgattccgaggccccagatgattcttctgatgacagcgaggcgccagacgacagctcagacgattcagaagccagcgatgattcatctgacgattctgaagcatccgacgacagtagcgatgactctgaggccccagacgataagagtgacgactcagatgtgccagaggacaagtcggacgactccgatgtgccagatgataattctgatgatttagaagttcccgtccctgccgaggacctgtgcaacgagggccagatcgcgtccgatgaagaagagctggttgaggcagctgctgcagtgtcgcagcacgattccagtgatgatgctggagagcaggatctgggggagaacctgtccaagccaccctcagatcccgaagccaaccctgaggtgtccgagcgcaagttgccaaccgaagaggagccagcgcccgtagtggaacagtcgggaaaacgaaagagcaagacaaaaactatagtagagcctccgagaaaacggcagaccaagaccaagaacattgtagagccccctaggaaacggcaaacgaaaaccaaaaacattgtcgagcccctgcggaagcgaaaagccaaaacgaagaatgtgtccgtgactccgggacataaaaagcgtggtccctccaagaaaaaacccggggccgccaaggtggagaaaagaaagacacggacaccaaaatgcaaggtgccaggctgcttcctgcaggacctggaaaagagcaaaaaatactctgggaagaatttgaaaagaaataaggacgaactggttcaacggatctacgacctgtttaatagaagtgtgtgcgataaaaaactgccagaaaagctgagaattggctggaataataagatggttaagacggcaggcctgtgtagcaccggggagatgtggtatcccaaatggcgccggttcgctaaaatacagattggactcaaagtgtgcgacagtgccgaccgtatccgcgataccttgattcacgagatgtgtcatgccgcctcatggcttatcgatgggatacacgattctcacggggatgcctggaaatattatgcccggaagtccaaccggatccatcccgaacttccccgcgtcactcgatgccataactacaaaatcaactataaggtgcattatgaatgcacgggatgcaaaactcgtataggatgctacaccaaaagtctggatacttcacggtttatctgcgcaaagtgcaaggggagcctggttatggtccccctgactcagaaggacggtacaaggatagtgcctcacgtatag

SEQ ID NO: 177640 - DNA, 540 bp, synthetic construct
  misc_feature 1..540: note = Description of Artificial Sequence: Synthetic coding sequence
  source 1..540: mol_type = other DNA
atggtgcaggcctggtacatggacgacgcccccggcgacccccggcagccccacaggcccgaccccgggcgaccagttggtctggaacagctgcggcggctgggtgtgctttattggaagctggatgctgacaaatacgaaaacgatcccgaactggagaagattagacgcgagcgcaactattcgtggatggacattatcacaatctgcaaagacaaattgccaaattatgaggaaaaaatcaagatgttttatgaagagcacctacatctcgatgatgaaatacgctatatcttggatggcagtggatacttcgatgtgagggacaaggaagatcagtggatcaggattttcatggaaaaaggcgatatggtcaccttgccggccggcatctatcatcggttcacagtggacgagaaaaattacaccaaggctatgcgattgttcgtcggagaaccggtgtggacagcttacaaccggccagcggatcacttcgaagcccggggtcagtacgttaaatttctggcacagactgcttag

SEQ ID NO: 177641 - DNA, 2670 bp, synthetic construct
  misc_feature 1..2670: note = Description of Artificial Sequence: Synthetic coding sequence
  source 1..2670: mol_type = other DNA
atgagcaaccccttcgcccacctggccgagcccctggaccccgtgcagccgggcaaaaaattttttaatctgaataagttagaggactcccgctacggcaggctcccattcagcatacgagtgctgctggaggccgccatacggaactgtgatgagtttctggttaaaaaacaggatattgagaacatccttcactggaatgtcacgcaacacaaaaatatagaggtgcctttcaaacctgctcgggtcattctgcaggacttcacaggggtgcccgcggttgtggattttgcagccatgagggacgctgtgaagaagttagggggcgaccccgagaaaattaacccggtgtgtcctgctgatctcgtgatcgaccactccatccaggtggatttcaatcggcgggccgactccctgcagaagaaccaagacctggaatttgaaaggaatagagagaggttcgagttcctgaagtgggggagtcaggcattccataacatgcgtatcattcctccaggctctggcattatacaccaagtaaacctcgaatacttggcacgggtcgtcttcgaccaggatggatattactatcctgattctctcgtcggcaccgacagccataccacaatgattgacgggctcgggatcctgggctggggcgtgggaggtattgaggctgaggctgtgatgttggggcagcctatctcaatggtgctgccacaggtgatcggttatcggcttatggggaagcctcaccctctggtgacatccaccgacattgtcctcacgataaccaagcatctccggcaagtgggcgtagttggtaagtttgtggagttttttgggccgggcgtggctcagctcagcatcgccgacagagctaccatagcaaatatgtgtcctgagtatggcgccactgcagcctttttccctgtggacgaggtgagcatcacctatctggtacagacaggccgagacgaggaaaagcttaaatacattaagaagtacctccaagctgttggaatgtttcgcgatttcaatgaccctagtcaagatcccgatttcacgcaggtcgtggagctggacctgaagaccgttgtgccttgttgtagcggacccaagcggccacaggacaaagtagcagtctccgatatgaaaaaggactttgagagctgtctgggggcaaaacaaggctttaagggatttcaggtcgccccggaacaccataacgatcacaaaacttttatatacgataatacggaattcaccctcgcccacggaagcgtggtgatcgctgcaatcacaagctgcacaaatacgtctaacccgagcgtgatgctgggcgcaggcctgctcgcgaaaaaggccgtggacgccggactcaacgtgatgccctacatcaagacatccctgtcaccggggtctggtgtggtgacatattatctccaagagtctggcgtgatgccttacctatcccaattgggcttcgacgtcgttggctacggatgtatgacttgcatcggcaactccggccctctgcccgaaccagtagtagaggctatcacccaaggagacttggtggctgtgggcgttctctccgggaatcgcaactttgaagggagagtccaccccaacacacgggcaaactatctcgccagcccaccactcgtgatcgcttacgccatagccgggaccattaggatcgattttgaaaaggagccgctcggggtcaacgccaaggggcagcaggtgttcctgaaggacatttggccaactcgagacgagattcaggctgtcgaacggcaatacgtcattcccgggatgttcaaggaggtttatcagaagattgaaactgtgaacgagtcctggaatgccctcgctaccccctcagataaactctttttctggaattcaaagtcaacctatatcaagagtccgccctttttcgagaatctaactctggatctgcagccaccaaaatccattgttgatgcctacgtactgctgaacctgggtgactccgttacaaccgaccacatatccccagcaggcaacatcgctaggaactccccggctgctaggtatttgacaaatcggggcttgacacccagggagttcaatagctacggttccagaaggggcaatgacgctgtgatggcccgtgggacatttgccaacatcaggcttctgaacagatttttgaacaaacaggcccctcagactatccacctcccttcgggtgaaattttagacgtgttcgacgctgccgaaaggtaccaacaggccggcttgccactgatcgtccttgccggaaaggagtatggggccgggtcgtccagagactgggccgccaagggaccattcttgcttgggatcaaagcagtactggccgagtcatacgaacgcattcacagaagcaacttggtcggtatgggtgtgattccactggagtacttacctggggaaaatgccgatgcactcgggctaaccgggcaggagagatatacaattattatacccgagaacctgaagccacagatgaaagtccaggttaaactcgatactggaaagacctttcaagctgttatgagatttgacacagatgtggaacttacatactttctgaacggtgggattttgaactatatgattcgcaagatggccaaatag

SEQ ID NO: 177642 - DNA, 1305 bp, synthetic construct
  misc_feature 1..1305: note = Description of Artificial Sequence: Synthetic coding sequence
  source 1..1305: mol_type = other DNA
atgagcaaccccttcgcccacctggccgagcccctggaccccgtgcagccggggaagaagttcttcaacctcaataaactagaggattccagatacggacgcctccccttctctattcgtgtgctgctagaggccgcaattcgcaactgcgacgagtttctggtaaagaagcaagacatcgagaatatcctgcattggaatgtgacacaacacaagaatattgaggtccccttcaagcccgccagggtcatcctgcaggattttacaggagtccccgcggtcgtggattttgctgctatgcgcgacgccgttaaaaagctggggggggaccctgaaaagattaatcctgtgtgtccggccgacctcgttattgatcactccattcaggttgacttcaataggagggcagattccctccagaagaaccaagatttagagtttgaacggaaccgggaaagattcgagtttctaaagtggggcagccaagcattccataacatgaggatcatacccccaggctctgggataatccaccaggtgaacctggagtacctggcaagggttgtcttcgatcaagatggctactactaccctgattctcttgtgggtaccgattctcataccacaatgatagacggcctaggaatcctgggatggggcgtgggaggaatcgaggccgaggcggtgatgctgggccagcccatcagcatggtgctgccacaggtgatcggctacaggctgatgggcaagccccaccctctcgtgacctcaacagacattgtgctgacaataaccaagcacctgaggcaggtgggagtagtgggcaaatttgtggagtttttcggccccggggtggcccagcttagtattgctgaccgggctaccatcgccaacatgtgtcccgagtacggcgccacagccgcctttttccctgtcgacgaagtatcaataacttatctcgtgcaaactgggagggatgaagagaagctgaaatacatcaagaaatatctgcaagccgtggggatgttcagggactttaatgaccccagtcaggacccagatttcacccaggttgtcgagctggacctgaagaccgtcgtgccatgctgcagtggcccaaagcggccccaggataaggttgccgtctccgacatgaaaaaggacttcgaaagctgcctcggcgcgaagcagggctttaagggcttccaagtggcacccgagcatcataatgatcacaagacttttatttatgacaataccgaattcacactagcacatggcagcgttgtgattgccgccctctag

SEQ ID NO: 177643 - DNA, 2670 bp, synthetic construct
  misc_feature 1..2670: note = Description of Artificial Sequence: Synthetic coding sequence
  source 1..2670: mol_type = other DNA
atgagcaaccccttcgcccacctggccgagcccctggaccccgtgcagcctggaaagaaatttttcaacctaaataagcttgaagactctcgctatggcagattgcctttttcaatcagggtgctgctggaggcagccataaggaactgcgatgaattcttggttaagaaacaggacatcgaaaatatcctccactggaatgtgacacagcataagaacattgaagtgccatttaaacctgctcgggttattctccaagacttcacaggagtccctgccgtcgtggacttcgccgccatgcgtgacgcagttaaaaaacttggaggtgacccagagaagattaaccccgtttgcccagcggatctggtgattgatcattcaatccaagtcgactttaaccgacgggccgattcacttcagaagaatcaggacctcgaattcgagcggaatcgtgaacgatttgagttcttaaagtggggctcccaggcttttcacaatatgcgcattattcctccagggtccgggataatccaccaggtgaatttagaatacctggcacgggttgtgtttgaccaagatgggtactactacccagactctttggtggggacagacagccacactactatgatcgatggattaggcatactgggatggggcgttggcgggatcgaggctgaagcggtgatgctcggacaacctattagcatggtacttcctcaggttatcggttaccggcttatgggcaagccccatcctcttgttacttccactgacatcgttctaactattactaagcacctgcggcaggtgggagtggtcggaaagttcgtggaattttttgggcccggggtggcccagctgagcatagcagatagagcaacaatcgccaatatgtgtcctgagtatggcgctacggccgcgttcttcccagtagatgaggtgtctattacctatctggtgcagacagggagggacgaagaaaagttgaagtatataaagaagtacttgcaagccgtggggatgtttcgtgattttaatgatccaagccaggatcctgatttcacgcaagtggttgaactcgaccttaaaactgtggttccttgctgtagcggcccaaaaaggccacaggataaggtcgccgtctctgatatgaagaaagacttcgagtcctgcttgggggcaaagcaggggtttaaaggctttcaagtggcacccgagcaccacaacgatcacaagacatttatatacgataatacagaattcaccctcgcgcatggaagcgtggtgatagccgcaatcacgagctgcaccaacacttccaaccctagcgtgatgctcggtgctggcttgctggccaaaaaagccgtcgatgccggcctgaacgtcatgccctacattaagacctctctaagtcccggctctggggttgtgacctattatttgcaagaatctggcgttatgccgtacctatcacagctaggctttgacgtggtcggatacggctgcatgacttgtataggcaattccggaccacttccggaaccggtggttgaggccattacacagggtgatctcgtggccgtgggtgttctttcaggcaatcgcaacttcgaaggaagggtgcaccctaatacacgggcaaattacctcgcctcccctcctctcgtaatcgcctatgcaatcgcaggtacaatacgcattgactttgaaaaggagcctcttggtgttaacgcaaaaggacagcaagttttcttgaaagatatctggcctacacgagacgagatacaagctgtggagagacaatatgtcatccctggcatgttcaaggaggtatatcaaaagatcgagaccgtcaatgaaagctggaacgcactggctaccccttcagataaattatttttctggaattcaaaatctacctacataaagtcacccccattttttgaaaatttaactctcgatcttcagcctcccaagagcatcgtggatgcttacgttctgttgaatctgggagactctgtcacgacggaccatatctcgcccgccggaaacatcgcacgaaactcacctgccgcccgctatctgaccaaccgtgggttgacgcctagagaatttaactcctatggaagccgccgcggtaatgatgcagtcatggctcgggggacatttgccaatattaggctgctgaatagatttctgaacaaacaggctccccagaccatccacttgccctcaggcgaaatcctggatgtatttgacgccgcggaaaggtatcagcaggcaggattacctctcatcgtgctggcgggcaaggagtacggcgctgggtccagcagagactgggccgccaaagggccattcctcttggggattaaggccgtcttagccgagagctacgagcgcattcataggtctaatcttgtcggaatgggtgtaatcccgctggaatatctgccaggcgagaacgcagacgcactcgggctaacgggacaggagagatacactatcatcatccccgagaacctgaaacctcaaatgaaggtacaagttaagctcgacacgggcaaaacattccaagctgtcatgcggtttgatactgacgtggaactgacctattttctgaatggcgggatcctcaattatatgatcaggaagatggctaagtag

SEQ ID NO: 177644 - DNA, 2346 bp, synthetic construct
  misc_feature 1..2346: note = Description of Artificial Sequence: Synthetic coding sequence
  source 1..2346: mol_type = other DNA
cagctggagccccggagcgcccgggagcgggtgcccctgctgggcagcggttctccagtggcgggcgcgcccccctgctccaggaggaatacttggccgtccgtgataatgtcaaacccgttcgcccatctggccgagcccctggatcccgtgcagccaggaaagaaattcttcaatctgaataaactggaggattcaagatatggaagactgcccttttcaatccgagtcttgctggaagctgcaatcagaaactgcgacgagttcctcgtgaagaagcaggatattgagaatatcctccactggaacgttactcagcacaaaaacattgaggttccttttaagcctgcccgggtaattctacaggactttaccggcgtcccagcagtcgtagattttgccgcgatgagggacgccgtgaagaaactgggaggggaccccgaaaaaatcaacccagtgtgccctgccgacttagtcatcgatcactctatccaggtcgactttaacaggcgagccgacagcctgcaaaaaaaccaagatctagagtttgagcgcaacagggaacggttcgagtttctcaagtgggggtcacaggcctttcataacatgaggattatcccccccgggtcaggcataatacaccaggtaaacctggagtacctggcccgtgtcgtatttgaccaggatggatactattatcccgattcactcgttggcactgactctcacaccacgatgatcgacgggctcggtattttaggctggggagtggggggcattgaggcagaagccgttatgctgggacagccaatttccatggtgctcccacaggtcattggttaccgccttatgggcaaaccccatccactggttacaagcacagatatagtgctcacaattaccaaacatttacgccaagtcggggtagtcgggaaatttgtggaattctttggacctggcgtggctcaactgtctattgccgatcgtgccacaatagcaaatatgtgtcctgagtacggcgccactgctgcttttttccccgtggacgaggtctccattacatacctggtgcaaactggccgggatgaggagaagctgaaatatattaaaaagtacctgcaggccgttggcatgttccgggacttcaacgatccttcacaggatcccgacttcacacaggtggtagaacttgatctgaaaacggtggtgccttgctgttccgggcctaagagaccccaggacaaggtcgccgtgagtgacatgaaaaaagactttgagtcatgcctcggagcaaaacaggggtttaagggcttccaggtggcacctgagcatcacaatgatcacaaaactttcatttacgacaacaccgagtttactctggcacacggcagtgtagtgattgctgcaattacatcatgcacaaacactagtaacccctccgtcatgttgggggccgggctcctcgccaagaaggctgtagatgccggtctcaatgtcatgccttacatcaagacatcattgtctcctgggagcggggtggtcacctattatctgcaggagagcggagtgatgccctatctgagccagctcggcttcgatgttgtcggctatggttgcatgacatgtatcggcaattcaggccctcttcctgagcctgtcgttgaggccattactcaaggcgacctggtcgctgtgggagtgctgagcggcaaccgcaattttgaggggcgagtgcatccaaataccagagccaattacctcgcatcgcctcccctggttatcgcttacgcgattgccggaaccattcgtatagactttgaaaaggaaccactcggcgtcaacgctaaaggacaacaggtattcctgaaagacatttggcctactcgcgacgaaatccaggccgttgagagacagtatgtgatcccagggatgttcaaagaagtgtatcaaaagatagaaacggttaacgagagttggaacgcccttgctactccatccgataagcttttcttctggaattccaagagcacctacattaagtccccccctttcttcgagaacctgacgctggacctgcagccccccaagtccatcgtagatgcttacgtgctactcaatctcggagactcagttaccactgaccacatctcacccgctggaaatatcgcccggaattcccctgccgctcgttacctgaccaataggggtttcgagcggcaattaacccaggaaaacaccgatctatgcctgagcccacccctcctgacgagcctttctagcccactgaaactgtgggggcagttgttctgtcacggcgagcagtgtctcggcgatctggagaaatag

SEQ ID NO: 177645 - DNA, 2373 bp, synthetic construct
  misc_feature 1..2373: note = Description of Artificial Sequence: Synthetic coding sequence
  source 1..2373: mol_type = other DNA
atgcgggacgccgtgaagaagctgggcggcgaccccgagaagatcaaccctgtgtgccccgcagatctagtgattgatcactccattcaagtagatttcaataggcgcgcggatagccttcagaaaaaccaagacctcgagtttgagaggaacagagagcgatttgagtttctgaagtggggatcacaggctttccataacatgcggattatccccccaggctccggaataatacaccaggtgaatctggagtatctcgcgagggtggtgttcgatcaggacggctactactatccagattccctcgtgggcaccgactctcacacaacaatgatagatggtctaggtattctcggctggggcgtgggtggcattgaggccgaagccgtgatgctcggacagccaatcagtatggttctaccccaggttatcggctatagactgatgggcaagccgcacccgcttgtaacctccaccgatattgttctgacaatcacgaagcacttgaggcaagtaggggtggtcggcaaattcgttgagttctttggaccgggcgtcgcccagttgagcatcgctgaccgggctacaattgctaacatgtgtcctgaatatggagctaccgctgcattttttccagtggatgaagtctccattacttatctagtgcagacgggccgagatgaggagaaactaaagtacatcaaaaaatacttgcaggcggtgggcatgtttagggattttaacgacccaagccaggatcccgatttcacacaggtggttgaactggacctgaagaccgtggtcccctgctgctccggacccaaaaggccccaggataaagtcgctgtaagcgacatgaaaaaagatttcgaaagctgtctcggtgccaaacagggattcaaaggatttcaggttgctcccgaacatcataacgaccacaagacttttatctacgataacacagaattcactctggcccacggcagcgtggtgatcgcagccataacatcatgcactaacacaagcaatcccagcgttatgttgggggctgggctgttggccaagaaagctgtggatgcaggactgaacgtcatgccttacatcaaaaccagcctgtccccaggtagcggtgtcgtgacgtattatctacaggagtctggcgtcatgccgtatttgagccagctgggtttcgatgtcgtggggtacggctgtatgacctgtattgggaactctggacctctcccggaaccggtggtggaagccatcacccagggcgacttggtcgcagtgggagtcttgtctggcaacagaaactttgaagggcgggtgcaccccaataccagagcgaattatctggccagtccccctctggtgatcgcctacgccatagccggaacgatccggatcgacttcgagaaggagcctttgggtgtgaacgccaaggggcagcaggttttcctaaaagatatctggccgacccgcgatgaaatacaggccgtcgagagacagtacgtaatccccggcatgttcaaggaagtgtatcagaaaatcgaaacagttaacgaatcctggaacgccctcgccacaccctccgacaagctgttcttctggaacagcaagtcaacttacattaagtcccctcccttcttcgaaaacttgaccttggacctccagcccccgaaaagtattgtcgatgcatacgtgctacttaaccttggagactccgtcactacggatcacatctcccctgccggaaacatcgccagaaacagccccgcggcccgctatctaactaatcgcggactgactccacgcgaattcaattcttatgggagtcgccgcgggaacgatgccgtgatggcaagaggaacttttgcaaacatccgcttgctcaaccgctttctgaacaagcaggccccacagaccatccatttgcccagtggagagatactcgatgtattcgatgctgccgagaggtatcagcaagccggacttcccttgatcgtgctggcaggtaaagaatacggcgctggtagctccagggactgggcagcaaaagggccctttctgctcggcatcaaggccgtgctggccgagtcctacgagcgtatccacagaagcaatcttgtcggcatgggagtgattccactggaatatctgcctggtgagaatgccgacgctctgggcctgactggccaggagaggtataccatcatcatcccggagaacctgaagcctcaaatgaaagttcaggtgaaactggatacaggcaagacctttcaagccgtgatgagatttgatacagatgtggagctaacctacttcctcaatggagggattctgaattatatgattaggaagatggcgaaatag

SEQ ID NO: 177646 - DNA, 333 bp, synthetic construct
  misc_feature 1..333: note = Description of Artificial Sequence: Synthetic coding sequence
  source 1..333: mol_type = other DNA
atggccaagcaccaccccgacctgatcttctgccggaagcaggccggtgttgccatcggccggttgtgcgaaaagtgcgacgggaagtgtgttatttgcgattcctacgtgcggccctgtactttggtgcgtatttgcgatgaatgcaactacggtagctaccaggggagatgcgtaatatgcggcgggcccggcgtgtcggacgcatactactgtaaggagtgtaccattcaggaaaaggatcgcgacgggtgtcccaagattgtgaatttgggctcttccaagacagatctgttctacgagcgcaagaaatacggcttcaagaaacgatag

SEQ ID NO: 177647 - DNA, 2418 bp, synthetic construct
  misc_feature 1..2418: note = Description of Artificial Sequence: Synthetic coding sequence
  source 1..2418: mol_type = other DNA
atggccccctacagcctgctggtgacccggctgcagaaggccctgggagtaaggcagtatcatgtcgccagcgtgttatgtcaaagggcaaaagtcgccatgtcccattttgaacctaacgagtatattcattacgatctgctggagaagaacatcaatattgtgaggaaaaggctcaaccggccgctgaccttgtctgagaaaatcgtgtatggtcacctggatgaccctgcctctcaagaaattgaaaggggtaagtcatacctgaggctgcgccccgacagggtcgcaatgcaagacgccaccgcacaaatggcaatgctgcagttcataagctcaggcttaagcaaagtggccgtgccatcaacaatccactgtgaccacctcattgaggctcaagtcggaggtgagaaggatttgcggagagccaaggatattaatcaagaggtgtataactttcttgctacagccggagcgaagtacggagtcggattttggaagccaggatccggaattatccaccagatcattctcgagaattacgcctacccaggcgtacttctaatcggcacggactcgcatactcctaacggaggcggcctcggagggatctgcatcggagtagggggggccgacgccgtggacgtgatggccggcatcccgtgggagctgaagtgtcctaaagtgattggcgtaaaactgactggcagcctctcaggttggtccagccctaaagacgtaatcctgaaggtcgccgggatcctaactgtgaaggggggaactggggccatcgtcgagtatcacggccccggcgtagattctattagctgcacaggtgaggagggagggcaggctacctggcctttgccctgcgccgggccggacgggagcccagtgggctcgaggtctgggatggccaccatctgtaacatgggcgctgagatcggggccaccacgtccgtcttcccctacaatcacaggatgaaaaaatacctgagtaagacgggacgtgaagacattgcaaatttggctgacgaatttaaagaccacctggtccccgaccctggctgccactatgatcagctcattgaaatcaatctctcggagctgaaaccacacatcaacgggccattcacccctgacctggcacaccccgtcgctgaggtcggaaaggttgctgagaaagagggctggccccttgacattagagtcggcttaattgggagctgcaccaatagcagttacgaagacatgggaaggagcgccgccgtcgctaaacaagctctggcccacggactcaagtgtaagtctcagttcacaattaccccgggatctgaacaaatccgcgccacaatagagcgggatggttatgcgcagattctgagggacttgggcgggattgtcctcgccaatgcctgtggcccttgtattggacaatgggaccggaaagacattaagaagggggagaaaaacaccatcgttacatcttacaaccggaacttcacagggaggaatgatgctaatcccgagacgcatgcctttgtgaccagcccggaaatcgttactgccctcgctatcgcagggactctgaaattcaacccggaaacggattacttgacaggtaccgacgggaagaagtttagactggaagcaccggatgccgatgagctgcctaagggtgagttcgacccagggcaggacacttaccagcaccctcccaaagattcatctggacagcacgtagatgtcagccccacctctcagcggctgcagctgctggagccattcgacaaatgggatgggaaggacctggaggaccttcagatactgatcaaagtcaagggaaaatgtactacagaccacatctccgctgccggaccctggcttaaatttcgcggtcatttggataacatcagcaacaacctcctgattggggccattaatatagaaaacgggaaagcgaactctgttcggaatgctgtaactcaggagtttggacctgtgccggataccgcacggtactataagaagcatgggattcggtgggtggtgataggcgatgagaactatggagagggttcgtcacgggagcatgcagctctcgagccacgacacctcggtggtcgcgccatcattaccaaaagttttgccagaatccatgagaccaatcttaaaaaacaggggttgctccctcttaccttcgccgacccggcagattataacaagatccacccagtggacaagctgaccattcaggggttaaaggactttactcctggcaaacccctgaaatgtattatcaagcaccccaacggaactcaggaaacaatattgctcaatcacacgttcaatgaaacacagattgagtggttccgcgcagggagtgctctcaacagaatgaaggaactccagcaatag

SEQ ID NO: 177648 - DNA, 1506 bp, synthetic construct
  misc_feature 1..1506: note = Description of Artificial Sequence: Synthetic coding sequence
  source 1..1506: mol_type = other DNA
atggccaccatctgcaacatgggcgccgagatcggcgccaccacctcagtcttcccttataatcatagaatgaaaaaatatctgtctaaaacagggcgggaggacatcgccaacttagccgacgaattcaaggatcatctcgtccccgatcctgggtgccattacgaccagctgatcgaaatcaatcttagcgagctcaaaccgcatataaatggccctttcacccccgacttagcccatccagtggctgaggtggggaaggttgccgaaaaggaagggtggccactggacatccgggtaggcctgatcggttcgtgtactaacagcagttatgaagatatgggccggtcggccgcagtcgctaagcaagcccttgcacacggactgaagtgtaagtcccagtttactattacccccggcagcgagcagatccgtgccaccattgaacgcgacggctacgcacaaatactgagggacctggggggtatcgtgctggcaaacgcgtgcggtccttgcatcgggcagtgggacaggaaagacatcaaaaagggagaaaaaaatacaatagtgacatcctataaccggaacttcacgggtaggaatgacgcaaatccggagacgcatgctttcgtgacaagccccgaaattgtcacagcattagccatcgcggggacccttaaattcaaccctgaaaccgattatttaacgggaaccgatggcaagaaatttagactcgaggctcccgacgccgatgagttgccaaaaggcgagttcgatcccggacaagacacataccagcatcctcctaaggactctagcggccaacatgtggacgtcagcccaacttctcagcggctgcagctgctggaaccctttgacaagtgggatggcaaggatctggaagacttgcagatcttaatcaaagtaaagggcaaatgtacgacggaccacatctcggcagccggcccatggctgaagtttcgaggtcacctggacaacatcagcaacaacttactcattggagcaattaatattgagaacggcaaagctaactccgtgcgtaacgccgtaacccaggaatttggccctgtcccagataccgctcgttattataaaaaacacggcatccgctgggtggtgattggagacgaaaattacggagaaggctctagcagggagcacgccgctctggaaccgagacacctgggaggtagagctattatcacaaagtcctttgcccgcatccacgagaccaatttgaagaagcaggggctgcttccgctgacgttcgctgaccctgccgactataacaaaatacaccctgtagacaagttaaccattcagggcctaaaggattttacaccaggtaagcctctgaagtgcattataaaacatccgaacggtacccaggagactatcttgttgaatcatactttcaacgagacccaaatcgaatggtttcgtgccggcagcgcgctgaaccggatgaaggagctccagcagtag

SEQ ID NO: 177649 - DNA, 2286 bp, synthetic construct
  misc_feature 1..2286: note = Description of Artificial Sequence: Synthetic coding sequence
  source 1..2286: mol_type = other DNA
atggccccctacagcctgctggtgacccggctgcagaaggccctgggcgtccgtcagtatcacgtggccagcgttctttgtcagagagccaaggttgctatgagccactttgagcctaatgagtacatccattatgatctattagaaaagaacatcaacattgttcgaaagagactgaatcggcccctgactctgagtgaaaagattgtctacggtcatctggatgaccctgccagccaggaaatagagcgaggcaaatcttatctgagactccgccccgacagagtggctatggtcgccgtcccaagtaccattcactgtgaccatcttattgaagcccaggtgggcggcgagaaggatctgaggcgcgcaaaggacataaatcaagaggtgtacaactttttggcaactgcaggggctaaatatggtgtggggttctggaaaccaggctctggcatcattcatcaaataattctcgaaaactatgcttatccaggtgtgctcttgattggtaccgactcgcacactccgaatgggggaggtttgggcggaatctgcatcggcgtggggggcgctgatgcagttgatgtgatggctgggataccttgggagctcaaatgccccaaggtgatcggagtgaagctgaccgggagcctctcaggttggagctcccctaaggatgtgatcctgaaagttgctggcattctcacagtgaaaggtgggactggcgcgattgtggagtaccacggcccaggtgttgacagcatttcatgtactggcatggctactatttgcaacatgggcgccgaaattggggctactacatcagtcttcccttataaccatagaatgaaaaagtatctgtcgaaaacggggagggaggacattgcaaatcttgcagatgaatttaaggatcacctggtacctgaccccggctgtcactacgaccagctcatcgagatcaatctcagtgagctgaagcctcatattaacggacccttcacccccgatctggcacatccagttgcagaggtgggaaaagtcgccgagaaggagggttggccgctggatatcagagtcggcttgattggaagctgcacaaattcatcctacgaggatatgggacgctctgctgctgttgccaaacaggcgttggctcacggattgaagtgcaaatcccagttcacaatcaccccggggtccgaacagattcgggctaccatcgagagggatggctacgcacagattctgcgggatttggggggcattgtactggctaatgcatgcgggccatgtattggacagtgggatagaaaggatattaagaaaggggagaaaaacactatcgtaacgtcttataataggaactttacagggaggaatgatgccaaccccgagacccacgcattcgttaccagccctgaaatcgtcactgccctggcgatcgctggcacccttaagtttaatcctgaaacggactacctgacggggactgacgggaagaagtttcgactggaagccccagatgccgacgagcttcctaagggggaatttgaccccggccaggacacttaccagcaccctccaaaggactcatctggtcagcatgtcgacgtgtccccgacaagccaaagattgcagctgctagagccctttgacaaatgggacgggaaagatctagaagatttgcagatcttaattaaagtcaaagggaagtgtacaactgaccatatttcagcagccggaccttggttgaaattccggggccacctggacaatatcagtaataacctgttgataggggctatcaatatcgagaacgggaaggccaattccgttcggaacgccgttacgcaggagtttggacctgtaccagataccgctaggtattacaagaaacacgggataagatgggtcgtgatcggtgacgagaattacggcgagggatcttctcgcgagcacgcagcgctagagccgagacacttaggggggcgggcgattattaccaagagctttgccagaatccatgagaccaatctaaagaagcagggcctgttgccattgacattcgctgacccagccgattacaacaagatccacccagtggataagctgaccatccaggggctgaaggacttcactcccggcaagcccctgaagtgtatcatcaagcatcccaatgggactcaggagacgattctgctgaaccacacctttaacgagactcaaatagagtggtttcgggccggtagtgccctcaatagaatgaaagaattgcagcagtag

SEQ ID NO: 177650 - DNA, 756 bp, synthetic construct
  misc_feature 1..756: note = Description of Artificial Sequence: Synthetic coding sequence
  source 1..756: mol_type = other DNA
atggagctgagcgccatcggcgagcaggtgttcgccgtggagagcataagaaagaagcgggttagaaagggcaaggttgaatacctggtaaagtggaagggctggcccccaaagtatagcacctgggagcccgaggaacatatcctggacccacgccttgtaatggcgtacgaagaaaaagaggagcgtgatcgggcgtccggttacaggaagcggggacccaaaccaaagcgacttttgctgcaaaggctgtacagcatggatctgcgctcctctcacaaagctaaagggaaagaaaagctgtgcttctccttgacttgcccactcggatctggctccccagaaggggtcgtgaaggccggcgctccggagcttgtagacaaaggacctctggtacctactctgccatttcccctcagaaaaccaagaaaagctcataagtatttaagattgtccagaaaaaaattcccccccaggggccccaacctagagtcccatagccatcggagggagttattccttcaagagccgccagcccccgacgtcctccaggcagccggcgaatgggagcccgccgcacagcctcctgaagaggaggccgatgccgacctggcagaagggccaccaccatggactcccgcccttccgagcagtgaagtcactgttacggacatcactgccaattcaataacagttacttttagggaagcccaggcagccgagggtttctttagggataggagtggaaagttttag

SEQ ID NO: 177651 - DNA, 633 bp, synthetic construct
  misc_feature 1..633: note = Description of Artificial Sequence: Synthetic coding sequence
  source 1..633: mol_type = other DNA
atgaaccggttcctgctgctgatgagcctgtacctgctgggcagcgctaggggaactagttcacagcccaacgagctcagtgggtctatcgaccaccagacaagcgtccagcagcttcctggggaaccagctgcaacagaacatgccgagggcgagcacacagtcggagagcaaccatcaggagagcagccgagtggcgaacatttgagtggagagcagccactgtctgaactggaatctggagagcagccctccgacgaacagccatctggggaacacggttcaggcgagcagccatcaggcgagcaggcttccggcgaacagccctctggggagcatgcctccggcgagcaggcctcgggcgcaccaatctcgagcactagtaccggtactattctgaactgttacacttgtgcatatatgaatgaccaggggaaatgtcttcgaggggaggggacctgtatcactcagaactctcagcagtgcatgctgaagaagatattcgagggagggaaactgcagttcatggtgcaaggatgcgaaaacatgtgtcctagcatgaatctattttcccatgggaccaggatgcagataatctgctgtaggaaccagtccttctgtaataagatttag

SEQ ID NO: 177652 - DNA, 741 bp, synthetic construct
  misc_feature 1..741: note = Description of Artificial Sequence: Synthetic coding sequence
  source 1..741: mol_type = other DNA
atgaaccggttcctgctgctgatgagcctgtacctgctgggcagcgcgagaggcacgagttctcaacccaacgaactgagcggatcaatcgatcatcagaccagcgtccaacagctgcctggggagttttttagtctagagaatccctctgacgccgaggccctttatgaaacaagcagtggcctcaatacgctgagcgagcacggatcgtccgagcacgggtcctcaaaacacaccgtggccgagcacaccagcggggagcacgctgaatcagagcatgctagcggggagccagccgctaccgagcacgctgagggagaacacaccgtgggggagcaacctagcggtgaacaaccaagcggagaacacctctccggggagcaaccactcagcgaacttgagtctggcgaacagccttccgatgagcagcctagcggcgagcacggctctggggaacagccgagtggggagcaggcatcgggtgaacagccttccggcacgattctcaattgctatacttgtgcttatatgaatgaccaagggaaatgccttcggggggagggcacatgtattactcagaacagtcagcaatgtatgctgaagaaaatttttgaaggtggtaagcttcagttcatggttcaaggctgtgaaaacatgtgtcccagcatgaacctctttagccacggaacacggatgcagatcatttgctgccgcaaccagagcttctgcaacaagatctag

SEQ ID NO: 177653 - DNA, 468 bp, synthetic construct
  misc_feature 1..468: note = Description of Artificial Sequence: Synthetic coding sequence
  source 1..468: mol_type = other DNA
atgaaccggttcctgctgctgatgagcctgtacctgctgggcagcgccaggggtactagctcccagcccaatgaactaagcggatcaatcgatcaccaaacatccgtgcagcagctcccaggggaacagccctccggcgagcaaccaagcggcgagcatctcagcggggagcagcctctgagtgagcttgaatcgggggaacagccttcagatgaacagcctagtggcgagcatggcagcggtgaacaaccatcaggcgaacaggccagcggggagcagcccagtggggagcacgctagcggagaacaggccagtggagcccctatttccagcacatctacgggaggtaagttacaatttatggtccagggctgcgagaatatgtgtccgtccatgaatctatttagccacggcacacggatgcagattatctgttgccgcaatcagagtttctgcaacaagatttag

SEQ ID NO: 177654 - DNA, 498 bp, synthetic construct
  misc_feature 1..498: note = Description of Artificial Sequence: Synthetic coding sequence
  source 1..498: mol_type = other DNA
atgaaccggttcctgctgctgatgagcctgtacctgctgggcagcgcacgcggcactagttcacagcctaacgagctctctggtagcatcgatcatcagacttccgtgcagcagttgccaggagagccagcagcgaccgagcacgccgaaggggagcatacagtgggggaacagccttctggtgagcagccttctggcgagcacgcctccggggaacaggcgagtggggctcctatcagctcgactagtactggaacaatattgaactgctatacttgtgcctacatgaacgaccaaggtaaatgtcttcgcggagaaggaacgtgcattactcaaaattctcagcagtgtatgctgaagaagatcttcgagggtggcaaactccagttcatggtccaggggtgtgagaacatgtgcccatccatgaatctgttcagccatggaacaaggatgcagattatctgttgccggaaccagagcttctgcaataagatttag

SEQ ID NO: 177655 - DNA, 246 bp, synthetic construct
  misc_feature 1..246: note = Description of Artificial Sequence: Synthetic coding sequence
  source 1..246: mol_type = other DNA
atgaaccggttcctgctgctgatgagcctgtacctgctgggcagcgccagagggacgtcaagtcagccaaatgagctgagcggcagcattgatcaccaaaccagcgtgcaacagctcccggggggcaaactccaatttatggtgcagggctgtgaaaacatgtgtcccagtatgaacctcttctcccacggcacacggatgcaaattatctgttgcagaaatcagtccttctgcaacaaaatttag

SEQ ID NO: 177656 - DNA, 366 bp, synthetic construct
  misc_feature 1..366: note = Description of Artificial Sequence: Synthetic coding sequence
  source 1..366: mol_type = other DNA
atgaaccggttcctgctgctgatgagcctgtacctgctgggcagcgctcggggcacatcctcacagcccaacgagctgtctgggtccatcgaccaccagacctcagtccaacaactcccagggaccatcctgaactgttacacgtgtgcttacatgaatgaccagggcaagtgcttacgcggagagggtacttgtattacccaaaatagtcagcaatgcatgcttaaaaagatcttcgagggaggaaaactccagtttatggtccagggatgtgaaaacatgtgcccatctatgaatctcttttcccatggaacacgaatgcagattatctgctgtcgcaatcaatctttctgcaacaagatctag

SEQ ID NO: 177657 - DNA, 588 bp, synthetic construct
  misc_feature 1..588: note = Description of Artificial Sequence: Synthetic coding sequence
  source 1..588: mol_type = other DNA
atgaaccggttcctgctgctgatgagcctgtacctgctgggcagcgcacgaggaacctcatcgcagcccaacgagcttagcggatctattgatcatcagacatctgttcagcaactacccggagagcagcctagtggcgaacaacctagtggagaacacctgagtggcgagcagccactcagcgagctagaaagcggcgagcaaccatccgatgaacagccaagcggagaacacggcagcggtgagcagccttccggagagcaggcttcgggcgaacagccctcaggcgagcacgcttcaggtgagcaggcatccggcgcgcccatttcttccacctcaacgggtactatactgaattgttatacatgcgcttacatgaatgaccagggtaagtgcctcagaggagaggggacatgcatcacacagaactcgcagcagtgtatgctgaagaaaattttcgaaggcggtaagctgcaatttatggtgcaaggttgcgaaaacatgtgtccatccatgaacctgttctcacatgggacgcggatgcaaatcatatgctgtaggaaccaatctttctgtaacaagatctag

SEQ ID NO: 177658 - DNA, 741 bp, synthetic construct
  misc_feature 1..741: note = Description of Artificial Sequence: Synthetic coding sequence
  source 1..741: mol_type = other DNA
atgaaccggttcctgctgctgatgagcctgtacctgctgggcagcgcgagagggacctctagtcagccgaatgaactttcaggctcaatagaccaccagacatcagttcagcaactaccaggagagttcttctcactggaaaacccgtccgacgcagaggccttatatgagacttcaagcggcctgaataccctgtcagagcacggcagctccgagcatggctcctccaagcatacagtggcggaacacacatctggtgaacacgctgaaagcgagcacgcaagcggagagcccgccgctacagagcacgccgaaggcgagcataccgtgggggagcagccaagcggggaacagcctagcggcgagcacctgagcggcgagcaacctcttagcgaactggagtcaggagaacagccaagtgatgaacagccctctggggagcacggctctggggagcagccctcgggtgaacaggcttccggagagcagcccagtggaacgatactgaactgttacacctgtgcctatatgaatgaccagggcaagtgtttacggggggaaggaacctgcataacacagaattctcagcaatgtatgctcaaaaaaatttttgaaggcggcaagcttcagttcatggtgcagggatgtgaaaacatgtgtccttccatgaatctgtttagccatggcacaaggatgcaaattatctgctgccgaaatcagagtttttgtaacaaaatttag

SEQ ID NO: 177659 - DNA, 513 bp, synthetic construct
  misc_feature 1..513: note = Description of Artificial Sequence: Synthetic coding sequence
  source 1..513: mol_type = other DNA
atgaaccggttcctgctgctgatgagcctgtacctgctgggcagcgcacgcggaacgagtagtcagcctaacgaactgtcggggtctattgaccaccagacatccgtgcagcagttacccggcgaacagccaagcgacgagcaaccatctggggaacacggatccggagaacagccttcgggagagcaagcatccggcgagcagcctagcggcgagcacgcctctggagagcaggcgagtggagcgcccatttccagcacctcgacgggcacaattttaaattgctatacttgcgcttatatgaatgatcaaggaaaatgtctgagaggcgaagggacttgtatcactcaaaattcccagcaatgtatgttgaagaagatctttgagggaggcaagctgcagtttatggtgcagggttgcgaaaatatgtgcccctcaatgaatctgttttcccatggaacaagaatgcaaatcatctgctgccggaatcagagcttctgtaataagatatag

SEQ ID NO: 177660 - DNA, 531 bp, synthetic construct
  misc_feature 1..531: note = Description of Artificial Sequence: Synthetic coding sequence
  source 1..531: mol_type = other DNA
atgaaccggttcctgctgctgatgagcctgtacctgctgggcagcgcacgaggcaccagctcccagcccaatgagctcagcgggtctatagatcaccaaaccagcgttcagcaactccccggtgagcagccctctggggagcagccatcgggtgagcacctttcgggagagcagcctctctcagagctcgaaagtggcgagcagccgtccgatgagcagccttctggggagcacggaagcggcgagcagccgtccggggagcaggccagcggcgagcagccctctggcactatcctgaactgttacacctgtgcctatatgaatgaccagggaaaatgtttgaggggcgagggcacatgcattactcaaaattcccagcagtgcatgctgaagaagatcttcgagggcggcaaattacagttcatggtccaaggctgcgagaacatgtgtcccagtatgaacttgttctctcatggcacacgcatgcagattatctgctgtcgcaatcagagcttttgcaataagatctag

SEQ ID NO: 177661 - DNA, 588 bp, synthetic construct
  misc_feature 1..588: note = Description of Artificial Sequence: Synthetic coding sequence
  source 1..588: mol_type = other DNA
atgaaccggttcctgctgctgatgagcctgtacctgctgggcagcgctagagggacgagctctcagcccaacgaactgtcaggttccatagatcatcagacaagcgtgcaacaattgccaggtgaacaacctagtggagagcaacctagtggagagcatttgagcggcgaacaacctctctccgaactcgaaagcggagagcaaccctctgacgagcagccttccggcgaacacggcagtggtgagcagcctagcggtgagcaggcaagcggtgaacagccatccggggaacatgcatcaggagagcaagcatcaggagccccgatttctagcacatcaacagggactattcttaattgctacacctgcgcctatatgaatgaccagggaaaatgcctccgcggcgagggaacctgcataacccagaacagtcagcagtgcatgctaaaaaagatcttcgagggaggcaagcttcagttcatggtgcaaggatgcgaaaacatgtgccccagcatgaacttgttcagccacggaacaagaatgcagataatatgttgccgcaatcagagcttttgtaataagatttag

SEQ ID NO: 177662 - DNA, 633 bp, synthetic construct
  misc_feature 1..633: note = Description of Artificial Sequence: Synthetic coding sequence
  source 1..633: mol_type = other DNA
atgaaccggttcctgctgctgatgagcctgtacctgctgggcagcgcacgcggcacctcttctcagccaaatgaattaagcggctctatagatcatcaaacatccgtgcaacagttgcctggggagcccgcggccacagagcacgccgaaggagagcatactgtaggtgaacagcccagtggcgaacagccttccggagagcacttaagcggtgagcagcccctgagtgagcttgagagtggcgagcagccgtccgatgagcaacctagcggtgaacatggatctggcgagcagccctccggtgagcaggcgagcggggaacagccaagtggagagcacgcctcaggggagcaggcatcaggagctccaatctcttccacctcaaccgggacgattctgaattgctatacctgcgcttatatgaatgatcagggcaaatgccttcggggcgaggggacttgtattacacaaaactcacagcagtgcatgcttaagaagattttcgaaggggggaagctccagttcatggtacagggatgtgagaatatgtgcccaagtatgaatctgttctctcatggcacgcgcatgcaaatcatctgttgcagaaaccagtcattctgtaacaaaatctag

SEQ ID NO: 177663 - DNA, 798 bp, synthetic construct
  misc_feature 1..798: note = Description of Artificial Sequence: Synthetic coding sequence
  source 1..798: mol_type = other DNA
atgaaccggttcctgctgctgatgagcctgtacctgctgggcagcgcccggggaacctccagccaaccaaatgagctttctggctccattgaccaccaaaccagcgttcagcagctgcctggcgagtttttttcattggaaaaccccagcgacgccgaggccctgtatgagacgtctagtggactcaatactctgtctgagcatggttcctcggagcacggatcatcaaaacacaccgtggctgagcacacttcaggagaacacgccgaatcagagcacgcttccggggagccagctgccacagagcacgctgagggagaacataccgtgggcgaacagcccagtggagagcagccttccggagagcacctgtccggcgaacagcccctctccgagttggaaagtggggaacaaccgtccgatgagcaaccaagcggcgaacatggatccggcgagcagcccagcggggaacaagcttccggagaacagccgtcaggagagcatgccagtggagagcaggctagcggcgcccccatctcatctacatcaacaggcactatcctgaattgctacacttgcgcgtatatgaatgaccagggaaaatgtctcagaggagagggcacgtgtatcacccagaactcccagcagtgtatgctcaagaagattttcgaaggcgggaagctacagtttatggtgcagggatgtgagaacatgtgtccatctatgaatcttttttcacacggcacacggatgcagattatttgctgtcgaaatcaatccttttgtaataagatttag

SEQ ID NO: 177664 - DNA, 1722 bp, synthetic construct
  misc_feature 1..1722: note = Description of Artificial Sequence: Synthetic coding sequence
  source 1..1722: mol_type = other DNA
atgagcgccgtgagccagccccaggccgcccccagccccctggagaaatcacctagtacagcaattctgtgcaatacgtgcggaaatgtctgcaagggggaggttctccgagtgcaggacaaatatttccatatcaagtgcttcgtgtgcaaggcctgtggttgtgatctcgctgaaggcggcttctttgtgcgacaaggagagtacatttgcacgctggattaccagcggctgtacggtacacgttgcttcagctgtgatcagttcatagagggggaagtggttagtgccttgggcaagacatatcacccagactgtttcgtctgtgcagtctgtagacttccatttccacccggcgatagagtaacttttaatggaaaggagtgcatgtgtcagaagtgttccctgcctgtgagcgtcggttcctccgcacaccttagccagggcctccgcagctgtgggggctgtggcactgagatcaaaaacggtcaagctctggtggccctggataagcattggcacctgggctgcttcaaatgtaaatcttgtggtaagctgcttaacgcagaatacatatccaaagacggcctaccgtactgcgaggctgattaccacgccaaatttggtatcagatgtgattcctgtgagaaatatattacgggtagggtattagaggcaggcgaaaaacattaccatcccagctgtgccctttgcgtgcgctgtgggcagatgttcgcggaaggagaagagatgtaccttcaggggtcctccatttggcatcctgcctgtagacaggcagcaagaacagaggataggaacaaagagacacgcactagctcagagtcgattatttctgtgccagcgtccagcacctcgggaagcccatctcgggtgatctatgctaagcttggcggtgagatcctagactatcgcgacctggccgccctgcctaaatctaaagctatatacgacattgacagacctgatatgataagttactcaccttacatctcgcactctgcaggggaccggcaatcttatggggaaggcgaccaggacgataggagttacaagcagtgccgaacctctagcccttcctcaacaggtagtgtctcactgggtagatatacccctacatcacgctccccacaacactatagccggcccgggagcgaatcaggcaggagcactcccagcctgtcggtgctgtcagattctaaacctcccccctcaacctatcagcaagcacctaggcatttccatgtcccagatactggcgtcaaggacaatatttacaggaaacccccaatttaccgccaacatgccgcacgtcggtcagatggggaagacggtagcctcgatcaggacaaccggaagcagaagtcatcatggttgatgttaaaaggagatgccgacactcggacaaactcacctgatcttgacacacagtctctgtctcattcttccggaactgaccgggatcctcttcaaaggatggcaggagattcatttcactcacgcgagaaaatttacccttacgattctctgattgtgactaaccgcattagagttaagctgcctaaggatgtagatcggacccgactggagcggcacctgagtcctgaggagtttcaagaagtgttcggaatgtcaatcgaggagttcgatagactcgctctctggaaacgcaatgatttgaagaagaaagcacttctattttag

SEQ ID NO: 177665 - DNA, 1041 bp, synthetic construct
  misc_feature 1..1041: note = Description of Artificial Sequence: Synthetic coding sequence
  source 1..1041: mol_type = other DNA
atgttcgccgagggcgaggagatgtacctgcagggcagcagcatctggcatcccgcctgccgtcaggcggcgcgcacagaggaccgaaacaaagaaacaaggacaagtagcgagagcatcatctctgtgcccgcgtcctcaaccagcggcagtcctagtagagtgatctacgcaaaactgggcggcgagatcctggactaccgggatctcgctgctctcccgaaaagcaaagctatctacgacattgacagaccagacatgatttcatactcgccctacatcagccactcagcaggagatagacagtcctacggcgagtcaccccaactcctaagcccgacgccaactgagggggatcaggatgacaggtcatataaacaatgtaggacatcaagcccgtctagcacggggagtgtaagtctggggaggtatacacctaccagcagatcaccacagcactacagtcgccccgacaccggagtcaaggataatatctaccgcaaacctcccatttaccggcaacacgccgcgaggagatccgacggcgaggacggcagtctggatcaggacaaccgtaagcagaagagttcttggctgatgctgaaaggcgatgctgacacccggacgaacagccctgacctggacactcaatctctgtcccacagcagtggcactgaccgagaccctttacaacgcatggccggagattctttccattcaaggttcccgtactctaaatcagatcccttgccgggccatgggaagaacggcctcgatcagcgcaacgccaatctcgcaccttgcggggctgaccctgacgccagctggggaatgcgggagtataagatctatccctatgatagcctaattgtcaccaaccgcatcagagtaaaattacctaaggacgtggatcgcacaaggctggagagacacctgtcccctgaggaattccaggaggtctttgggatgagcatcgaggagttcgacagactcgctctgtggaagcgcaatgatctaaagaagaaagccctgcttttctag

SEQ ID NO: 177666 - DNA, 1836 bp, synthetic construct
  misc_feature 1..1836: note = Description of Artificial Sequence: Synthetic coding sequence
  source 1..1836: mol_type = other DNA
atgagcgccgtgagccagccccaggccgcccccagccccctggagaagtccccttccaccgcaatactatgtaacacatgcgggaacgtatgtaaaggcgaggtcttacgcgtacaggacaagtattttcacattaaatgttttgtgtgcaaagcttgtggctgcgatctggctgagggaggattcttcgtgcggcagggagagtatatttgcacccttgattaccagcggttatatgggactcgttgtttttcctgcgaccaattcatcgagggcgaagttgtctcagctcttggaaagacataccaccctgactgcttcgtctgcgctgtgtgtcggctgcccttcccaccaggagaccgagtgaccttcaatggcaaggagtgcatgtgtcagaaatgttcgctgcccgtgtcagtgggctcgtctgcccacctatcacaaggccttagaagctgtggaggctgcggaacggagatcaagaacggacaagcactggtcgccctcgacaagcactggcacctgggatgcttcaaatgtaagtcctgcgggaaacttcttaatgccgaatatatctccaaagacgggctcccttactgtgaggccgattaccacgccaaattcggcatcagatgcgatagttgtgagaagtacatcaccggcagagtcctggaggccggtgagaaacattaccaccccagctgcgccttatgcgtgcgctgtggccagatgttcgccgagggtgaagaaatgtacctccaggggagttccatttggcaccctgcctgtagacaagccgccaggaccgaggacaggaacaaagaaacgagaacctccagcgagagcatcatatccgtcccagcaagctctacgagtggttcaccatccagggtcatttacgctaaactgggaggggagattctggattacagagacctcgccgcactcccaaagagcaaagcgatctatgatatcgacagacctgacatgatctcttattctccatatatcagccatagcgcaggagatcggcagtcgtacggcgagggagatcaggatgatagaagctacaagcagtgcagaactagttcacctagctcaaccggtagtgtgagtctgggcaggtacacccctactagcaggtctcctcaacactattcaagaccagggagtgagtccggcaggtcaactccaagcctttcagtgttgagcgatagcaagccccctccgtctacctatcagcaggctccccggcatttccacgtacccgacacaggagtcaaagataatatttatcggaaaccccctatttaccgtcaacatgctgctcggcgcagtgatggtgaggatggatcgcttgaccaagacaaccgcaagaaatcgtcgtggctgatgctaaagggggacgccgacacccggaccaactctcctgatcttgacacccagagcttaagccattcttctggcacagaccgcgaccctttgcagaggatggcgggagactcattccactcacggtttccatatagcaaatctgatccactccctggacatggaaaaaatgggctcgaccaacgtaatgccaacctagcaccatgcggagcagacccggatgcctcatggggtatgagggaatacaaaatctatccctacgattctctaatagtgaccaaccggatcagggttaaactgccaaaggacgtcgaccgcacccgcctcgagcggcatctcagccccgaggagttccaagaggtgttcggcatgtccattgaagaattcgatcggctggccctgtggaaacggaacgatctcaaaaaaaaagccctcttgttttag

SEQ ID NO: 177667 - DNA, 1719 bp, synthetic construct
  misc_feature 1..1719: note = Description of Artificial Sequence: Synthetic coding sequence
  source 1..1719: mol_type = other DNA
atgagcgccgtgagccagccccaggccgcccccagccccctggagaagtccccctctacggccatcctgtgcaatacctgcggtaatgtgtgtaagggcgaggtccttagggtccaggataagtacttccatatcaagtgttttgtctgtaaggcttgcggttgcgacttggccgaaggtggatttttcgtgagacaaggtgagtatatctgcacactggattatcagaggttgtacggtacccggtgtttttcctgtgaccagttcatcgaaggggaggtggtatccgcgcttggcaaaacctatcatccagattgttttgtttgcgccgtttgtcgtctgccttttcccccgggggatcgagtgacctttaatggcaaggagtgtatgtgccagaagtgttctctgccagtgtcagtggggagttccgcccatctctcacagggactgcgcagctgtgggggctgcggcacagaaataaagaatggacaggctctggttgctctcgataagcattggcacttaggatgctttaaatgcaaatcatgcgggaagcttctcaacgccgaatatatctccaaggacggcttgccctactgcgaggcggactatcacgccaaatttggcatcaggtgcgatagctgtgagaagtatatcactggcagggtactagaagccggtgagaagcactaccatccctcctgcgccttgtgtgtccgctgtggacagatgttcgcagagggggaagaaatgtatctgcaggggtcaagcatatggcaccccgcatgcaggcaggcagctcgtacagaggacagaaacaaagaaacccgcacgagtagtgaatctattataagtgtgccagcctcatccacgtccgggtccccaagccgagtgatctacgccaaactaggtggcgaaatactggactatcgggacctggcagcactccctaaatctaaagccatctatgacatagatcgcccggacatgatcagttactcaccctatatctcccacagtgccggcgacaggcaaagctacggtgagggcgaccaggacgaccgcagctataagcagtgccgtacttcttctccatcatccacgggctccgtgagtctcggaagatatacacccacgtcccggagcccgcagcactacagccggcccggcagcgaatctggccggtctaccccttccctcagcgtgctttcggattcaaagcccccaccctctacataccagcaggcacccaggcatttccacgtgcccgacaccggcgtgaaagataacatttaccgaaagcctccgatataccgccaacacgccgcaagaagatcagacggtgaggatggctccctggatcaggacaaccggaagaaaagttcctggctgatgcttaaaggcgacgccgacacccgcactaactctcccgatttagacactcagtccctcagccactcatccggcacagatcgagatcctttgcagagaatggcaggggattccttccacagtcagtacaaaatctacccatacgattccttaattgtgacgaaccgaatccgggtcaaactgcctaaggacgtggaccgcacccgtttagagaggcacttatctccagaagaattccaagaggtcttcggtatgtcgatcgaagaatttgaccggctggcgctgtggaagcgcaacgatctcaaaaagaaagcactgctgttctag

SEQ ID NO: 177668 - DNA, 1596 bp, synthetic construct
  misc_feature 1..1596: note = Description of Artificial Sequence: Synthetic coding sequence
  source 1..1596: mol_type = other DNA
atgagcgccgtgagccagccccaggccgcccccagccccctggagaagagccccagcactgctatactgtgtaatacctgtgggaacgtgtgtaaaggtgaggttctgagggtacaggataagtacttccatattaaatgtttcgtatgcaaagcttgtgggtgtgatttggcggaggggggcttttttgtgcgtcagggcgagtatatttgcacattagactaccagagactgtatggcacccgctgttttagctgtgatcagtttatagagggagaggtggtatcagccctggggaagacgtatcacccagattgtttcgtgtgcgccgtctgtagacttccctttcctcctggggacagggtcacattcaacggaaaggagtgcatgtgccagaaatgtagcctgcccgtttccgtcgggagctctgcccacctgagccaaggcctgcgctcgtgtggaggatgcggcactgagattaagaatggccaagcactggtggctctcgacaagcattggcaccttggatgtttcaagtgcaaatcctgtggaaaactgttgaacgcagaatatatctcaaaagacggcctgccttattgcgaggctgactaccatgcaaaatttggcatcagatgtgattcctgcgagaaatacatcacgggcagggtcctggaagccggagagaagcactatcacccttcttgtgctctctgtgtaaggtgcgggcaaatgttcgctgaaggtgaggagatgtatctccagggatcttcgatatggcatcccgcatgtagacaggctgcccggaccgaggacagaaataaggagacccggacatcgagcgagagcatcatttccgtgcctgcttctagcacttctggttccccctctcgcgttatttacgcgaaactgggtggggaaatcctggattatcgcgatctcgctgcgttacccaaatctaaggccatctatgacatcgataggccagacatgatttcctattctccgtatattagccatagcgcaggagacaggcaatcatatggtgagagtcctcaactcctttcgcccactcctacagagggcgaccaggacgaccgttcttacaaacagtgcaggacaagcagtccatcttctaccgggagcgtaagcctaggtaggtataccccaacttcacggtctccacagcactattcccggccagctgccaggcgatctgacggggaagatggcagcctggatcaggataataggaaaaagtcatcctggttgatgctcaagggcgacgccgataccaggaccaactctcctgacctcgatacgcagtcactgtcgcattcgagtggaactgatcgcgaccccctgcagaggatggccggcgactcattccactctcaatacaaaatctatccatacgacagcctgatcgtgaccaatcgcatcagggtgaaacttcctaaggacgtggaccggacacgcctagaacggcatctctccccagaagaatttcaggaagtgttcggtatgtcaattgaggagttcgatagattggccctgtggaagcggaatgaccttaaaaagaaggccctccttttttag

SEQ ID NO: 177669 - DNA, 1935 bp, synthetic construct
  misc_feature 1..1935: note = Description of Artificial Sequence: Synthetic coding sequence
  source 1..1935: mol_type = other DNA
atgagcgccgtgagccagccccaggccgcccccagccccctggagaaaagtccttccacggctatcctctgcaatacatgcggcaacgtttgcaaaggggaggttttgcgggtgcaggacaagtatttccatattaaatgtttcgtgtgcaaagcgtgtggatgcgatttagccgagggagggttctttgtcagacaaggggaatatatatgtaccctggattatcagcgcctgtatggaactagatgtttcagctgcgaccagtttattgaaggggaggttgtcagcgctctggggaaaacatatcaccccgactgtttcgtatgcgccgtgtgtagactgccttttccaccaggcgaccgcgtgacctttaatggcaaggaatgtatgtgccagaaatgctccctgcccgtatctgttggctcatccgcacatctctctcaggggttacggtcttgtggcggatgcggtaccgaaattaagaatggccaggcacttgttgctctggacaaacattggcaccttggatgcttcaaatgcaagtcatgcggtaaacttctcaacgccgagtatattagtaaggatggcctcccatattgcgaagctgactaccacgctaaattcggcataaggtgcgacagctgtgaaaaatacataactggcagggttctggaggctggggagaagcactaccatcccagctgcgccctgtgtgtgaggtgcggacagatgttcgcagaaggcgaagagatgtacctgcaagggagctccatctggcaccctgcgtgccgccaggccgcgcggactgaggaccgaaacaaggagacaaggaccagttctgagtccataatttccgtgcccgcaagtagcacgagcggaagtccatcaagggtgatctacgcgaagttaggaggtgaaatcctggactatagggacctcgccgcgctccctaagtccaaagcgatatatgacatcgacagaccggacatgatctcttatagtccatacattagccattcagcaggcgacaggcagtcttacggagaaggggaccaggacgataggagttacaagcagtgtcggacgagtagtccaagttccaccggttccgtgagcttggggcggtatacccctacaagtagatccccccagcattacagcaggccagccggaaccgtctccgtcgggacctctagctgcctctctttgtcgcagcaccccagccccacttcagtctttcgtcaccactacattccatattttcgggggagtgagtctgggcgcagtaccccttccctgtcagtcctctctgactctaaacccccacctcctcccaccagtcgccatctcgcaactcatgttcccgacactggagtaaaggacaacatctatcgaaaacctccaatttatcgtcagcacgcagccaggaggtctgatggggaagatggatcccttgaccaggataacaggaaacagaaaagcagctggctcatgcttaaaggcgacgccgacacccgcaccaatagcccagatctggacactcagtccttgagtcattcctcagggacagacagagatcccttgcaacgcatggctggagacagcttccactcgagatttccttattcaaagtccgacccgctaccgggccatggcaaaaatggactggatcagaggaatgcaaatctcgcgccttgtggagccgacccagacgcaagttgggggatgcgcgaatacaagatatatccctatgactcactgattgtgaccaaccgcatcagagtgaaacttcctaaggatgttgaccggacccgtctagaacggcacttgagcccggaggagttccaggaggtattcggtatgtccatcgaagagttcgatagactggcactgtggaaacgcaatgacctaaagaagaaagcactgctcttttag

SEQ ID NO: 177670 - DNA, 1566 bp, synthetic construct
  misc_feature 1..1566: note = Description of Artificial Sequence: Synthetic coding sequence
  source 1..1566: mol_type = other DNA
atgagcgccgtgagccagccccaggccgcccccagccccctggagaaatcacccagcacggcaatactttgtaacacctgcgggaatgtatgtaagggcgaggtgctgagagttcaggacaagtatttccacattaagtgcttcgtttgcaaagcatgcggctgtgacctggccgaggggggcttcttcgttagacaaggggagtatatatgtacccttgactaccaaaggctgtacggaactcgctgtttttcttgcgatcagtttatagagggggaagtggtatcggctctcggcaagacctatcaccccgattgcttcgtgtgtgccgtttgtcgactcccattcccacccggcgatcgagtgaccttcaacggaaaggagtgtatgtgccagaagtgttctcttccagtaagcgttggctcttcagcacacctctcccagggcctacgcagctgcggtggctgcggtacagaaataaaaaatggacaggccttggtagctctggataagcactggcacctgggctgcttcaagtgtaaatcctgtggtaaactactaaatgccgagtacatcagcaaagatggactgccttactgcgaagccgattaccacgccaaatttggaatccgctgcgactcctgtgaaaaatatattaccggcagagttctggaggctggcgaaaagcactatcacccaagctgtgccctttgtgtgcggtgcggccagatgtttgccgagggtgaggagatgtacctccaggggagttctatatggcatcctgcctgtagacaagccgctaggacagaagacaggaacaaagaaaccaggacctcctcagagagtattatcagtgtccctgcttcttccacatccgggtcccctagtcgggttatatatgccaagctcggcggagagatcttggattatcgagatctggctgcgctgcctaagtccaaagctatttacgacatcgatagaccggacatgatcagctattcaccctatatcagtcattccgctggagatcgccagtcctatggcgagggtgatcaggacgaccgatcttataaacaatgtagaacaagtagcccctcctccacagggagtgttagtctcggcagatacacaccaacatctagatccccacagcactacagcagacccgctgcacgacgatcagacggagaggacgggtctctcgatcaggataaccgcaagcagaagtcttcctggttaatgctcaaaggcgacgccgatacgcggacgaatagcccagatctggacacgcagtccctatctcactcatcgggaaccgatcgcgatcctcttcagagaatggctggggactcttttcatagccaatacaagatctatccatatgactccctgatcgtgacaaatcggattcgtgtcaagctcccgaaggatgtcgaccggactcggcttgagcggcatctgtcgccagaggagtttcaggaggtttttggaatgtccatagaggaatttgaccgcttagccctgtggaagaggaatgatctcaagaagaaggctctcctgttttag

SEQ ID NO: 177671 - DNA, 1413 bp, synthetic construct
  misc_feature 1..1413: note = Description of Artificial Sequence: Synthetic coding sequence
  source 1..1413: mol_type = other DNA
atgagcgccgtgagccagccccaggccgcccccagccccctggagaagagtccgtccactgcaattctgtgtaacacatgcggaaacgtgtgtaagggggaagtgctccgggtacaagacaagtacttccatattaagtgcttcgtttgcaaggcgtgcgggtgtgatttggcggaaggaggattttttgtccgccaaggggagtatatctgtaccttagattaccagcgtttgtatggcacacgctgttttagctgcgatcagttcatagagggggaagtggtatctgctctcggaaagacctatcatcctgactgcttcgtgtgtgctgtgtgccgcctcccctttccccctggcgatagggtaactttcaacggcaaggaatgtatgtgccagaagtgctccctccctgtttccgtggggagcagtgcccatctcagtcagggtctacggtcttgcggaggatgcggcacggagataaagaacggccaagctctggtcgccctggataagcattggcacttgggatgctttaaatgcaaatcatgcggaaagttgttgaacgccgagtacattagcaaggatggactgccatactgcgaggcagactatcatgcaaaatttggaatcaggtgcgatagctgtgagaagtacataactggccgggtgctcgaagcaggagagaagcactaccacccatcttgtgcactgtgtgtcagatgcgggcaaatgtttgctgagggtgaagaaatgtacttacaggggtcatctatctggcatccagcctgccggcaggcagcacgcactgaagaccgtaataaggaaacgcggacgtccagcgaatctattatatcagtccccgctagctccacttccggaagtccttctcgcgtcatctacgctaaactgggcggagaaatactggattacagggacctggccgccctacctaagtccaaagcgatctacgacatagacaggcctgacatgatcagttacagcccatatattagtcatagcgcgggcgatcggcagtcgtacggagagagtccacagttgctctctcctacaccaacagaaggtgaccaagatgaccgctcatataagcagtgccgtacctcgtcacctagcagcacaggttcagtgagcctgggacggtatacccctacatccagaagcccacagcattacagtcggcccgccgcacgtagaagcgatggtgaggatggaagcctggaccaagacaatcggaagcagaaatcaagctggctgatgctgaagggagacgccgatactcgaactaacagtcccgacttggacacccagagcttgtctcacagcagcgggactgacagggaccctctccagagaatggctggtgactcttttcattcccgagaatggttcttttag

SEQ ID NO: 177672 - DNA, 1938 bp, synthetic construct
  misc_feature 1..1938: note = Description of Artificial Sequence: Synthetic coding sequence
  source 1..1938: mol_type = other DNA
atgagcgccgtgagccagccccaggccgcccccagccccctggagaagtcccccagtactgccattctgtgcaacacctgtggtaatgtctgcaaaggtgaggtgctgcgtgtacaggacaagtactttcacatcaaatgtttcgtgtgtaaggcctgcggttgcgatctggccgaaggcggcttttttgttagacagggagagtacatttgcactctcgattatcagcgcctgtacgggacacggtgcttctcttgtgaccagtttatcgaaggcgaggtcgtctctgccctcggaaagacctaccaccctgactgctttgtgtgcgctgtgtgtagattgccttttccgcctggagaccgggtgacttttaatggaaaagagtgcatgtgtcaaaaatgctctctgcctgtgagcgtgggaagctccgcgcatctgagccagggacttaggtcttgtggcggctgtgggaccgaaatcaagaatgggcaggcactggtggccctggacaagcactggcacctcggctgcttcaagtgtaaaagctgcggcaagttgttaaacgctgagtatatctcaaaagatggcctcccctactgcgaagccgactatcatgccaaatttggcatcaggtgcgactcttgtgagaaatacattaccggcagagtgttagaggccggcgagaagcattaccatccaagctgtgctctgtgcgtgcggtgcgggcagatgtttgccgagggagaagagatgtatctgcaggggagtagtatttggcatcccgcttgtcgccaagccgcacgtaccgaggacaggaacaaggagactaggacgtctagtgaatcgattatcagcgtccctgcttccagcacatctgggagcccgagccgagttatctatgcaaaactcggcggcgagatcctggattaccgggatctagctgcactgcccaaatcgaaagctatctacgatatcgacaggcctgacatgatttcttattcaccgtacatctcccacagtgcaggcgaccgccaaagctatggagagggcgaccaggatgatcggtcttacaagcagtgccgcacttcaagtccatcaagcacaggttccgttagtctggggcgatacactcctactagtaggtcgcctcagcactattccagacccgccggcaccgtgtccgtcgggacaagctcttgtctgtccctgagccaacacccaagccctaccagcgtttttcgtcaccactatatcccttatttccggggatccgagagtggaaggtctactccctctctttccgtcttatctgacagcaaacctcccccatcaacatatcagcaggcccctagacattttcatgttcctgatacgggcgtgaaggacaatatataccggaagcctcctatttatagacaacatgcggcccgtagaagtgacggtgaagatgggtccctcgaccaagataaccggaagcagaagtcttcgtggctaatgttgaagggcgacgccgacactcgcactaattcccccgacctggacacccaaagcctgtcacactcaagtggcacagacagagaccctttgcaacgaatggctggggatagcttccattcacgctttccttattcgaaaagtgatcccctgcccgggcacggaaaaaacggtcttgatcagaggaacgccaaccttgcaccctgtggagctgatcctgatgcgtcgtggggcatgagggaatacaaaatctatccatacgactccttaatcgtcaccaacaggatcagagtaaagctccctaaagacgttgacagaactcggctggagcggcacctctcacctgaggaattccaggaggtgtttggcatgagtatcgaggaatttgaccggcttgccctttggaagcggaatgacttgaagaagaaggcacttttattctag

SEQ ID NO: 177673 - DNA, 1680 bp, synthetic construct
  misc_feature 1..1680: note = Description of Artificial Sequence: Synthetic coding sequence
  source 1..1680: mol_type = other DNA
atgagcgccgtgagccagccccaggccgcccccagccccctggagaagtccccctctactgcaatactctgcaatacttgcggcaacgtctgcaagggggaagtactccgcgtgcaagacaagtactttcacatcaagtgcttcgtgtgcaaagcttgcggatgtgacctggccgagggaggcttcttcgtgcgtcagggagaatatatatgtacactggactaccagcgactgtacggtactaggtgcttcagctgtgatcagtttatcgaaggggaggtggtgtccgcgctcggaaagacttaccaccccgattgttttgtgtgcgcagtgtgccgcttgcccttcccacccggcgatcgcgtgacctttaacggaaaagagtgcatgtgtcagaaatgttccctccctgtgtcagttgggtccagtgcccacctgtcacagggcctccgctcgtgtggcgggtgtggtacagagattaaaaacgggcaggccctggttgccctcgataagcattggcatcttggttgtttcaagtgtaaaagttgcggtaaactcctgaacgcggagtacatatcaaaggatggactgccttactgcgaagcagactaccatgcgaaatttgggatcagatgcgattcctgtgagaaatacatcaccggccgtgtgctcgaagctggagagaagcattatcacccttcgtgcgcactctgtgttcgttgcgggcagatgtttgcagagggagaggagatgtacctgcaaggcagctccatatggcaccctgcttgtagacaggctgctcgaacggaggatagaaataaggagacaaggacctcaagtgaatcgattatctctgttccggcttcgagcacttctgggtctccttctcgggtgatatatgctaagctgggtggggaaattctggactatcgggacctcgccgcgctccccaaatctaaagccatctatgatattgatcggcccgacatgattagttattccccgtacataagtcactcagccggggataggcaatcctatggagaaggagaccaggatgaccgatcatacaagcaatgccggacatctagcccctcctctactggtagcgtgtccctgggacggtacacaccaacttctcgatccccccagcattattcgagacccgccgctagaagatctgacggggaggacggatctctcgatcaagacaacaggaagaagtcatcatggctcatgttaaagggagatgccgacactcggaccaactctccagatctagatacccagagtctttcgcattcgagtggaacagaccgagacccactgcagaggatggccggggactcttttcacagccggttcccgtacagcaagagtgacccgctgcccggacatgggaaaaacggacttgatcagcggaacgcgaatctagccccttgtggggcagacccggacgccagctgggggatgagagagtacaagatctacccatatgatagtctgatcgtgaccaatagaattcgagtcaagctgcccaaagacgtggacaggaccaggttagaacgacatctgagtcctgaagaattccaggaggtttttgggatgtccattgaggagtttgatagattggctctttggaagcgtaacgatctaaaaaaaaaggctttactgttctag

SEQ ID NO: 177674 - DNA, 1041 bp, synthetic construct
  misc_feature 1..1041: note = Description of Artificial Sequence: Synthetic coding sequence
  source 1..1041: mol_type = other DNA
atgttcgccgagggcgaggagatgtacctgcagggcagcagcatctggcaccccgcctgtcgacaagccgcccggaccgaggatagaaacaaagaaactcgaacttcttcagaatctataatcagtgtgccagccagttccacgagcggttcccctagccgggttatatatgcaaaactcggaggggaaatactggactaccgtgatctcgcagccttgccgaagagcaaggccatctacgatatcgaccgccccgatatgatttcatactcaccatacatatcacactctgctggtgatcgccaatcttacggggaatcaccgcagctcctaagccccacacccacagagggagatcaggacgaccggtcatacaagcaatgccgaacttcctcaccgtctagcaccggctcagtttccctgggacgctatacccccacatcccgaagccctcaacactattcgaggcccgataccggagtgaaagataacatttatagaaaacccccaatttacaggcagcatgcagccagaagatctgacggagaagatggtagcctcgaccaggataaccgcaagcagaagtcaagctggctgatgctcaagggggatgctgacacaaggacaaactctccagaccttgacactcagtctctctctcattcatcaggcaccgatagggatccactgcaacgaatggcaggtgattcattccattctagatttccttattccaagtcagatccactacctggccacggtaagaatggattggaccagagaaatgccaaccttgccccttgtggcgcagatcccgacgcaagctggggtatgcgggaatacaaaatttatccttacgactccctcatcgtgactaaccgaatcagggtcaagctgcctaaggatgtggatcgaactcggctcgagcgacacctcagccccgaagagttccaggaggttttcgggatgtctattgaggaatttgaccggctggcactgtggaagagaaacgacctcaagaagaaagcgcttctgttctag

SEQ ID NO: 177675 - DNA, 1716 bp, synthetic construct
  misc_feature 1..1716: note = Description of Artificial Sequence: Synthetic coding sequence
  source 1..1716: mol_type = other DNA
atgagcgccgtgagccagccccaggccgcccccagccccctggagaagtcacccagtaccgctatcttgtgtaatacatgcggaaacgtttgcaagggcgaggtcctccgcgtgcaagacaaatacttccatatcaaatgtttcgtgtgtaaagcctgcgggtgcgacttggctgagggggggttttttgtcaggcaaggggaatatatatgcaccttggactatcagcgtctgtatggcacaaggtgtttctcatgtgatcagtttattgagggagaagtggtgagcgccctgggcaagacgtatcatcctgattgttttgtgtgtgcagtatgtcgacttcccttccccccaggagatcgagtgacttttaacggcaaggagtgtatgtgtcagaaatgctcgctgccggtctctgtcggttcatctgcacacctgtctcagggactgagaagttgcgggggatgcggcaccgaaattaaaaatggacaggctctggtcgccctggacaagcattggcacctcggatgttttaagtgcaaatcctgtgggaagctgttgaacgccgagtacatcagcaaggatgggctgccatattgtgaggccgactaccacgccaaattcggaatcagatgtgactcatgcgagaagtatattacaggccgcgtgctggaagccggagagaaacattatcatcccagctgcgctctgtgcgtgaggtgcggccagatgttcgccgagggcgaagagatgtacctgcaggggtcttcgatatggcatcctgcttgccgtcaggcagcacgaacagaggacaggaataaagagacaagaactagctccgaatctattatctctgtgccggcatcttctacaagtgggagcccctctagagtgatttacgccaaacttggaggagaaatccttgattaccgcgacctggccgcactccccaagagcaaggccatctacgacattgacaggccggacatgatctcgtattctccttacataagccacagcgctggcgatcgccagtcctacggggagggagaccaggatgaccgctcttacaaacaatgcaggacttcttcccctagcagtactggctcggttagcctggggcgatacacacctacctctcgatccccccaacattactcacggccaggctccgaatccggacgctccaccccatccctgagtgtcctgtctgactctaaacctccacccagtacatatcagcaggctcccaggcacttccacgtgcccgacacaggcgttaaggataacatttatcgtaagcctccaatctacaggcagcacgccgcgagaagaagcgacggcgaagatggcagccttgaccaggataataggaagaagtcatcctggctgatgctgaagggggacgctgacactcgcacaaattcacctgatttggatacccagtctctgtctcacagcagtgggaccgaccgggacccacttcagcgaatggcaggggactcattccattcacagcaaatttacccttatgatagccttatcgtcacgaacagaataagagttaaactgcctaaggatgtcgacagaactaggctggagagacacctcagccccgaagaattccaggaagtattcggcatgtccatagaagagttcgaccgcttggccctctggaaaaggaatgatctgaagaaaaaagcactgttattctag

SEQ ID NO: 177676 - DNA, 1596 bp, synthetic construct
  misc_feature 1..1596: note = Description of Artificial Sequence: Synthetic coding sequence
  source 1..1596: mol_type = other DNA
atgagcgccgtgagccagccccaggccgcccccagccccctggagaaatcgcctagtacagcaattttatgcaatacctgtggtaatgtgtgcaagggggaggtactgagagtgcaggataagtactttcacattaagtgttttgtctgtaaagcctgcggctgcgatctcgcagagggcggtttcttcgtcagacagggtgaatatatctgtactctggattatcagagactttacgggacacgctgcttctcatgcgatcagtttatcgaaggcgaggtggtgtcagctctgggcaagacgtatcaccccgactgcttcgtgtgcgcggtctgccggcttccattcccaccaggcgatagagtgactttcaacgggaaagagtgcatgtgccaaaaatgtagtctgcccgtgagcgtcggatcatccgcgcatctgagtcaaggcctccggtcttgtggcggttgcggaaccgagatcaagaatggccaggctctggtggcactggataaacactggcacctaggctgttttaagtgcaaatcctgcggcaaactcttgaacgccgagtacatcagtaaagacggtctgccatattgcgaagcagactaccacgccaagtttggcatccgatgtgacagctgtgaaaaatacatcaccggtcgggtactcgaagcaggtgagaagcattatcacccctcgtgtgccctgtgcgtccggtgtgggcagatgtttgcagagggagaggaaatgtatttgcaggggtctagtatctggcatcctgcatgccgccaggccgcccgcacagaagaccggaataaagagacccggacatcctctgaatcaatcatttcagtgcctgcgtcatcgacctcaggtagtccgagtagggtcatctatgccaaactgggtggcgagatcctggattacagggaccttgccgctttaccaaaatctaaagccatctacgatatagataggccagatatgatttcgtattccccatatattagtcactccgcaggagataggcagtcatacggggaaagccctcagctgttgagccccaccccgactgagggagaccaggatgacagatcctacaagcaatgtcggacatcctccccatccagcacgggctctgtctcactgggacgatacactcctacaagtaggagtcctcagcactattcgcgccctgccgcacggagatccgatggcgaggacggcagcctggatcaggataaccggaagaagagcagctggctcatgctcaaaggggatgcggatacccgtaccaatagtcctgacctggacacccagtcactgagccattcctctggcaccgatagagatcccctgcagcgcatggccggggactcgttccactctcgggagcagatctacccttacgatagtttgatcgtgaccaaccggattcgagtgaagctgccgaaggacgttgatcgcacaagacttgagagacatttgagccctgaggagtttcaagaggtgttcgggatgagcattgaagaattcgacaggctggcactgtggaagagaaacgaccttaagaagaaagccctgttgttttag

SEQ ID NO: 177677 - DNA, 2193 bp, synthetic construct
  misc_feature 1..2193: note = Description of Artificial Sequence: Synthetic coding sequence
  source 1..2193: mol_type = other DNA
atggaggagctgatcgtggagctgcggctgttcctggagctgctggaccatgagtatctaaccagtactgtgagagaaaaaaaggccgtaattaccaatatcctcttacgaatccaaagcagcaagggattcgacgtcaaagaccacgcacagaaacaggaaactgcaaactctctgccagcgcctccccaaatgcctctacctgagattccacagccatggctgccacccgattccggccctcccccattgccgacatcctcgctgcccgaaggctattacgaggaggcagtgccgctctcacctgggaaagctccagagtatattacctcaaactacgatagcgatgcgatgtccagcagctacgagtcctacgacgaagaagaggaagacgggaaaggaaaaaaaacccggcaccagtggccaagcgaagaggccagtatggatctcgtgaaagatgcaaagatttgcgccttcctcctacggaaaaagcggttcggccagtggaccaaactgctgtgcgtcatcaaagacaccaagctgctttgctacaaatctagtaaagatcagcagccacaaatggagctgccactccaaggatgtaatataacttacatccctaaagactctaaaaaaaaaaagcatgaactcaagataacccagcagggcactgatcccctcgtcctggcagtgcagtcaaaagagcaagctgagcagtggctgaaggtaattaaggaggcctattcaggatgcagtggacccgttgattctgagtgccccccacccccatcatctccagtgcacaaggccgagcttgaaaagaagctgtcctcagaaaggccatcaagcgatggggagggtgtagttgaaaacggaatcacgacttgtaacggcaaggaacaggtaaagcgaaagaaatcatcaaaatccgaagctaagggaacagtttctaaagtgacgggaaaaaagattacgaagataatttccctcggcaaaaagaagccatccacagatgaacagactagctcagccgaggaggatgttcctacctgtgggtatttaaacgtgctgagtaattcacggtggcgagagcggtggtgtcgagtaaaagataacaagctcatattccacaaagaccgaactgatctgaagacacacatcgtctccattccactgagaggctgcgaagtcatcccgggactagatagcaagcatccgcttacttttaggctcctccgtaatggccaagaggttgccgttcttgaagcatccagctctgaggatatgggtagatggattggcattttgctggcggaaacgggatcttcgactgatcccgaggcattgcattacgactatatagacgtagaaatgtctgctagcgttattcaaacagccaagcagactttttgcttcatgaaccggagagtgatctccgcaaatccttacctgggggggacaagcaacggctacgcacatccaagtggcacagcactacattacgatgatgtgccttgtattaatggctctctgaagggcaagaagcctcccgtcgcaagcaacggtgtcacggggaagggaaaaacattgtctagccagccgaagaaagcagaccccgcagccgttgttaagcggactggctcaaacgccgcccagtataagtatggaaaaaatagagtcgaggcggacgccaagcggctccagaccaaagaagaggaacttctgaagaggaaggaagcactgcgaaatcgtctggcccagctcaggaaggaaagaaaggatcttcgcgccgctattgaggttaacgccggaagaaaaccccaagctatcctcgaggagaagctgaagcagctggaagaggaatgtcgccagaaggaggccgaaagggtctctctggagcttgagcttacagaggtcaaggaatccctcaaaaaggccttagccggcggtgtgacgctgggcctggcaattgagcctaagtccgggacttcttcgccccagagccctgtgtttcgtcaccggaccctcgaaaacagtcccatcagttcgtgcgatacaagtgataccgaaggacctgtgcccgtaaacagcgcggccgtgttgaaaaaaagccaagccgcacccggatcatctccctgtcgcgggcacgtccttcgaaaagcgaaagagtgggaactaaagaatggaacgtag

SEQ ID NO: 177678 - DNA, 2193 bp, synthetic construct
  misc_feature 1..2193: note = Description of Artificial Sequence: Synthetic coding sequence
  source 1..2193: mol_type = other DNA
atggaggagctgatcgtggagctgcggctgttcctggagctgctggaccatgagtatctgactagcactgttcgcgaaaaaaaagccgtgatcacaaatatcctgctcagaatccagtcaagtaagggttttgacgtcaaagatcatgcccagaagcaggaaaccgccaattctctgcctgcgcctcctcagatgcccctgcccgagatcccccagccatggttaccacccgattccggccctcctccactgccaacctcttcactgccagaaggctactacgaggaagccgtgcccctctcgcctggaaaagcccctgaatacataacaagcaattacgattcagacgccatgtccagctcatatgagtcctacgacgaggaagaggaagatgggaagggtaaaaagacccgtcatcagtggccttctgaggaagcaagcatggatctggtaaaagacgctaaaatctgtgcatttttactgcgcaagaaaagattcgggcagtggactaaactcttatgcgtgatcaaagacacaaagctgctttgctacaagagtagcaaggatcagcagccacagatggaattgcctcttcagggatgcaacatcacatacattcccaaggattctaagaaaaagaagcacgaattaaaaatcacacagcagggaacagaccctctggttcttgctgtgcagtctaaggagcaggcagagcagtggctgaaagtgattaaagaagcctattccgggtgttccggacctgtggactccgagtgtccaccccctccgtcatcacctgttcacaaagccgaacttgagaagaaactctctagcgagagaccatcctcagacggagagggagtggtagagaatgggatcacaacttgtaacgggaaggagcaggtcaaaagaaaaaagagttccaaatcagaagcaaaagggacagtgtctaaggtgactggcaagaagattactaagattatctctctggggaaaaagaaaccgagcacggatgaacagactagtagtgctgaggaagacgtcccaacctgcgggtacctgaatgtgctatctaattctcgctggagggagcgctggtgtagagtcaaggataataaactgatcttccataaggaccgcactgacctcaagacacatatagtctctattcccctccggggatgtgaggttatccccggtttagacagcaagcaccctctgaccttccgcctgctgcggaacggacaggaagtggccgtgctggaggcgagcagtagtgaagacatggggagatggattgggattcttctggccgagacaggttcaagcacagatcctgaagcgctccactacgattatatcgatgttgagatgagtgcaagcgtgattcagaccgcgaaacaaaccttttgcttcatgaacagacgagtaatcagcgctaacccttaccttggagggacctcaaacggctatgctcatccctcagggaccgccctgcattacgatgatgtcccatgcataaatggctcacttaaggggaaaaagccaccggttgcgtcaaacggtgtcacaggaaaaggcaaaaccctctcatcccagccgaaaaaagctgaccctgcagcagtggtcaaacgtactgggtcgaatgctgcacaatataagtacggcaagaaccgtgtcgaagctgacgcgaaacgtctgcagactaaggaggaggagttactcaagcggaaggaggccctgagaaacaggctggcccaactgcggaaggagcgtaaagatctgcgagctgctatagaggtaaatgcgggccggaagccccaggccatcctggaggaaaaactgaaacagctggaagaggagtgtaggcagaaggaggccgagagagtcagcctagaactggagcttacagaagtgaaagaatccctcaaaaaggccctagctggaggggtaacgctcggattggcaattgaacctaagtctggtacttctagtccccagtcccccgtatttcggcaccgaacgctggaaaacagccccatctcatcttgcgatacttctgatactgagggcccggtcccggtgaatagtgccgcagtgcttaagaaaagtcaagctgcacccggcagttctccctgtcggggacatgttctgcggaaggcaaaagagtgggagctgaagaatgggacctag

SEQ ID NO: 177679 - DNA, 2445 bp, synthetic construct
  misc_feature 1..2445: note = Description of Artificial Sequence: Synthetic coding sequence
  source 1..2445: mol_type = other DNA
atggaggagctgatcgtggagctgcggctgttcctggagctgctggatcacgaatacctcacctctacggtgcgagagaagaaggctgtcatcacaaacatcctgctgaggatccagagctccaaaggctttgacgtcaaggaccacgcccagaagcaagagactgccaacagcttacctgccccaccgcagatgcccctgcctgagatcccccagccttggttgccgcctgacagtggtccgccaccattaccaacctcaagtcttcccgaaggctactacgaggaggcagtgcccctgagcccaggcaaagcgccagagtacatcactagtaattacgattcggacgctatgtcttcgtcgtacgagagttacgacgaagaagaggaagatgggaaagggaagaaaaccaggcaccaatggcccagcgaggaggcatccatggatttagtaaaggatgctaagatttgtgccttcctcctgcgcaaaaagagatttggtcagtggactaaacttctgtgtgtgatcaaggataccaaactcctgtgctacaaaagcagcaaagatcagcaaccgcagatggagcttcccttgcagggctgtaatattacctacattcccaaagactccaagaagaaaaagcatgagctgaaaatcacacaacaagggacggatcctctggtgctagctgttcagagcaaagagcaggccgaacaatggctaaaagtgataaaagaggcttacagcgggtgtagcggtcccgtggattcagaatgtcctccccctccgtcctcccctgtgcacaaggcagaacttgaaaaaaagctgtcttctgagcgtcctagtagcgatggcgaaggcgtagtggaaaacggcatcaccacatgcaacggcaaggagcaggtgaaaaggaagaagagctccaagagtgaagccaaaggcactgttagcaaggttacagggaaaaaaataacaaagattatcagtctcggaaagaaaaagccttcgacggatgaacaaactagtagcgccgaggaagacgtgccaacttgcgggtaccttaatgttcttagcaacagcagatggagagagagatggtgtcgtgtgaaggataataagctcatttttcacaaagaccggacagatcttaagacacacatcgtttcaatccccctcagggggtgcgaggttattccaggactggactctaaacatcccctcactttccgcctgttgcgcaatggacaggaagtagccgtgttagaggcaagcagttctgaagacatggggcgctggatcggcatcctattggctgagactgggtcttcaaccgaccctgaagccctacattacgattacatcgacgtcgaaatgtccgccagcgttattcagaccgcaaagcagaccttttgctttatgaataggagagtaatatccgccaacccatatctggggggaacatcaaatgggtatgcccatccaagcggaaccgcacttcactacgacgacgtgccctgcattaatggtagctgggaacctgaagacggtttcccagcctcttgcagtaggggcctcggagaggaagtgctctacgataacgccggtctttatgacaatcttcctcccccacacatttttgcacgttatagcccagcagaccggaaggcatcccgcttgagtgcagacaaattgtctagcaaccattataaataccctgcaagcgcccagtccgttaccaatacttcttccgttggcagggcgtcacttgggctgaactcacagcttaaaggaaaaaagccaccagtagcatcaaatggagttaccgggaagggtaagacgctctcaagtcagcccaaaaaggctgatcctgccgctgtagtcaaacgtaccgggtcaaacgccgcccaatacaagtatggtaaaaatagagttgaagctgatgcaaagcggctgcagaccaaggaagaggagctacttaaacgtaaagaagctctgagaaaccgactagctcaactgcgtaaagagaggaaggaccttcgggccgcaatcgaggtgaacgctggccgtaaaccccaagccattcttgaagagaagctcaagcagttggaagaggagtgtagacagaaggaagccgagagagtttcgttggaactggaactgactgaggtgaaagaatctcttaagaaggctcttgctggtggtgtgaccctgggcctcgccattgaacccaaatcaggtacaagctcccctcaatctcccgtgttcaggcatcgcactctggaaaattctccaatcagtagctgtgataccagcgataccgaggggcccgtgcctgtaaacagcgctgctgtgctaaagaagagccaggcagctcctgggagttccccctgtcgcggacacgtgttgaggaaagcaaaagagtgggagctgaagaacggaacctag

SEQ ID NO: 177680 - DNA, 2307 bp, synthetic construct
  misc_feature 1..2307: note = Description of Artificial Sequence: Synthetic coding sequence
  source 1..2307: mol_type = other DNA
atggaccggggccaggtgctggagcagctgctgcccgagctgaccgggttgctgtcgttactcgaccacgaatatctttctgacaccacactagagaaaaagatggctgtagccagcatccttcaaagccttcagcctctgccagctaaagaagtgagttatctctacgtgaacaccgccgatcttcattctggcccgagctttgtcgagagtttattcgaggagtttgactgcgatcttagcgatctgagagacatgcctgaggacgatggcgagccctccaagggcgcgtcccccgagcttgctaagagcccccggctcagaaacgccgctgacttaccgccaccactgccaaacaagcctccccccgaagattactacgaggaggccctacccttaggccccggaaagtcccccgaatacatcagcagtcacaatggctgtagccccagtcatagcattgtggacggatattacgaggacgcggactcctcatatcctgctactagagtgaacggagaactaaagagctcctacaacgattccgatgccatgtcctccagctacgagtcatatgatgaagaagaggaggaaggtaagtccccccagccaaggcaccagtggccaagcgaggaggcatctatgcacctggtccgagagtgtaggatctgcgcgtttctgctgagaaaaaagcgcttcggacagtgggccaagcagctcacggtgattcgcgaggatcaacttttatgctacaagagttctaaggatcgccagccccatttgcggctggccctcgacacatgctctataatctatgtccccaaggattctaggcataagagacacgagctgcgctttacacagggcgccactgaagttcttgtacttgcattgcagtccagagagcaagctgaggaatggttgaaggtgattcgcgaggtcagcaaacctgtcgggggtgccgagggtgtggaggtgccacgcagcccggtgctcctgtgtaagctggacttagacaaacggcttagtcaggaaaaacagacctccgacagcgactccgtcggagtgggcgacaactgcagcacactggggcgaagagagacctgcgaccatggcaagggcaagaaatcttcactggctgaactgaaggggtccatgagtcgcgccgcaggtcgcaaaataacgagaataatcgggttttcaaagaagaagactttggctgacgatctgcagacttcctccaccgaagaggaagtgccatgctgtggctaccttaatgtgctagtgaaccagggttggaaagaacggtggtgtagattaaagtgcaataccctgtacttccataaggaccacatggacctccggactcatgtcaacgccattgccttgcaggggtgcgaggtggctccaggttttggaccacgtcatccttttgcattccgaattcttaggaaccggcaggaggtggccatactcgaggcatcttgttccgaagatatgggacggtggttgggtcttctacttgtggagatgggatcccgcgttaccccggaggctctgcactacgactatgtcgacgtcgagaccttaacgtcgatcgtttccgccggtcgcaacagttttttgtatgcacggtcctgccagaatcaatggcctgaacctcgcgtttatgatgacgtgccttacgaaaagatgcaggacgaggagcccgagaggcccacgggcgcacaggtgaagcggcacgccagttcatgttcagaaaagagccaccgtgtggatccccaggtcaaagtcaagcggcatgccagcagtgcaaaccagtataagtatggaaaaaaccgagccgaggaggacgcccgtaggtacctcgtggagaaagagaaattagagaaggagaaagagacgattcggacagagttgatcgcgctgcgccaggagaaacgggagctcaaggaggctattcgctccagtcctggggccaaacttaaagccctggaagaggccgttgcaacactcgaggctcagtgccgtgcaaaagaagagcggcgtattgacctggagctcaaactggtggccgtgaaggagcgattacagcagagtctggccggtggccctgcgctcggactgtccgtctcttccaaacctaagtccggggagactgcgaataagccacagaacagcgtcccagaacaacccttgcccgtgaactgcgtcagtgaactgaggaagcgtagtcctagcatagtcgcatccaaccaggggcgggtgcttcagaaagccaaagaatgggaaatgaaaaagacatag
